United States Patent Application Publication US 2026/0201011 A1 - sequence listing, part 2

SEQ ID NO: 4341 - protein, 855 aa, Homo sapiens
MAALGVAEAVAAPHPAEGAETAEAVELSRALSRLLPGLEADSKPGRRRALEALRRALEEPGPAADPTAFQGPWARLLLPRLLRCLSDPAEGCRALAVHLLDLGLRRAARPRDALPRLLPALAARLAGPVPARRPPEACEELRLALVQLLGLAVDLCGAALAPHLDDALRALRCSLLDPFAAVRRESCSCAAALAQATPDHFHMQSESLIGPLMQTISHQHWKVRVAAIEATGAVIHFGNGKSVDDVLSHFAQRLFDDVPQVRRAVASVVGGWLLCLRDRYSFFHKLIPLLLSSLNDEVPEVRQLAASLWEDVGLQWQKENEEDLKDKLDFAPPTPPHYPPHERRPVLGCRELVFRNLSKILPALCHDITDWVVGTRVKSAQLLPVLLLHAEDHATQHLEVVLRTLFQACTDEEAAVVQSCTRSAELVGTFVSPEVFLKLILSTLKKTPSASGLLVLASAMRGCPREALQPHLAAIATELAQAHICQASENDLYLERLLLCVQALVSVCHEDCGVASLQLLDVLLTIVALAGATGLRDKAQETMDSLAMVEGVSSCQDLYRKHIGPLLERVTASHLDWTAHSPELLQFSVIVAQSGPALGEALPHVVPTLRACLQPSQDPQMRLKLFSILSTVLLRATDTINSQGQFPSYLETVTKDILAPNLQWHAGRTAAAIRTAAVSCLWALTSSEVLSAEQIRDVQETLMPQVLTTLEEDSKMTRLISCRIINTFLKTSGGMTDPEKLIRIYPELLKRLDDVSNDVRMAAASTLVTWLQCVKGANAKSYYQSSVQYLYRELLVHLDDPERAIQDAILEVLKEGSGLFPDLLVRETEAVIHKHRSATYCEQLLQHVQAVPATQ

SEQ ID NO: 4342 - protein, 280 aa, Homo sapiens
MTGGAREKAHIARSPATAQGPALGEALPHVVPTLRACLQPSQDPQMRLKLFSILSTVLLRATDTINSQGQFPSYLETVTKDILAPNLQWHAGRTAAAIRTAAVSCLWALTSSEVLSAEQIRDVQETLMPQVLTTLEEDSKMTRLISCRIINTFLKTSGGMTDPEKLIRIYPELLKRLDDVSNDVRMAAASTLVTWLQCVKGANAKSYYQSSVQYLYRELLVHLDDPERAIQDAILEVLKEGSGLFPDLLVRETEAVIHKHRSATYCEQLLQHVQAVPATQ

SEQ ID NO: 4343 - protein, 196 aa, Homo sapiens
  SITE 1: note = misc_feature - Xaa can be any naturally occurring amino acid
XLCARCAAPCSTPSPPCAARAAAAPPPWRRPRPVRRAVASVVGGWLLCLRDRYSFFHKLIPLLLSSLNDEVPEVRQLAASLWEDVGLQWQKENEEDLKDKLDFAPPTPPHYPPHERRPVLGCRELVFRNLSKILPALCHDITDWVVGTRVKSAQLLPVLLLHAEDHATQHLEVVLRTLFQACTDEEAAVVQSCTRS

SEQ ID NO: 4344 - protein, 657 aa, Homo sapiens
  SITE 1: note = misc_feature - Xaa can be any naturally occurring amino acid
XSPPCAARAAAAPPPWRRPRPHWKVRVAAIEATGAVIHFGNGKSVDDVLSHFAQRLFDDVPQVRRAVASVVGGWLLCLRDRYSFFHKLIPLLLSSLNDEVPEVRQLAASLWEDVGLQWQKENEEDLKDKLDFAPPTPPHYPPHERRPVLGCRELVFRNLSKILPALCHDITDWVVGTRVKSAQLLPVLLLHAEDHATQHLEVVLRTLFQACTDEEAAVVQSCTRSAELVGTFVSPEVFLKLILSTLKKTPSASGLLVLASAMRGCPREALQPHLAAIATELAQAHICQASENDLYLERLLLCVQALVSVCHEDCGVASLQLLDVLLTIVALAGATGLRDKAQETMDSLAMVEGVSSCQDLYRKHIGPLLERVTASHLDWTAHSPELLQFSVIVAQSGPALGEALPHVVPTLRACLQPSQDPQMRLKLFSILSTVLLRATDTINSQGQFPSYLETVTKDILAPNLQWHAGRTAAAIRTAAVSCLWALTSSEVLSAEQIRDVQETLMPQVLTTLEEDSKMTRLISCRIINTFLKTSGGMTDPEKLIRIYPELLKRLDDVSNDVRMAAASTLVTWLQCVKGANAKSYYQSSVQYLYRELLVHLDDPERAIQDAILEVLKEGSGLFPDLLVRETEAVIHKHRSATYCEQLLQHVQAVPATQ

SEQ ID NO: 4345 - protein, 68 aa, Homo sapiens
AEGEGLVLPKKIRVRSAVEQWLVNVEKSMFDVLKKFLSQGIEDWNCQMFSQWVLSHPGQVVLTVTFAI

SEQ ID NO: 4346 - protein, 130 aa, Homo sapiens
DYLEVKRLIFPRFYFLSNAELLDILADSRNPESVQPHLVKCFENIKQLLIWKQDIGPPAVKMLISAEGEGLVLPKYDKCYKLFRFCTTSLFKISALKFLIYYKSALSKLFLQRLYPYVNILLPFHIPYNT

SEQ ID NO: 4347 - protein, 430 aa, Homo sapiens
METFIPIDLTTENQEMDKEETKTKPRLLRYEEKKYEDVKPLETQPAEIAEKETLEYKTVRTFSESLKSEKTEDYLRESIIQQHMVSPEPASLKEKGKSRRKKDQTHACPNVRKARPVSYDRTEPKDDDVIRNIIRLREKLGWQTILPQHSLKYGSSKIAIQKITLKKPLEDDGEFVYCLPRKSPKSLYNPYDLQVINIVGSVKEVELIPTLEWLSERRHYYLLRQFKIFSDFRMNKAFVTWKLNVKRIKTEKSRSFLYHHLFLADDLFQTCLVYIRGLCEDAINLKNYNDHENNLSAICLVKLDSSRTYSLDEFCEEQLQQATQALKQLEDIRNKAISEMKSTFLKVAEKNEIKEYFESKLSEDDTTHFKLPKYRRLLETFFKFVMLVDYIFQELIRQLMNTAVTLLLELFNGSAGMPFSVEKKNENLIR

SEQ ID NO: 4348 - protein, 228 aa, Homo sapiens
METFIPIDLTTENQEMDKEETKTKPRLLRYEEKKYEDVKPLETQPAEIAEKETLEYKTVRTFSESLKSEKTEDYLRESIIQQHMVSPEPASLKEKGKSRRKKDQTHACPNVRKARPVSYDRTEPKDDDVIRNIIRLREKLGWQTILPQHSLKYGSSKIAIQKITLKKPLEDDGEFVYCLPRKSPKSLYNPYDLQVVSAHTAKHCKEFWVITASFISKRYLVICGAVYI

SEQ ID NO: 4349 - protein, 228 aa, Homo sapiens; identical to SEQ ID NO: 4348

SEQ ID NO: 4350 - protein, 4515 aa, Homo sapiens
METFIPIDLTTENQEMDKEETKTKPRLLRYEEKKYEDVKPLETQPAEIAEKETLEYKTVRTFSESLKSEKTEDYLRESIIQQHMVSPEPASLKEKGKSRRKKDQTHACPNVRKARPVSYDRTEPKDDDVIRNIIRLREKLGWQTILPQHSLKYGSSKIAIQKITLKKPLEDDGEFVYCLPRKSPKSLYNPYDLQVVSAHTAKHCKEFWVITASFISKVINIVGSVKEVELIPTLEWLSERRHYYLLRQFKIFSDFRMNKAFVTWKLNVKRIKTEKSRSFLYHHLFLADDLFQTCLVYIRGLCEDAINLKNYNDHENNLSAICLVKLDSSRTYSLDEFCEEQLQQATQALKQLEDIRNKAISEMKSTFLKVAEKNEIKEYFESKLSEDDTTHFKLPKYRRLLETFFKFVMLVDYIFQELIRQLMNTAVTLLLELFNGSAGMPFSVEKKNENLIRTFKDNSFPTGKTTNDCEELVDNSKLHAISVQKSEVKTDTDINEILNSVEVGKDLRKTYAPIFEVNLCLRIPAESDSSENSKENFHESDQCPEECVMFEDEMSENKDNCVKKHSSEELLPKAKKSKEISYNLEDIISDTEIETEFENKYMYYEFPEFPTNLFIDPNRLEFSVKIQNMLTNMEKCITTITPLCQDPQLSIFIDLVSIMDLPNKTGSIIHYKEQTRWPDCHILFETDPAYQNIIVNLLTIIGNSMGLVNAYSHKFIKYCTMTEKAKIMSMKISSMGELTSKEFEAILNRFRNYFRHIVNMAIEKRIGIFNVVSLDYQSECLLYIDNVIHMSHTLIQSVIEKKNKNLLEVVESSLQQLECDPTEIEEFLEHFIFLNAISSKISKLEKEFLTMSQLYSVAKHHQIHISEEQIAIFQVLLLKFSQLKSSMKLSKINKDTAITKFRDNLEACISGLHVDVGNLKAKIRTPLLLCAGTQVSTAMEMIQTLSGEAASLTNKAKAYSHYQDCFSDSQSHMHSVNVEEITQIVLSEISDIEGDLTLRKKLWEAQEEWKRASWEWRNSSLQSIDVESVQRNVSKLMHIISVLEKGLPKSDMVTHLKQVVTEFKQELPIIIALGNPCLKPRHWEALQEIIGKSVPLDKNCKVENLLALKMFQYENEINDMSTSATNEAALEKMLFKIIDFWNTTPLPLILHHTEIYSIFIIPSIDDISAQLEESQVILATIKGSPHIGPIKDLVNEWDQNLTLFSYTLEEWMNCQRNWLYLEPVFHSSEIRRQLPAETELFSQVISMWKKIMSKIQNKQNALQITTSAGVLEILQNCNIHLEHIKKSLEDYLEVKRLIFPRFYFLSNAELLDILADSRNPESVQPHLVKCFENIKQLLIWKQDIGPPAVKMLISAEGEGLVLPKKIRVRSAVEQWLVNVEKSMFDVLKKERYIYNIILLFQSQIMFYNDCVKSFVSSYSREKLEKVHAGLMCHLEEVADLVVLDTSNSRTKAILGALLILYVHCRDIVINLLLKNIFNAEDFEWTRHLQYKWNEKQKLCYVSQGNASFTYGYEYLGCTSRLVITPLTDRCWLTLMEALHLNLGGCPAGPAGTGKTETVKDLAKSLGKHCVVFNCFEDLDYKIVRKFFFGLVQSGAWSCFDEFNLIDLEVLSVIASQILTIKAAKDNYSARFVLEGKEIRINMSCAVFITMNPRYGGGVELPDNLKSLFRPVAMMVPHYQMIAEIILFSFGFKSANSLSGKLTNLYELARKQLSQQDHYNFGLRSLKIVLIMAGTKKREFKCLSEADETLIVIEAIREASLPKCPPEDVPLFENIIGDIFPEVTVLKVNQLALEKVIYTATQQLGLQNWSSQKEKIIQFYNQLQVCVGVMLVGPTGGGKTTVRRILEKALTLLPIADFLSVAERKSASKISERKGKVDICVLNPKCVTLSELYGQLDPNTMEWTDGLLSATIRSYVYFNTPKNTKKDIDLRLKSRISDLSNVFKLDSSDTTETDDNIFEEIEKVVKIPENHNFDWQWIILDGPVDTFWVENLNSVLDDTRTLCLANSERIALTNKIRVIFEVDNLSQASPATVSRCAMVYMDPVDLGWEPYVKSWLLKTSKIISQSGVDCLEFMIKNSVTDGLQFIRNRQKFQPYPMEDITVVITLCRILDAFFDFMGKNGGFEQSDDLNDTSSKEANSQRESVTFKDIEKRDENTWYPEKNPDKLTKIIQKLFVFAFTWAFGGALNREDEHRENIPFCPSLEPDSLAKVTYDFDKLVHELFGNSSQVGWKHWGQSQGRRRKGNCINLPTGECSIFGYFVDIEQCEFIPWSDLVPNDQTLIQRGTSLLTNLQRSGGNFLKITECGECINYTATRDTTCLSFLMSLLLKNSCPVLLTGESGVGKTAAINQMLEKLEGPGAFDIKHGSILGDTLLYSEIKKSSSLKQNITILIPETHKTATGSSDNPTKKPEVRTNKKLLKNNDHKGVVVSTINFSTNVTAAKTKEMILKKLIRRTKDTLGAPKNNRILIFIDDMNMPVSDMYGAQPPLELIRQLLDLGGVYDTEKNTWKNIQDLSIVAACVPVVNDISPRLLKHFSMLVLPHPSQDILCTIFQAHLGIYFSINNFTPEVQKSKDQIISCSLAIYHQVRQNMLPTPTKCHYMFNLRDMFKLLLGLLQADRTVVNSKEMAALLFVHEATRVFHDRLIDFTDKSLFYRLLSRELENCFQIGIDGCGKKTCATLACYLTDNKLYRVPISHKCAYIEFKEVFKKVFIHAGLKGKPTVLMVPNLNIEQDSFLEDLNYIISSGRIPDLFENVELDSIAMKIRYLTEQSGHMDNRQSLLSFFQKRIYKNLHIFVIMSPEGPSFRQNCRVYPSMISSCTIDWYERWPEEALLIVANSFLKEKVNFENRENLKEKLAPTCVQIHKSMKDLNRKYFEETGRFYYTTPNSYLQFMETFAHILRAREEEMQTKRDRFHMGLSTILEATTLVTEMQEELLILGPQVEQKTKETETLMEKLRKDSQVVEKVQMLVKQDEEIVAEEVRIVEDYAQKTANELKSVLPAFDKAIVALNALDKADVAELRVYTRPPFLVLTVMNAVCILLQKKPNWATAKLLLSETGFLKKLINLDKDSIPDKVFVKLKKIVTLPDFNPHKISLVSVACCSLCQWVIALNNYHEVQKVVGPKQIQVAEAQNVLKIARQRLAEKQRGLQLVEEHLLFLQAAYKDTVAEKQLLANRKTMASRRFQCASVLLTVLEDEKTRWQETINQIDNKLEGILGDILLSAACIVYSGILTPEFRQLIVNKWETFCIENGISLSSKFSLIKVMAQKYEISRWHNQGLPHGQYSVENAILIKNGQQWPLLIDPHRQAHKWIRQMEGSRLQKLSIEDSNYTKKIENAMKTGGSVLLQNLLETLAPGLKAILKKDIYQKKGHYFIRVGDAEFEYNSNFRLYLSTEIDNPHFLPSVYNFVTMINFTVTFQGLQDQLLSTVVTHEVPHLEDQRSKLLESISLDAITLEELEEKTLNLLQKALGSILDDDKIVDTLRKSKMTSNEISKRIEATKKAESEIQAIRKNYLPIATRGALLYFLVADLTQINYMYQFSLDWFHQVFVSSVVSKSKEQEHSFKREKVSPKEVHEFISISKEPNLENEKNLLDKHIKSAIDMLTKSIFKVVSSALFNEDKLCFSFRLCTVIMQNNANGNLIQDDIGFLPEEEWNIFLYSGILINIKSALSQSRLTSTFEIGESQHLQWLSDSRWRQCQYVSTHLEPFSLLCKSLLSNVSQWDTFKNSKAVYSLISTPFSSENASLEENTKPPEETELLNENKETCNPINFPWEKLTSFQRLILVKVLRPESLNNSVRKFITEKMGNKYLQRTGVNLKDAYKGSNARTPLILIQTHGIDLTNILLRFAQELKGTTHHVTIISLGRDQAAKAEDLILKALTKTQQWVFLQNCHLATSFMPRLCTIVESFNSPNVTIDPEFRLWLSSKSYSSFPIPVLKKGLKIAVESPQGLKSNLLQTFGCTGSGEVTEEIFENPDCGQWWKKLLFSLCFFNAVINERKNYGILGWNIAYKFNSSDLGVAIKVLENSLRGQPSISWQALRYLIGEVIYGGRVIDNWDKRCLKTLLYKFCNPEVLKDDFSFSRSASIKDYIHIIQSLPDDDLPEVLGIHPEAIRSCWETQGEKFIENLIAMQPKTTTANLMIRPEQSKDELVMEILSDLLKRLPLTVEKEEIAVGTPSTLKSMMSSSIWESLSKNLKDHDPLIHCVLLTFLKQEIKRFDKLLFVIHKSLKDLQLAIKGEIILTQELEEIFNSFLNMRVPTLWQKHAYRSCKPLSSWIDDLIQRLNFFNTWAKVAYTAIQRRYMRFVTVWKQSIPSTSQKCKHPEDSENNFFEGFPSRYWLPAFFFPQAFLAAVLQDYGRSRGIAVDALTFTHHVISNTTDKDEKFSVFMPKKLNIVRRAFKGSASSHTGVYIFGLFIEGARWNREQKILEDSLPLEMCCDFPDIYFLPTKISTKTPNASNQTDSELYAFECPVYQTPERSRILATTGLPTNFLTSVYLSTKKPPSHWITMRVALLCEKNEK

SEQ ID NO: 4351 - protein, 453 aa, Homo sapiens
METFIPIDLTTENQEMDKEETKTKPRLLRYEEKKYEDVKPLETQPAEIAEKETLEYKTVRTFSESLKSEKTEDYLRESIIQQHMVSPEPASLKEKGKSRRKKDQTHACPNVRKARPVSYDRTEPKDDDVIRNIIRLREKLGWQTILPQHSLKYGSSKIAIQKITLKKPLEDDGEFVYCLPRKSPKSLYNPYDLQVVSAHTAKHCKEFWVITASFISKVINIVGSVKEVELIPTLEWLSERRHYYLLRQFKIFSDFRMNKAFVTWKLNVKRIKTEKSRSFLYHHLFLADDLFQTCLVYIRGLCEDAINLKNYNDHENNLSAICLVKLDSSRTYSLDEFCEEQLQQATQALKQLEDIRNKAISEMKSTFLKVAEKNEIKEYFESKLSEDDTTHFKLPKYRRLLETFFKFVMLVDYIFQELIRQLMNTAVTLLLELFNGSAGMPFSVEKKNENLIR

SEQ ID NO: 4352 - protein, 4515 aa, Homo sapiens; identical to SEQ ID NO: 4350

SEQ ID NO: 4353 - protein, 3507 aa, Homo sapiens
MGRRSQWIWAMRCQMLVPVLSLHIGLARALGCGCIASKIECLIRCNAPFPLLDAVGSVASQELQSLTGTVGVTSGAAAYPRWNLARARAPPHLPGTQDPLRRVRDPTPIVASSPGRRRGSWSGGYGQEASEPGVVGLCCAVLPIHPSLALAGVGGPDLRRFQEGPQRPSDHGAAEKHMETFIPIDLTTENQEMDKEETKTKPRLLRYEEKKYEDVKPLETQPAEIAEKETLEYKTVRTFSESLKSEKTEEPKDDDVIRNIIRLREKLGWQTILPQHSLKYGSSKIAIQKITLKKPLEDDGEFVYCLPRKSPKSLYNPYDLQVVSAHTAKHCKEFWVITASFISKLDSSRTYSLDEFCEEQLQQATQALKQLEDIRNKAISEMKSTFLKVAEKNEIKEYFESKLSEDDTTHFKLPKYRRLLETFFKFVMLVDYIFQELIRQLMNTAVTLLLELFNGSAGMPFSVEKKNENLIRTFKDNSFPTGKTTNDCEELVDNSKLHAISVQKSEVKTDTDINEILNSVEVGKDLRKTYAPIFEVNLCLRIPAESDSSENSKENFHESDQCPEECVMFEDEMSENKDNCVKKHSSEELLPKAKKSKEISYNLEDIISATITPLCQDPQLSIFIDLVSIMDLPNKTGSIIHYKEQTRWPDCHILFETDPAYQNIIVNLLTIIGNSMGLVNAYSHKFIKYCTMTEKAKIMSMKISSMGELTSKEFEAILNRFRNYFRHIVNMAIEKRIGIFNVVVESSLQQLECDPTEIEEFLEHFIFLNAISSKISKLEKEFLTMSQLYSVAKHHQIHISEEQIAIFQVLLLKFSQLKSSMKLSKINKDTAITKFRDNLEACISGLHVDVGNLKAKIRTPLLLCAGTQVSTAMEMIQTLSGEAASLTNKAKAYSHYQDCFSDSQSHMHSVNVEEITQIVLSEISDIEGDLTLRKKLWEAQEEWKRASWEWRNSSLQSIDVESVQRNVSKLMHIISVLEKEIYSIFIIPSIDDISAQLEESQVILATIKGSPHIGPIKSQIMFYNDCVKSFVSSYSREKLEKVHAGLMCHLEEVADLVVLDTSNSRTKAILGALLILYVHCRDIVINLLLKNIFNAEDFEWTRHLQYKWNEKQKLCYVSQGNASFTYGYEYLGCTSRLVITPLTDRCWLTLMEALHLNLGGCPAGPAGTGKTETVKDLAKCALFAFKCNTALIKLPNSLIVLTCFGLEKTVLVMNTVMSFRFVLEGKEIRINMSCAVFITMNPRYGGGVELPDNLKSLFRPVAMMVPHYQMIAEIILFSFGFKSANSLSGKLTNLYELARKQLSQQDHYNFGLRSLKIVLIMAGTKKREFKCDTSDSLSEADETLIVIEAIREASLPKCPPEDVPLFENIIGDIFPEVTVLKVNQLALEKVIYTATQQLGLQNWSSQKEKIIQFYNQLQVCVGVMLVGPTGGGKTTVRRILEKALTLLPIADFLSVAERKSASKISERKGKVDICVLNPKCVTLSELYGQLDPNTMEWTDGLLSATIRSYVYFNTPKNTKKDIDLRLKSRISDLSNVFKLDSSDTTETDDNIFEEIEKVVKIPENHNFDWQWIILDGPVDTFWVENLNSVLDDTRTLCLANSERIALTNKIRVIFEVDNLSQASPATVSRCAMVYMDPVDLGWEPYVKSWLLKTSKIISQSGVDCLEFMIKNSVTDGLQFIRNRQKFQPYPMEDITVVITLCRILDAFFDFMGKNGGFEQSDDLNDTSSKEANSQRESVTFKDIEKRDENTWYPEKNPDKLTKIIQKLFVFAFTWAFGGALNREDEHRENIPFCPSLEPDSLAKVTYDFDKLVHELFGNSSQVGINLPTGECSIFGYFVDIEQCEFIPWSDLVPNDQTLIQRDNPTKKPEVRTNKKLLKNNDHKGVVVSTINFSTNVTAAKTKEMILKKLIRRTKDTLGAPKNNRILIFIDDMNMPVSDMYGAQPPLELIRQLLDLGGVYDTEKNTWKNIQDLSIVAACVPVVNDISPRLLKHFSMLVLPHPSQDILCTIFQIGIDGCGKKTCATLACYLTDNKLYRVPISHKCAYIEFKEVFKKVFIHAGLKGKPTVLMVPNLNIEQDSFLEDLNYIISSGRIPDLFENVELDSIAMKIRYLTEQSGHMDNRQSLLSFFQKRIYKNLHIFVIMSPEGPSFRQNCRVYPSMISSCTIDWYERWPEEALLIVANSFLKEKVNFENRENLKEKLAPTCVQIHKSMKDLNRKYFEETGRFYYTTPNSYLQFMETFAHILRAREEEMQTKRDRFHMGLSTILEATTLVTEMQEELLILGPQVEQKTKETETLMEKLRKDSQVVEKVQMLVKQDEEIVAEEVRIVEDYAQKTANELKSVLPAFDKAIVALNALDKADVAELRVYTRPPFLVLTVMNAVCILLQKKPNWATAKLLLSETGFLKKLINLDKDSIPDKVFVKLKKIVTLPDFNPHKISLVSVACCSLCQWVIALNNYHEVQKVVGPKQIQVAEAQNVLKIARQRLAEKQRGLQLISRWHNQGLPHGQYSVENAILIKNGQQWPLLIDPHRQAHKWIRQMEGSRLQKLSIEDSNYTKKIENAMKTGGSVLLQSCQASTWRKKLYLSTEIDNPHFLPSVYNFVTMINFTVTFQGLQDQLLSTVVTHEVPHLEDQRSKLLESISLDAITLEELEEKTLNLLQKALGSILDDDKIVDTLRKSKMTSNEISKRIEATKKAESEIQAIRKNYLPIATRGALLYFLVADLTQINYMYQFSLDWFHQVFVSSVVSKSKEQEHSFKREKVSPKEVHEFISISKEPNLENEKNLLDKHIKSAIDMLTKSIFKVVSSALFNEDKLCFSFRLCTVIMQNNANGNLIQDDIGFLPEEEWNIFLYSGILINIKSALSQSRLTSTFEIGESQHLQWLSDSRWRQCQYVSTHLEPFSLLCKSLLSNVSQWDTFKNSKAVYSLISTPFSSENASLEENTKPPEEKHTFCLLLRAINHTGTDLGPVGRGQWLTSTACDRHTDVCSFSFALNDGVPDVEHVQDIFYGHCVDKYHVKVLRPESLNNSVRKFITEKMGNKYLQRTGVNLKDAYKGSNARTPLILIQTHGSASIKDYIHIIQSLPDDDLPEVLGIHPEAIRSCWETQGEKFIENLIAMQPKTTTANLMIRPEQSKDELVMEILSDLLKRLPLTVEKEEIAVGTPSTLKSMMSSSIWESLSKNLKDHDPLIHCVLLTFLKQEIKRFDKLLFVIHKSLKDLQLAIKGEIILTQELEEIFNSFLNMRVPTLWQKHAYRSCKPLSSWIDDLIQRLNFFNTWAKVAYTAIQRRYMRFVTVWKQSIPSTSQKCKHPEDSENNFFEGFPSRYWLPAFFFPQAFLAAVLQDYGRSRGIAVDALTFTHHVISNTTDKDEKFSVFMPKKLNIVRRAFKGSASSHTGVYIFGLFIEGARWNREQKILEDSLPLEMCCDFPDIYFLPTKISTKTPNASNQTDSELYAFECPVYQTPERSRILATTGLPTNFLTSVYLSTKKPPSHWITMRVALLCEKNEK

SEQ ID NO: 4354 - protein, 1481 aa, Homo sapiens
  SITE 1: note = misc_feature - Xaa can be any naturally occurring amino acid
XELFGNSSQVGINLPTGECSIFGYFVDIEQCEFIPWSDLVPNDQTLIQRGTSLLTNLQRSGGNFLKITECGECINYTATRDTTCLSFLMSLLLKNSCPVLLTGESGVGKTAAINQMLEKLEGPGAFDIKHGSILGDTLLYSEIKKSSSLKQNITILIPETHKTATGSSDNPTKKPEVRTNKKLLKNNDHKGVVVSTINFSTNVTAAKTKEMILKKLIRRTKDTLGAPKNNRILIFIDDMNMPVSDMYGAQPPLELIRQLLDLGGVYDTEKNTWKNIQDLSIVAACVPVVNDISPRLLKHFSMLVLPHPSQDILCTIFQLLLGLLQADRTVVNSKEMAALLFVHEATRVFHDRLIDFTDKSLFYRLLSRELENCFQIQWTQENLMNHSTVFLDFLDINKTHRKKIYQNTSDYNKLASVLDEFQMKLGSISLELSHSMVFFKEAIEHIIRATRVLRQPGSHMLLIGIDGCGKKTCATLACYLTDNKLYRVPISHKCAYIEFKEVFKKVFIHAGLKGKPTVLMVPNLNIEQDSFLEDLNYIISSGRIPDLFENVELDSIAMKIRYLTEQSGHMDNRQSLLSFFQKRIYKNLHIFVIMSPEGPSFRQNCRVYPSMISSCTIDWYERWPEEALLIVANSFLKEKVNFENRENLKEKLAPTCVQIHKSMKDLNRKYFEETGRFYYTTPNSYLQFMETFAHILRAREEEMQTKRDRFHMGLSTILEATTLVTEMQEELLILGPQVEQKTKETETLMEKLRKDSQVVEKVQMLVKQDEEIVAEEVRIVEDYAQKTANELKSVLPAFDKAIVALNALDKADVAELRVYTRPPFLVLTVMNAVCILLQKKPNWATAKLLLSETGFLKKLINLDKDSIPDKVFVKLKKIVTLPDFNPHKISLVSVACCSLCQWVIALNNYHEVQKVVGPKQIQVAEAQNVLKIARQRLAEKQRGLQLVEEHLLFLQAAYKDTVAEKQLLANRKTMASRRFQCASVLLTVLEDEKISRWHNQGLPHGQYSVENAILIKNGQQWPLLIDPHRQAHKWIRQMEGSRLQKLSIEDSNYTKKIENAMKTGGSVLLQNLLETLAPGLKAILKKDIYQKKGHYFIRVGDAEFEYNSNFRLYLSTEIDNPHFLPSVYNFVTMINFTVTFQGLQDQLLSTVVTHEVPHLEDQRSKLLESISLDAITLEELEEKTLNLLQKALGSILDDDKIVDTLRKSKMTSNEISKRIEATKKAESEIQAIRKNYLPIATRGALLYFLVADLTQINYMYQFSLDWFHQVFVSSVVSKSKEQEHSFKREKVSPKEVHEFISISKEPNLENEKNLLDKHIKSAIDMLTKSIFKVVSSALFNEDKLCFSFRLCTVIMQNNANGNLIQDDIGFLPEEEWNIFLYSGILINIKSALSQSRLTSTFEIGESQHLQWLSDSRWRQCQYVSTHLEPFSLLCKSLLSNVSQWDTFKNSKAVYSLISTPFSSENASLEENTKPPEESKSS

SEQ ID NO: 4355 - protein, 1477 aa, Homo sapiens
  SITE 1: note = misc_feature - Xaa can be any naturally occurring amino acid
XELFGNSSQVGINLPTGECSIFGYFVDIEQCEFIPWSDLVPNDQTLIQRGTSLLTNLQRSGGNFLKITECGECINYTATRDTTCLSFLMSLLLKNSCPVLLTGESGVGKTAAINQMLEKLEGPGAFDIKHGSILGDTLLYSEIKKSSSLKQNITILIPETHKTATGSSDNPTKKPEVRTNKKLLKNNDHKGVVVSTINFSTNVTAAKTKEMILKKLIRRTKDTLGAPKNNRILIFIDDMNMPVSDMYGAQPPLELIRQLLDLGGVYDTEKNTWKNIQDLSIVAACVPVVNDISPRLLKHFSMLVLPHPSQDILCTIFQLLLGLLQADRTVVNSKEMAALLFVHEATRVFHDRLIDFTDKSLFYRLLSRELENCFQIQWTQENLMNHSTVFLDFLDINKTHRKKIYQNTSDYNKLASVLDEFQMKLGSISLELSHSMVFFKEAIEHIIRATRVLRQPGSHMLLIGIDGCGKKTCATLACYLTDNKLYRVPISHKCAYIEFKEVFKKVFIHAGLKGKPTVLMVPNLNIEQDSFLEDLNYIISSGRIPDLFENVELDSIAMKIRYLTEQSGHMDNRQSLLSFFQKRIYKNLHIFVIMSPEGPSFRQNCRVYPSMISSCTIDWYERWPEEALLIVANSFLKEKVNFENRENLKEKLAPTCVQIHKSMKDLNRKYFEETGRFYYTTPNSYLQFMETFAHILRAREEEMQTKRDRFHMGLSTILEATTLVTEMQEELLILGPQVEQKTKETETLMEKLRKDSQVVEKVQMLVKQDEEIVAEEVRIVEDYAQKTANELKSVLPAFDKAIVALNALDKADVAELRVYTRPPFLVLTVMNAVCILLQKKPNWATAKLLLSETGFLKKLINLDKDSIPDKVFVKLKKIVTLPDFNPHKISLVSVACCSLCQWVIALNNYHEVQKVVGPKQIQVAEAQNVLKIARQRLAEKQRGLQLVEEHLLFLQAAYKDTVAEKQLLANRKTMASRRFQCASVLLTVLEDEKISRWHNQGLPHGQYSVENAILIKNGQQWPLLIDPHRQAHKWIRQMEGSRLQKLSIEDSNYTKKIENAMKTGGSVLLQNLLETLAPGLKAILKKDIYQKKGHYFIRVGDAEFEYNSNFRLYLSTEIDNPHFLPSVYNFVTMINFTVTFQGLQDQLLSTVVTHEVPHLEDQRSKLLESISLDAITLEELEEKTLNLLQKALGSILDDDKIVDTLRKSKMTSNEISKRIEATKKAESEIQAIRKNYLPIATRGALLYFLVADLTQINYMYQFSLDWFHQVFVSSVVSKSKEQEHSFKREKVSPKEVHEFISISKEPNLENEKNLLDKHIKSAIDMLTKSIFKVVSSALFNEDKLCFSFRLCTVIMQNNANGNLIQDDIGFLPEEEWNIFLYSGILINIKSALSQSRLTSTFEIGESQHLQWLSDSRWRQCQYVSTHLEPFSLLCKSLLSNVSQWDTFKNSKAVYSLISTPFSSENASLEENTKPPEE

SEQ ID NO: 4356 - protein, 126 aa, Homo sapiens
  SITE 1: note = misc_feature - Xaa can be any naturally occurring amino acid
XLEYKTVRTFSESLKSEKTEEPKDDDVIRNIIRLREKLGWQTILPQHSLKYGSSKIAIQKITLKKPLEDDGEFVYCLPRKSPKSLYNPYDLQVVSAHTAKHCKEFWVITASFISKRYLVICGAVYI

SEQ ID NO: 4357 - protein, 204 aa, Homo sapiens
  SITE 1: note = misc_feature - Xaa can be any naturally occurring amino acid
XMLISAEGEGLVLPKKIRVRSAVEQWLVNVEKSMFDVLKKFLSQGIEDWNCQMFSQWVLSHPGQVVLTVSQIMFYNDCVKSFVSSYSREKLEKVHAGLMCHLEEVADLVVLDTSNSRTKAILGALLILYVHCRDIVINLLLKNIFNAEDFEWTRHLQYKWNEKQKLCYVSQGNASFTYGYEYLGCTSRLVITPLTDRCWLTLME

SEQ ID NO: 4358 - protein, 219 aa, Homo sapiens
  SITE 1: note = misc_feature - Xaa can be any naturally occurring amino acid
XRFVTVWKQSIPSTSQKCKHPEDSENNFFEGFPSRYWLPAFFFPQAFLAAVLQDYGRSRGIAVDALTFTHHVISNTTDKDEKFSVFMPKKLNIVRRAFKGSASSHTGVYIFGLFIEGARWNREQKILEDSLPLEMCCDFPDIYFLPTKISTKTPNASNQTDSELYAFECPVYQTPERSRILATTGLPTNFLTSVYLSTKKPPSHWITMRVALLCEKNEK

SEQ ID NO: 4359 - protein, 300 aa, Homo sapiens
  SITE 1: note = misc_feature - Xaa can be any naturally occurring amino acid
XTGVSHRADGERGTVGINLPTGECSIFGYFVDIEQCEFIPWSDLVPNDQTLIQRGTSLLTNLQRSGGNFLKITECGECINYTATRDTTCLSFLMSLLLKNSCPVLLTGESGVGKTAAINQMLEKLEGPGAFDIKHGSILGDTLLYSEIKKSSSLKQNITILIPETHKTATGSSDNPTKKPEVRTNKKLLKNNDHKGVVVSTINFSTNVTAAKTKEMILKKLIRRTKDTLGAPKNNRILIFIDDMNMPVSDMYGAQPPLELIRQLLDLGGVYDTEKNTWKNIQDLSIVAACVPVVNDISPR

SEQ ID NO: 4360 - protein, 358 aa, Homo sapiens
MAPQNLSTFCLLLLYLIGAVIAGRDFYKILGVPRSASIKDIKKAYRKLALQLHPDRNPDDPQAQEKFQDLGAAYEVLSDSEKRKQYDTYGEEGLKDGHQSSHGDIFSHFFGDFGFMFGGTPRQQDRNIPRGSDIIVDLEVTLEEVYAGNFVEVVRNKPVARQAPGKRKCNCRQEMRTTQLGPGRFQMTQEVVCDECPNVKLVNEERTLEVEIEPGVRDGMEYPFIGEGEPHVDGEPGDLRFRIKVVKHPIFERRGDDLYTNVTISLVESLVGFEMDITHLDGHKVHISRDKITRPGAKLWKKGEGLPNFDNNNIKGSLIITFDVDFPKEQLTEEAREGIKQLLKQGSVQKVYNGLQGY

SEQ ID NO: 4361 - protein, 358 aa, Homo sapiens; identical to SEQ ID NO: 4360

SEQ ID NO: 4362 - protein, 223 aa, Homo sapiens
MATPQSIFIFAICILMITELILASKSYYDILGVPKSASERQIKKAFHKLAMKYHPDKNKSPDAEAKFREIAEAYETLSDANRRKEYDTLGHSAFTSGKGQRGSGSSFEQSFNFNFDDLFKDFGFFGQNQNTGSKKRFENHFQTRQDGGSSRQRHHFQEFSFGGGLFDDMFEDMEKMFSFSGFDSTNQHTVQTENRFHGSSKHCRTVTQRRGNMVTTYTDCSGQ

SEQ ID NO: 4363 - protein, 153 aa, Homo sapiens
MGAPLLSPGWGAGAAGRRWWMLLAPLLPALLLVRPAGALVEGLYCGTRDCYEVLGVSRSAGKAEIARAYRQLARRYHPDRYRPQPGDEGPGRTPQSAEEAFLLVATAYETLKVSQAAAELQQYCMQNACKDALLVGVPAGSNPFREPRSCALL

SEQ ID NO: 4364 - protein, 504 aa, Homo sapiens
MVAPGSVTSRLGSVFPFLLVLVDLQYEGAECGVNADVEKHLELGKKLLAAGQLADALSQFHAAVDGDPDNYIAYYRRATVFLAMGKSKAALPDLTKVIQLKMDFTAARLQRGHLLLKQGKLDEAEDDFKKVLKSNPSENEEKEAQSQLIKSDEMQRLRSQALNAFGSGDYTAAIAFLDKILEVCVWDAELRELRAECFIKEGEPRKAISDLKAASKLKNDNTEAFYKISTLYYQLGDHELSLSEVRECLKLDQDHKRCFAHYKQVKKLNKLIESAEELIRDGRYTDATSKYESVMKTEPSIAEYTVRSKERICHCFSKDEKPVEAIRVCSEVLQMEPDNVNALKDRAEAYLIEEMYDEAIQDYETAQEHNENDQQIREGLEKAQRLLKQSQKRDYYKILGVKRNAKKQEIIKAYRKLALQWHPDNFQNEEEKKKAEKKFIDIAAAKEVLSDPEMRKKFDDGEDPLDAESQQGGGGNPFHRSWNSWQGFNPFSSGGPFRFKFHFN

SEQ ID NO: 4365 - protein, 453 aa, Homo sapiens
MVAPGSVTSRLGSVFPFLLVLVDLQYEGAECGVNADVEKHLELGKKLLAAGQLADALSQFHAAVDGDPDNYIAYYRRATVFLAMGKSKAALPDLTKVIQLKMDFTAARLQRGHLLLKQGKLDEAEDDFKKVVCVWDAELRELRAECFIKEGEPRKAISDLKAASKLKNDNTEAFYKISTLYYQLGDHELSLSEVRECLKLDQDHKRCFAHYKQVKKLNKLIESAEELIRDGRYTDATSKYESVMKTEPSIAEYTVRSKERICHCFSKDEKPVEAIRVCSEVLQMEPDNVNALKDRAEAYLIEEMYDEAIQDYETAQEHNENDQQIREGLEKAQRLLKQSQKRDYYKILGVKRNAKKQEIIKAYRKLALQWHPDNFQNEEEKKKAEKKFIDIAAAKEVLSDPEMRKKFDDGEDPLDAESQQGGGGNPFHRSWNSWQGFNPFSSGGPFRFKFHFN

SEQ ID NO: 4366 - protein, 60 aa, Homo sapiens
MRGMKLLGALLALAALLQGAVSLKIAAFNIQTFGETKMSNATLVSYIVQGCTRHLSLRGQ

SEQ ID NO: 4367 - protein, 60 aa, Homo sapiens; identical to SEQ ID NO: 4366

SEQ ID NO: 4368 - protein, 60 aa, Homo sapiens; identical to SEQ ID NO: 4366

SEQ ID NO: 4369 - protein, 282 aa, Homo sapiens [sequence omitted]

SEQ ID NO: 4370 - protein, 282 aa, Homo sapiens [sequence omitted]

SEQ ID NO: 4371 - protein, 86 aa, Homo sapiens
MRGMKLLGALLALAALLQGAVSLKIAAFNIQTFGETKMSNATLVSYIVQILSRYDIALVQEVRDSHLTAVGKLLDNLNQWVTVAGS

SEQ ID NO: 4372 - protein, 108 aa, Homo sapiens
NREPAIVRFFSRFTEVREFAIVPLHAAPGDAVAEIDALYDVYLDVQEKWGLEDVMLMGDFNAGCSYVRPSQWSSIRLWTSPTFQWLIPDSADTTATPTHCAYDRLPMA

SEQ ID NO: 4373 - protein, 72 aa, Homo sapiens
SIRLWTSPTFQWLIPDSADTTATPTHCAYDRIVVAGMLLRGAVVPDSALPFNFQAAYGLSDQLVCVLPCTAT

SEQ ID NO: 4374 - protein, 90 aa, Homo sapiens
  SITE 1: note = misc_feature - Xaa can be any naturally occurring amino acid
XHYVVSEPLGRNSYKERYLFVYRPDQVSAVDSYYYDDGCEPCGNDTFNREPAIVRFFSRFTGSVPHTTWLSPQRSGSLPLFPCMRPRGTQ

SEQ ID NO: 4375 - protein, 75 aa, Homo sapiens
  SITE 1: note = misc_feature - Xaa can be any naturally occurring amino acid
XRYLFVYRPDQVSAVDSYYYDDGCEPCGNDTFNREPAIVRFFSRFTGSVPHTTWLSPQRSGSLPLFPCMRPRGTQ

SEQ ID NO: 4376 - protein, 65 aa, Homo sapiens
  SITE 1: note = misc_feature - Xaa can be any naturally occurring amino acid
XTFQWLIPDSADTTATPTHCAYDRIVVAGMLLRGAVVPDSALPFNFQAAYGLSDQLVCVLPCTAT

SEQ ID NO: 4377 - protein, 26 aa, Homo sapiens
MHYPTALLFLILANGAQAFRICAFNA

SEQ ID NO: 4378 - protein, 85 aa, Homo sapiens
MHYPTALLFLILANGAQAFRICAFNAQRLTLAKVAREQVMDTLVRALNISDHYPVEVELKLSQAHSVQPLSLTVLLLLSLLSPQL

SEQ ID NO: 4379 - protein, 62 aa, Homo sapiens
MHYPTALLFLILANGAQAFRICAFNAQRLTLAKVAREQVMDTLVRDVILLGDFNADCASLTK

SEQ ID NO: 4380 - protein, 104 aa, Homo sapiens
MHYPTALLFLILANGAQAFRICAFNAQRLTLAKVAREQVMDTLVRILARCDIMVLQEVVDSSGSAIPLLLRELNRFDGSGPYSTLSSPQLGRSTYMETYVYFYR

SEQ ID NO: 4381 - protein, 208 aa, Homo sapiens
MHYPTALLFLILANGAQAFRICAFNAQRLTLAKVAREQVMDTLVRILARCDIMVLQEVVDSSGSAIPLLLRELNRFDGSGPYSTLSSPQLGRSTYMETYVYFYRSHKTQVLSSYVYNDEDDVFAREPFVAQFSLPSNVLPSLVLVPLHTTPKAVEKELNALYDVFLEVSQHWQSKDVILLGDFNADCASLTKKRLDKLELRTEPGFHW

SEQ ID NO: 4382 - protein, 302 aa, Homo sapiens
MHYPTALLFLILANGAQAFRICAFNAQRLTLAKVAREQVMDTLVRILARCDIMVLQEVVDSSGSAIPLLLRELNRFDGSGPYSTLSSPQLGRSTYMETYVYFYRSHKTQVLSSYVYNDEDDVFAREPFVAQFSLPSNVLPSLVLVPLHTTPKAVEKELNALYDVFLEVSQHWQSKDVILLGDFNADCASLTKKRLDKLELRTEPGFHWVIADGEDTTVRASTHCTYDRVVLHGERCRSLLHTAAAFDFPTSFQLTEEEALNISDHYPVEVELKLSQAHSVQPLSLTVLLLLSLLSPQLCPAA

SEQ ID NO: 4383 - protein, 302 aa, Homo sapiens; identical to SEQ ID NO: 4382

SEQ ID NO: 4384 - protein, 302 aa, Homo sapiens; identical to SEQ ID NO: 4382

SEQ ID NO: 4385 - protein, 302 aa, Homo sapiens; identical to SEQ ID NO: 4382

SEQ ID NO: 4386 - protein, 302 aa, Homo sapiens; identical to SEQ ID NO: 4382

SEQ ID NO: 4387 - protein, 302 aa, Homo sapiens; identical to SEQ ID NO: 4382

SEQ ID NO: 4388 - protein, 278 aa, Homo sapiens
MGGPRALLAALWALEAAGTAALRIGAFNIQSFGDSKVSDPACGSIIAKILAGYDLALVQEVRDPDLSAVSALMEQINSVSEHEYSFVSSQPLGRDQYKEMYLFVYRKDAVSVVDTYLYPDPEDVFSREPFVVKFSAPGTAQNLVLIPLHAAPHQAVAEIDALYDVYLDVIDKWGTDDMLFLGDFNADCSYVRAQDWAAIRLRSSEVFKWLIPDSADTTVGNSDCAYDRIVACGARLRRSLKPQSATVHDFQEEFGLDQTQALAISDHFPVEVTLKFHR

SEQ ID NO: 4389 - protein, 278 aa, Homo sapiens; identical to SEQ ID NO: 4388

SEQ ID NO: 4390 - protein, 299 aa, Homo sapiens
MGGPRALLAALWALEAAGTAALRIGAFNIQSFGDSKVSDPACGSIIAKILAGYDLALVQEVRDPDLSAVSALMEQINSVSEHEYSFVSSQPLGRDQYKEMYLFVYRKDAVSVVDTYLYPDPEDVFSREPFVVKFSAPGTGERAPPLPSRRALTPPPLPAAAQNLVLIPLHAAPHQAVAEIDALYDVYLDVIDKWGTDDMLFLGDFNADCSYVRAQDWAAIRLRSSEVFKWLIPDSADTTVGNSDCAYDRIVACGARLRRSLKPQSATVHDFQEEFGLDQTQALAISDHFPVEVTLKFHR

SEQ ID NO: 4391 - protein, 299 aa, Homo sapiens; identical to SEQ ID NO: 4390

SEQ ID NO: 4392 - protein, 299 aa, Homo sapiens; identical to SEQ ID NO: 4390

SEQ ID NO: 4393 - protein, 254 aa, Homo sapiens
PRALLAALWALEAAGTAALRIGAFNIQSFGDSKVSDPACGSIIAKILAGYDLALVQEVRDPDLSAVSALMEQINSVSEHEYSFVSSQPLGRDQYKEMYLFVYRKDAVSVVDTYLYPDPEDVFSREPFVVKFSAPGTGERAPPLPSRRALTPPPLPAAAQNLVLIPLHAAPHQAVAEIDALYDVYLDVIDKWGTDDWAAIRLRSSEVFKWLIPDSADTTVGNSDCAYDRIVACGARLRRSLKPQSATVHDFQEEF

SEQ ID NO: 4394 - protein, 137 aa, Homo sapiens
ADVFSREPFVVWFQSPHTAVKDFVIIPLHTTPETSVKEIDELVEVYTDVKHRWKAENFIFMGDFNAGCSYVPKKAWKNIRLRTDPRFVWLIGDQEDTTVKKSTNCAYDRPWMSATTFQLNLNYSLQGPSPTAKNLSL

SEQ ID NO: 4395 - protein, 275 aa, Homo sapiens
MSRELAPLLLLLLSIHSALAMRICSFNVRSFGESKQEDKNAMDVIVKVIKRCDIILVMEIKDSNNRICPILMEKLNREKLVSVKRSYHYHDYQDGDADVFSREPFVVWFQSPHTAVKDFVIIPLHTTPETSVKEIDELVEVYTDVKHRWKAENFIFMGDFNAGCSYVPKKAWKNIRLRTDPRFVWLIGDQEDTTVKKSTNCAYDRIVLRGQEIVSSVVPKSNSVFDFQKAYKLTEEEALDVSDHFPVEFKLQSSRAFTNSKKSVTLRKKTKSKRS

SEQ ID NO: 4396 - protein, 100 aa, Homo sapiens
MSRELAPLLLLLLSIHSALAMRICSFNVRSFGESKQEDKNAMDVIVKVIKRCDIILVMEIKDSNNRICPILMEKLNRNSRRGITYNYVISSRLGRNTYKE

SEQ ID NO: 4397 - protein, 158 aa, Homo sapiens
MSRELAPLLLLLLSIHSALAMRICSFNVRSFGESKQEDKNAMDVIVKVIKRCDIILVMEIKDSNNRICPILMEKLNRNSRRGITYNYVISSRLGRNTYKEQYAFLYKEKLVSVKRSYHYHDYQDGDADVFSREPFVVWFQSPHTAVKDFVIIPLHTTP

SEQ ID NO: 4398 - protein, 305 aa, Homo sapiens
MSRELAPLLLLLLSIHSALAMRICSFNVRSFGESKQEDKNAMDVIVKVIKRCDIILVMEIKDSNNRICPILMEKLNRNSRRGITYNYVISSRLGRNTYKEQYAFLYKEKLVSVKRSYHYHDYQDGDADVFSREPFVVWFQSPHTAVKDFVIIPLHTTPETSVKEIDELVEVYTDVKHRWKAENFIFMGDFNAGCSYVPKKAWKNIRLRTDPRFVWLIGDQEDTTVKKSTNCAYDRIVLRGQEIVSSVVPKSNSVFDFQKAYKLTEEEALDVSDHFPVEFKLQSSRAFTNSKKSVTLRKKTKSKRS

SEQ ID NO: 4399 - protein, 288 aa, Homo sapiens
MSRELAPLLLLLLSIHSALAMRICSFNVRSFGESKQEDKNAMDVIVKVIKRCDIILVMEIKDSNNRICPILMEKLNRNSRRGITYNYVISSRLGRNTYKEQYAFLYKEKLVSVKRSYHYHDYQDGDADVFSREPFVVWFQSPHTAVKDFVIIPLHTTPETSVKEIDELVEVYTDVKHRWKAENFIFMGDFNAGCSYVPKKAWKNIRLRTDPRFVWLIGDQEDTTVKKSTNCAYDRIVLRGQEIVSSVVPKSNSVFDFQKAYKLTEEEVRLPSCLSMPLSWKDELAWAT

SEQ ID NO: 4400 - protein, 218 aa, Homo sapiens
MIPLLLAALLCVPAGALTCYGDSGQPVDWFVVYKLPALRGSGEAAQRGLQYKYLDESSGGWRDGRALINSPEGAVGRSLQPLYRSNTSQLAFLLYNDQPPQPSKAQDSSMRGHTKGKQLTYTYPWVYNYQLEGIFAQEFPDLENVVKGHHVSQEPWNSSITLTSQAGAVFQSFAKFSKFGDDLYSGWLAAALGTNLQVQFWHKTVGILPSNCSDIWQV

SEQ ID NO: 4401 - protein, 360 aa, Homo sapiens
MIPLLLAALLCVPAGALTCYGDSGQPVDWFVVYKLPALRGSGEAAQRGLQYKYLDESSGGWRDGRALINSPEGAVGRSLQPLYRSNTSQLAFLLYNDQPPQPSKAQDSSMRGHTKGVLLLDHDGGFWLVHSVPNFPPPASSAAYSWPHSACTYGQTLLCVSFPFAQFSKMGKQLTYTYPWVYNYQLEGIFAQEFPDLENVVKGHHVSQEPWNSSITLTSQAGAVFQSFAKFSKFGDDLYSGWLAAALGTNLQVQFWHKTVGILPSNCSDIWQVLNVNQIAFPGPAGPSFNSTEDHSKWCVSPKGPWTCVGDMNRNQGEEQRGGGTLCAQLPALWKAFQPLVKNYQPCNGMARKPSRAYKI

SEQ ID NO: 4402 - protein, 361 aa, Homo sapiens
MKQKMMARLLRTSFALLFLGLFGVLGAATISCRNEEGKAVDWFTFYKLPKRQNKESGETGLEYLYLDSTTRSWRKSEQLMNDTKSVLGRTLQQLYEAYASKSNNTAYLIYNDGVPKPVNYSRKYGHTKGLLLWNRVQGFWLIHSIPQFPPIPEEGYDYPPTGRRNGQSGICITFKYNQYEAIDSQLLVCNPNVYSCSIPATFHQELIHMPQLCTRASSSEIPGRLLTTLQSAQGQKFLHFAKSDSFLDDIFAAWMAQRLKTHLLTETWQRKRQELPSNCSLPYHVYNIKAIKLSRHSYFSSYQDHAKWCISQKGTKNRWTCIGDLNRSPHQAFRSGGFICTQNWQIYQAFQGLVLYYESCK

SEQ ID NO: 4403 - protein, 153 aa, Homo sapiens
MPQLCTRASSSEIPGRLLTTLQSAQGQKFLHFAKSDSFLDDIFAAWMAQRLKTHLLTETWQRKRQELPSNCSLPYHVYNIKAIKLSRHSYFSSYQDHAKWCISQKGTKNRWTCIGDLNRSPHQAFRSGGFICTQNWQIYQAFQGLVLYYESCK

SEQ ID NO: 4404 - protein, 107 aa, Homo sapiens
MWSGWWLWPLVAVCTADFFRDEAERIMRDSPVIDGHNDLPWQLLDMFNNRLQDERANLTTLAGTHTNIPKLRAGFVGGQFWSVYTPCDTQNKDAVRRTLEQMDVVHR

SEQ ID NO: 4405 - protein, 111 aa, Homo sapiens
MWSGWWLWPLVAVCTADFFRDEAERIMRDSPVIDGHNDLPWQLLDMFNNRLQDERANLTTLAGTHTNIPKLRAGFVGGQFWSVYTPCDTQNKDAVRRTLEQMDVVHRMCRM

SEQ ID NO: 4406 - protein, 411 aa, Homo sapiens
MWSGWWLWPLVAVCTADFFRDEAERIMRDSPVIDGHNDLPWQLLDMFNNRLQDERANLTTLAGTHTNIPKLRAGFVGGQFWSVYTPCDTQNKDAVRRTLEQMDVVHRMCRMYPETFLYVTSSAGIRQAFREGKVASLIGVEGGHSIDSSLGVLRALYQLGMRYLTLTHSCNTPWADNWLVDTGDSEPQSQGLSPFGQRVVKELNRLGVLIDLAHVSVATMKATLQLSRAPVIFSHSSAYSVCASRRNVPDDVLRLVKQTDSLVMVNFYNNYISCTNKANLSQVADHLDHIKEVAGARAVGFGGDFDGVPRVPEGLEDVSKYPDLIAELLRRNWTEAEVKGALADNLLRVFEAVEQASNLTQAPEEEPIPLDQLGGSCRTHYGYSSGASSLHRHWGLLLASLAPLVLCLSLL

SEQ ID NO: 4407 - protein, 411 aa, Homo sapiens; identical to SEQ ID NO: 4406

SEQ ID NO: 4408 - protein, 411 aa, Homo sapiens; identical to SEQ ID NO: 4406

SEQ ID NO: 4409 - protein, 161 aa, Homo sapiens
MKLQTLAVSVTALKFWSAYVPCQTQDRDALRLTLEQIDLIRRMCASYSELELVTSAKALNDTQKLACLIGVEGGHSLDNSLSILRTFYMLGVRYLTLTHTCNTPWAESSAKGVHSFYNNISGLTDFGEKVVAEMNRLGMMVDLSHVSDAVARRALEVSQAP

SEQ ID NO: 4410 - protein, 123 aa, Homo sapiens
MQMIIIWALLDTEAESSAKGVHSFYNNISGLTDFGEKVVAEMNRLGMMVDLSHVSDAVARRALEVSQAPVIFSHSAARGVCNSARNVPDDILQLLKKNGGVVMVSLSMGVIQCNPSANVSTVA

SEQ ID NO: 4411 - protein, 114 aa, Homo sapiens
MQPSGLEGPGTFGRWPLLSLLLLLLLLQPVTCAYTTPGPPRALTTLGAPRAHTMPGTYAPSTTLSSPSTQGLQEQARALMRDFPLVDGHNDLPLVLRQVYQKGLQDVNLRNFSY

SEQ ID NO: 4412 - protein, 137 aa, Homo sapiens
MQPSGLEGPGTFGRWPLLSLLLLLLLLQPVTCAYTTPGPPRALTTLGAPRAHTMPGTYAPSTTLSSPSTQGLQEQARALMRDFPLVDGHNDLPLVLRQVYQKGLQDVNLRNFSYGQTSLDRLRDGLVGAQFWSAYVP

SEQ ID NO: 4413 - protein, 486 aa, Homo sapiens
MQPSGLEGPGTFGRWPLLSLLLLLLLLQPVTCAYTTPGPPRALTTLGAPRAHTMPGTYAPSTTLSSPSTQGLQEQARALMRDFPLVDGHNDLPLVLRQVYQKGLQDVNLRNFSYGQTSLDRLRDGLVGAQFWSAYVPCQTQDRDALRLTLEQIDLIRRMCASYSELELVTSAKALNDTQKLACLIGVEGGHSLDNSLSILRTFYMLGVRYLTLTHTCNTPWAESSAKGVHSFYNNISGLTDFGEKVVAEMNRLGMMVDLSHVSDAVARRALEVSQAPVIFSHSAARGVCNSARNVPDDILQLLKKNGGVVMVSLSMGVIQCNPSANVSTVADHFDHIKAVIGSKFIGIGGDYDGAGKFPQGLEDVSTYPVLIEELLSRGWSEEELQGVLRGNLLRVFRQVEKVQEENKWQSPLEDKFPDEQLSSSCHSDLSRLRQRQSLTSGQELTEIPIHWTAKLPAKWSVSESSPHMAPVLAVVATFPVLILWL

SEQ ID NO: 4414 - protein, 486 aa, Homo sapiens; identical to SEQ ID NO: 4413

SEQ ID NO: 4415 - protein, 258 aa, Homo sapiens
MQPSGLEGPGTFGRWPLLSLLLLLLLLQPVTCAYTTPGPPRALTTLGAPRAHTMPGTYAPSTTLSSPSTQGLQEQARALMRDFPLVDGHNDLPLVLRQVYQKGLQDVNLRNFSYGQTSLDRLRDGLVGAQFWSAYVPCQTQDRDALRLTLEQIDLIRRMCASYSELELVTSAKALNDTQKLACLIGVEGGHSLDNSLSILRTFYMLGVRYLTLTHTCNTPWAESSAKGVHSFYNNISGLTDFGEMLWHGGPWKCHRHL

SEQ ID NO: 4416 - protein, 513 aa, Homo sapiens
MIRTPLSASAHRLLLPGSRGRPPRNMQPTGREGSRALSRRYLRRLLLLLLLLLLRQPVTRAETTPGAPRALSTLGSPSLFTTPGVPSALTTPGLTTPGTPKTLDLRGRAQALMRSFPLVDGHNDLPQVLRQRYKNVLQDVNLRNFSHGQTSLDRLRDGLVGAQFWSASVSCQSQDQTAVRLALEQIDLIHRMCASYSELELVTSAEGLNSSQKLACLIGVEGGHSLDSSLSVLRSFYVLGVRYLTLTFTCSTPWAESSTKFRHHMYTNVSGLTSFGEKVVEELNRLGMMIDLSYASDTLIRRVLEVSQAPVIFSHSAARAVCDNLLNVPDDILQLLKKNGGIVMVTLSMGVLQCNLLANVSTVADHFDHIRAVIGSEFIGIGGNYDGTGRFPQGLEDVSTYPVLIEELLSRSWSEEELQGVLRGNLLRVFRQVEKVREESRAQSPVEAEFPYGQLSTSCHSHLVPQNGHQATHLEVTKQPTNRVPWRSSNASPYLVPGLVAAATIPTFTQWLC

SEQ ID NO: 4417 - protein, 357 aa, Homo sapiens
MATVIHNPLKALGDQFYKEAIEHCRSYNSRLCAERSVRLPFLDSQTGVAQNNCYIWMEKRHRGPGLAPGQLYTYPARCWRKKRRLHPPEDPKLRLLEIKPEVELPLKKDGFTSESTTLEALLRGEGVEKKVDAREEESIQEIQRVLENDENVEEGNEEEDLEEDIPKRKNRTRGRARGSAGGRRRHDAASQEDHDKPYVCDICGKRYKNRPGLSYHYAHTHLASEEGDEAQDQETRSPPNHRNENHRPQKGPDGTVIPNNYCDFCLGGSNMNKKSGRPEELVSCADCGRSAHLGGEGRKEKEAAAAARTTEDLFGSTSESDTSTFHGFDEDDLEEPRSCRGRRSGRGSPTADKKGSC

SEQ ID NO: 4418 - protein, 357 aa, Homo sapiens; identical to SEQ ID NO: 4417

SEQ ID NO: 4419 - protein, 378 aa, Homo sapiens
MATVIHNPLKALGDQFYKEAIEHCRSYNSRLCAERSVRLPFLDSQTGVAQNNCYIWMEKRHRGPGLAPGQLYTYPARCWRKKRRLHPPEDPKLRLLEIKPEVELPLKKDGFTSESTTLEALLRGEGVEKKVDAREEESIQEIQRVLENDENVEEGNEEEDLEEDIPKRKNRTRGRARGSAGGRRRHDAASQEDHDKPYVCDICGKRYKNRPGLSYHYAHTHLASEEGDEAQDQETRSPPNHRNENHRPQKGPDGTVIPNNYCDFCLGGSNMNKKSGRPEELVSCADCGRSGHPTCLQFTLNMTEAVKTYKWQCIECKSCILCGTSENDDQLLFCDDCDRGYHMYCLNPPVAEPPEGSWSCHLCWELLKEKASAFGCQA

SEQ ID NO: 4420 - protein, 412 aa, Homo sapiens
MFYGRINGRNFAASSLPVAFAATPLMLFLPNPQLIFSFPISSRNHITGLMPPGKLKLENLFHMCTRLGDQFYKEAIEHCRSYNSRLCAERSVRLPFLDSQTGVAQNNCYIWMEKRHRGPGLAPGQLYTYPARCWRKKRRLHPPEDPKLRLLEIKPEVELPLKKDGFTSESTTLEALLRGEGVEKKVDAREEESIQEIQRVLENDENVEEGNEEEDLEEDIPKRKNRTRGRARGSAGGRRRHDAASQEDHDKPYVCDICGKRYKNRPGLSYHYAHTHLASEEGDEAQDQETRSPPNHRNENHRPQKGPDGTVIPNNYCDFCLGGSNMNKKSGRPEELVSCADCGRSAHLGGEGRKEKEAAAAARTTEDLFGSTSESDTSTFHGFDEDDLEEPRSCRGRRSGRGSPTADKKGSC

SEQ ID NO: 4421 - protein, 412 aa, Homo sapiens; identical to SEQ ID NO: 4420

SEQ ID NO: 4422 - protein, 367 aa, Homo sapiens
MGFTDLEEPISGCPGGPWALGLGDQFYKEAIEHCRSYNSRLCAERSVRLPFLDSQTGVAQNNCYIWMEKRHRGPGLAPGQLYTYPARCWRKKRRLHPPEDPKLRLLEIKPEVELPLKKDGFTSESTTLEALLRGEGVEKKVDAREEESIQEIQRVLENDENVEEGNEEEDLEEDIPKRKNRTRGRARGSAGGRRRHDAASQEDHDKPYVCDICGKRYKNRPGLSYHYAHTHLASEEGDEAQDQETRSPPNHRNENHRPQKGPDGTVIPNNYCDFCLGGSNMNKKSGRPEELVSCADCGRSAHLGGEGRKEKEAAAAARTTEDLFGSTSESDTSTFHGFDEDDLEEPRSCRGRRSGRGSPTADKKGSC

SEQ ID NO: 4423 - protein, 367 aa, Homo sapiens; identical to SEQ ID NO: 4422

SEQ ID NO: 4424 - protein, 170 aa, Homo sapiens
MKTPWKVLLGLLGAAALVTIITVPVVLLNKGNDATADSRKTYTLTDYLKNTYRLKLYSLRWISDHEYLYKQENNILVFNAEYGNSSVFLENSTFDEFGHSINDYSISPDGQFILLEYNYVKQWRHSYTASYDIYDLNKRQLITEERIPNNTQWVTWSPVGHKLVSICLEQ

SEQ ID NO: 4425 - protein, 766 aa, Homo sapiens
MKTPWKVLLGLLGAAALVTIITVPVVLLNKGTDDATADSRKTYTLTDYLKNTYRLKLYSLRWISDHEYLYKQENNILVFNAEYGNSSVFLENSTFDEFGHSINDYSISPDGQFILLEYNYVKQWRHSYTASYDIYDLNKRQLITEERIPNNTQWVTWSPVGHKLAYVWNNDIYVKIEPNLPSYRITWTGKEDIIYNGITDWVYEEEVFSAYSALWWSPNGTFLAYAQFNDTEVPLIEYSFYSDESLQYPKTVRVPYPKAGAVNPTVKFFVVNTDSLSSVTNATSIQITAPASMLIGDHYLCDVTWATQERISLQWLRRIQNYSVMDICDYDESSGRWNCLVARQHIEMSTTGWVGRFRPSEPHFTLDGNSFYKIISNEEGYRHICYFQIDKKDCTFITKGTWEVIGIEALTSDYLYYISNEYKGMPGGRNLYKIQLSDYTKVTCLSCELNPERCQYYSVSFSKEAKYYQLRCSGPGLPLYTLHSSVNDKGLRVLEDNSALDKMLQNVQMPSKKLDFIILNETKFWYQMILPPHFDKSKKYPLLLDVYAGPCSQKADTVFRLNWATYLASTENIIVASFDGRGSGYQGDKIMHAINRRLGTFEVEDQIEAARQFSKMGFVDNKRIAIWGWSYGGYVTSMVLGSGSGVFKCGIAVAPVSRWEYYDSVYTERYMGLPTPEDNLDHYRNSTVMSRAENFKQVEYLLIHGTADDNVHFQQSAQISKALVDVGVDFQAMWYTDEDHGIASSTAHQHIYTHMSHFIKQCFSLP

SEQ ID NO: 4426 - protein, 118 aa, Homo sapiens
MKTPWKVLLGLLGAAALVTIITVPVVLLNKGTDDATADSRKTYTLTDYLKNTYRLKLYSLRWISDHEYLYKQENNILVFNAEYGNSSVFLENSTFHMAKWIFLSFLKCSLPWLLFSLL

SEQ ID NO: 4427 - protein, 118 aa, Homo sapiens; identical to SEQ ID NO: 4426

SEQ ID NO: 4428 - protein, 86 aa, Homo sapiens
  SITE 1: note = misc_feature - Xaa can be any naturally occurring amino acid
XDATADSRKTYTLTDYLKNTYRLKLYSLRWISDHEYLYKQENNILVFNAEYGNSSVFLENSTFHMAKWIFLSFLKCSLPWLLFSLL

SEQ ID NO: 4429 - protein, 272 aa, Homo sapiens
APWAPVLLLALGLRGLQAGARRAPDPGFQERFFQQRLDHFNFERFGNKTFPQRFLVSDRFWVRGEGPIFFYTGNEGDVWAFANNSAFVAELAAERGALLVFAEHRYYGKSLPFGAQSTQRGHTELLTVEQALADFAELLRALRRDLGAQDAPAIAFGGRKPSHLSSQPPAQLGCAATLAAFPSESCTRTWPRVGICGSQKCRPPCGTCGPLRRKRGNGVLGAAALTLCPSPSYGGMLSAYLRMKYPHLVAGALAASAPVLAVAGLGDSNQFF

SEQ ID NO: 4430 - protein, 492 aa, Homo sapiens [sequence omitted]

SEQ ID NO: 4431 - protein, 61 aa, Homo sapiens
  SITE 1: note = misc_feature - Xaa can be any naturally occurring amino acid
XSGSEHCYDIYRLYHSCADPTGCGTGPDARAWDYQISEPPATSSSPTGTWTPGQGAGFGGT

SEQ ID NO: 4432 - protein, 155 aa, Homo sapiens
  SITE 1: note = misc_feature - Xaa can be any naturally occurring amino acid
XTFPQRFLVSDRFWVRGEGPIFFYTGNEGDVWAFANNSAFVAELAAERGALLVFAEHRYYGKSLPFGAQSTQRGHTELLTVEQALADFAELLRALRRDLGAQDAPAIAFGGSLRHGPLGVRHLPAAVRREGPDPALHVRPECLHRAGHDGLPLPH

SEQ ID NO: 4433 - protein, 244 aa, Homo sapiens
  SITE 1: note = misc_feature - Xaa can be any naturally occurring amino acid
XTVRWEFGTCQPLSDEKDLTQLFMFARNAFTVLAMMDYPYPTDFLGPLPANPVKVGCDRLLSEAQRITGLRALAGALPPAPDGCADPTGCGTGPDARAWDYQACTEINLTFASNNVTDMFPDLPFTDELRQRYCLDTWGVWPRPDWLLTSFWGGDLRAASNIIFSNGNLDPWAGGGIRRNLSASVIAVTIQGGAHHLDLRASHPEDPASVVEARKLEATIIGEWVKAARREQQPALRGGPRLSL

SEQ ID NO: 4434 - protein, 120 aa, Homo sapiens
  SITE 1: note = misc_feature - Xaa can be any naturally occurring amino acid
XVLLLALGLRGLQAGARRAPDPGFQERFFQQRLDHFNFERFGNKTFPQRFLVSGSGSGARGPSSSTLGTRATCGPSPTTRPSSRSWRPSGGLYWSSRSTATTGSRCRSVRSPRSAGTRSC

SEQ ID NO: 4435 - protein, 201 aa, Homo sapiens
MDLSLLWVLLPLVTMAWGQYGDYGYPYQQYHDYSDDGWVNLNRQGFSYQCPQGQVIVAVRSIFSKKEGSDRQWNYACMPTPQSLGEPTECWWEEINRAGMEWYQTCSNNGLVAGFQSRYFESVLDREWQFYCCRYSKRCPYSCWLTTEYPGHYGEEMDMISYNYDYYIRGATTTFSAVERDRQWKFIMCRMTEYDCEFANV

SEQ ID NO: 4436 - protein, 349 aa, Homo sapiens
MAGPAIHTAPMLFLVLLLPLELSLAGALAPGTPARNLPENHIDLPGPALWTPQASHHRRRGPGKKEWGPGLPSQAQDGAVVTATRQASRLPEAEGLLPEQSPAGLLQDKDLLLGLALPYPEKENRPPGWERTRKRSREHKRRRDRLRLHQGRALVRGPSSLMKKAELSEAQVLDAAMEESSTSLAPTMFFLTTFEAAPATEESLILPVTSLRPQQAQPRSDGEVMPTLDMALFDWTDYEDLKPDGWPSAKKKEKHRGKLSSDGNETSPAEGEPCDHHQDCLPGTCCDLREHLCTPHNRGLNNKCFDDCMCVEGLRCYAKFHRNRRVTRRKGRCVEPETANGDQGSFINV

SEQ ID NO: 4437 - protein, 136 aa, Homo sapiens
MRTHTRGAPSVFFIYLLCFVSAYITDENPEVMIPFTNANYDSHPMLYFSRAEVAELQLRAASSHEHIAARLTEAVHTMLSSPLEYLPPWDPKDYSARWNEIFGNNLGALAMFCVLYPENIEARDMAKDYMERMAAQ

SEQ ID NO: 4438 - protein, 139 aa, Homo sapiens
MRTHTRGAPSVFFIYLLCFVSAYITDENPEVMIPFTNANYDSHPMLYFSRAEVAELQLRAASSHEHIAARLTEAVHTMLSSPLEYLPPWDPKDYSARWNEIFGNNLGALAMFCVLYPENIEARDMAKDYMERMAAQPSW

SEQ ID NO: 4439 - protein, 144 aa, Homo sapiens
MRTHTRGAPSVFFIYLLCFVSAYITDENPEVMIPFTNANYDSHPMLYFSRAEVAELQLRAASSHEHIAARLTEAVHTMLSSPLEYLPPWDPKDYSARWNEIFGNNLGALAMFCVLYPENIEARDMAKDYMERMAAQPSWLVKDA

SEQ ID NO: 4440 - protein, 228 aa, Homo sapiens
MRTHTRGAPSVFFIYLLCFVSAYITDENPEVMIPFTNANYDSHPMLYFSRAEVAELQLRAASSHEHIAARLTEAVHTMLSSPLEYLPPWDPKDYSARWNEIFGNNLGALAMFCVLYPENIEARDMAKDYMERMAAQPSWLVKDAPWDEVPLAHSLVGFATAYDFLYNYLSKTQQEKFLEVIANASGYMYETSYRRGWGFQYLHNHQPTNCMALLTGSLVLMNQGMMAA

SEQ ID NO: 4441 - protein, 228 aa, Homo sapiens; identical to SEQ ID NO: 4440

SEQ ID NO: 4442 - protein, 958 aa, Homo sapiens [sequence omitted]

SEQ ID NO: 4443 - protein, 308 aa, Homo sapiens
MRTHTRGAPSVFFIYLLCFVSAYITDENPEVMIPFTNANYDSHPMLYFSRAEVAELQLRAASSHEHIAARLTEAVHTMLSSPLEYLPPWDPKDYSARWNEIFGNNLGALAMFCVLYPENIEARDMAKDYMERMAAQPSWLVKDAPWDEVPLAHSLVGFATAYDFLYNYLSKTQQEKFLEVIANASGYMYETSYRRGWGFQYLHNHQPTNCMALLTGSLVLMNQGYLQEAYLWTKQVLTIMEKSLVLLREVTDGSLYEGVAYGSYTTRSLFQYMFLVQRHFNINHFGHPWLKQHFAFMYRTILPGMMAA

SEQ ID NO: 4444 - protein, 958 aa, Homo sapiens [sequence omitted]

SEQ ID NO: 4445 - protein, 958 aa, Homo sapiens [sequence omitted]

SEQ ID NO: 4446 - protein, 1118 aa, Homo sapiens
MARSPGRAYALLLLLICFNVGSGLHLQVLSTRNENKLLPKHPHLVRQKRAWITAPVALREGEDLSKKNPIAKIHSDLAEERGLKITYKYTGKGITEPPFGIFVFNKDTGELNVTSILDREETPFFLLTGYALDARGNNVEKPLELRIKVLDINDNEPVFTQDVFVGSVEELSAAHTLVMKINATDADEPNTLNSKISYRIVSLEPAYPPVFYLNKDTGEIYTTSVTLDREEHSSYTLTVEARDGNGEVTDKPVKQAQVQIRILDVNDNIPVVENKVLEGMVEENQVNVEVTRIKVFDADEIGSDNWLANFTFASGNEGGYFHIETDAQTNEGIVTLIKEVDYEEMKNLDFSVIVANKAAFHKSIRSKYKPTPIPIKVKVKNVKEGIHFKSSVISIYVSESMDRSSKGQIIGNFQAFDEDTGLPAHARYVKLEDRDNWISVDSVTSEIKLAKLPDFESRYVQNGTYTVKIVAISEDYPRKTITGTVLINVEDINDNCPTLIEPVQTICHDAEYVNVTAEDLDGHPNSGPFSFSVIDKPPGMAEKWKIARQESTSVLLQQSEKKLGRSEIQFLISDNQGFSCPEKQVLTLTVCECLHGSGCREAQHDSYVGLGPAAIALMILAFLLLLLVPLLLLMCHCGKGAKGFTPIPGTIEMLHPWNNEGAPPEDKVVPSFLPVDQGGSLVGRNGVGGMAKEATMKGSSSASIVKGQHEMSEMDGRWEEHRSLLSGRATQFTGATGAIMTTETTKTARATGASRDMAGAQAAAVALNEEFLRNYFTDKAASYTEEDENHTAKDCLLVYSQEETESLNASIGCCSFIEGELDDRFLDDLGLKFKTLAEVCLGQKIDINKEIEQRQKPATETSMNTASHSLCEQTMVNSENTYSSGSSFPVPKSLQEANAEKVTQEIVTERSVSSRQAQKVATPLPDPMASRNVIATETSYVTGSTMPPTTVILGPSQPQSLIVTERVYAPASTLVDQPYANEGTVVVTERVIQPHGGGSNPLEGTQHLQDVPYVMVRERESFLAPSSGVQPTLAMPNIAVGQNVTVTERVLAPASTLQSSYQIPTENSMTARNTTVSGAGVPGPLPDFGLEESGHSNSTITTSSTRVTKHSTVQHSYS

SEQ ID NO: 4447 - protein, 232 aa, Homo sapiens
MARSPGRAYALLLLLICFNVGSGLHLQVLSTRNENKLLPKHPHLVRQKRAWITAPVALREGEDLSKKNPIAKIHSDLAEERGLKITYKYTGKGITEPPFGIFVFNKDTGELNVTSILDREETPFFLLTGYALDARGNNVEKPLELRIKVLDINDNEPVFTQDVFVGSVEELSAAHTLVMKINATDADEPNTLNSKISYRIVSLEPAYPPVFYLNKDTGEIYTTSVTLDREVS

SEQ ID NO: 4448 - protein, 1301 aa, Homo sapiens
MKIITYFCIWAVAWAIPVPQSKPLERHVEKSMNLHLLARSNVSVQDELNASGTIKESGVLVHEGDRGRQENTQDGHKGEGNGSKWAEVGGKSFSTYSTLANEEGNIEGWNGDTGKAETYGHDGIHGKEENITANGIQGQVSIIDNAGATNRSNTNGNTDKNTQNGDVGDAGHNEDVAVVQEDGPQVAGSNNSTDNEDEIIENSCRNEGNTSEITPQINSKRNGTKEAEVTPGTGEDAGLDNSDGSPSGNGADEDEDEGSGDDEDEEAGNGKDSSNNSKGQEGQDHGKEDDHDSSIGQNSDSKEYYDPEGKEDPHNEVDGDKTSKSEENSAGIPEDNGSQRIEDTQKLNHRESKRVENRITKESETHAVGKSQDKGIEIKGPSSGNRNITKEVGKGNEGKEDKGQHGMILGKGNVKTQGEVVNIEGPGQKSEPGNKVGHSNTGSDSNSDGYDSYDFDDKSMQGDDPNSSDESNGNDDANSESDNNSSSRGDASYNSDESKDNGNGSDSKGAEDDDSDSTSDTNNSDSNGNGNNGNDDNDKSDSGKGKSDSSDSDSSDSSNSSDSSDSSDSDSSDSNSSSDSDSSDSDSSDSSDSDSSDSSNSSDSSDSSDSSDSSDSSDSSDSKSDSSKSESDSSDSDSKSDSSDSNSSDSSDNSDSSDSSNSSNSSDSSDSSDSSDSSSSSDSSNSSDSSDSSDSSNSSESSDSSDSSDSDSSDSSDSSNSNSSDSDSSNSSDSSDSSNSSDSSDSSDSSNSSDSSDSSDSSNSSDSSDSSDSSDSSDSSNSSDSNDSSNSSDSSDSSNSSDSSNSSDSSDSSDSSDSDSSNSSDSSNSSDSSDSSNSSDSSDSSDSSDGSDSDSSNRSDSSNSSDSSDSSDSSNSSDSSDSSDSNESSNSSDSSDSSNSSDSDSSDSSNSSDSSDSSNSSDSSESSNSSDNSNSSDSSNSSDSSDSSDSSNSSDSSNSSDSSNSSDSSDSNSSDSSDSSNSSDSSDSSDSSDSSDSSDSSNSSDSSDSSDSSDSSNSSDSSNSSDSSNSSDSSDSSDSSDSSDSSDSSDSSDSSNSSDSSDSSDSSDSSDSSDSSDSSDSSESSDSSDSSNSSDSSDSSDSSDSSDSSDSSDSSDSSDSSNSSDSSDSSDSSDSSDSSNSSDSSDSSESSDSSDSSDSSDSSDSSDSSDSSDSSDSSNSSDSSDSSDSSDSSDSSDSSDSSDSSDSSDSSDSSDSSDSSDSSDSSDSSDSNESSDSSDSSDSSDSSNSSDSSDSSDSSDSTSDSNDESDSQSKSGNGNNNGSDSDSDSEGSDSNHSTSDD

SEQ ID NO: 4449 - protein, 1301 aa, Homo sapiens; identical to SEQ ID NO: 4448

SEQ ID NO: 4450 - protein, 123 aa, Homo sapiens
EMTRKQPDVDKVTKTYKRRAADPSSLQSHIPVLDKGRAGRKRFPASSLYPSGSQTQIETKNPRVNLLVSKWQQVWLLALERRRKLNDALDRLEEVWKFIPSTPHCHLPSFLITHCHCQNLGIF

SEQ ID NO: 4451 - protein, 7461 aa, Homo sapiens
MAGYLSPAAYLYVEEQEYLQAYEDVLERYKDERDKVQKKTFTKWINQHLMKVRKHVNDLYEDLRDGHNLISLLEVLSGDTLPREKGRMRFHRLQNVQIALDYLKRRQVKLVNIRNDDITDGNPKLTLGLIWTIILHFQISDIHVTGESEDMSAKERLLLWTQQATEGYAGIRCENFTTCWRDGKLFNAIIHKYRPDLIDMNTVAVQSNLANLEHAFYVAEKIGVIRLLDPEDVDVSSPDEKSVITYVSSLYDAFPKVPEGGEGIGANDVEVKWIEYQNMVNYLIQWIRHHVTTMSERTFPNNPVELKALYNQYLQFKETEIPPKETEKSKIKRLYKLLEIWIEFGRIKLLQGYHPNDIEKEWGKLIIAMLEREKALRPEVERLEMLQQIANRVQRDSVICEDKLILAGNALQSDSKRLESGVQFQNEAEIAGYILECENLLRQHVIDVQILIDGKYYQADQLVQRVAKLRDEIMALRNECSSVYSKGRILTTEQTKLMISGITQSLNSGFAQTLHPSLTSGLTQSLTPSLTSSSMTSGLSSGMTSRLTPSVTPAYTPGFPSGLVPNFSSGVEPNSLQTLKLMQIRKPLLKSSLLDQNLTEEEINMKFVQDLLNWVDEMQVQLDRTEWGSDLPSVESHLENHKNVHRAIEEFESSLKEAKISEIQMTAPLKLTYAEKLHRLESQYAKLLNTSRNQERHLDTLHNFVSRATNELIWLNEKEEEEVAYDWSERNTNIARKKDYHAELMRELDQKEENIKSVQEIAEQLLLENHPARLTIEAYRAAMQTQWSWILQLCQCVEQHIKENTAYFEFFNDAKEATDYLRNLKDAIQRKYSCDRSSSIHKLEDLVQESMEEKEELLQYKSTIANLMGKAKTIIQLKPRNSDCPLKTSIPIKAICDYRQIEITIYKDDECVLANNSHRAKWKVISPTGNEAMVPSVCFTVPPPNKEAVDLANRIEQQYQNVLTLWHESHINMKSVVSWHYLINEIDRIRASNVASIKTMLPGEHQQVLSNLQSRFEDFLEDSQESQVFSGSDITQLEKEVNVCKQYYQELLKSAEREEQEESVYNLYISEVRNIRLRLENCEDRLIRQIRTPLERDDLHESVFRITEQEKLKKELERLKDDLGTITNKCEEFFSQAAASSSVPTLRSELNVVLQNMNQVYSMSSTYIDKLKTVNLVLKNTQAAEALVKLYETKLCEEEAVIADKNNIENLISTLKQWRSEVDEKRQVFHALEDELQKAKAISDEMFKTYKERDLDFDWHKEKADQLVERWQNVHVQIDNRLRDLEGIGKSLKYYRDTYHPLDDWIQQVETTQRKIQENQPENSKTLATQLNQQKMLVSEIEMKQSKMDECQKYAEQYSATVKDYELQTMTYRAMVDSQQKSPVKRRRMQSSADLIIQEFMDLRTRYTALVTLMTQYIKFAGDSLKRLEEEEKSLEEEKKEHVEKAKELQKWVSNISKTLKDAEKAGKPPFSKQKISSEEISTKKEQLSEALQTIQLFLAKHGDKMTDEERNELEKQVKTLQESYNLLFSESLKQLQESQTSGDVKVEEKLDKVIAGTIDQTTGEVLSVFQAVLRGLIDYDTGIRLLETQLMISGLISPELRKCFDLKDAKSHGLIDEQILCQLKELSKAKEIISAASPTTIPVLDALAQSMITESMAIKVLEILLSTGSLVIPATGEQLTLQKAFQQNLVSSALFSKVLERQNMCKDLIDPCTSEKVSLIDMVQRSTLQENTGMWLLPVRPQEGGRITLKCGRNISILRAAHEGLIDRETMFRLLSAQLLSGGLINSNSGQRMTVEEAVREGVIDRDTASSILTYQVQTGGIIQSNPAKRLTVDEAVQCDLITSSSALLVLEAQRGYVGLIWPHSGEIFPTSSSLQQELITNELAYKILNGRQKIAALYIPESSQVIGLDAAKQLGIIDNNTASILKNITLPDKMPDLGDLEACKNARRWLSFCKFQPSTVHDYRQEEDVFDGEEPVTTQTSEETKKLFLSYLMINSYMDANTGQRLLLYDGDLDEAVGMLLEGCHAEFDGNTAIKECLDVLSSSGVFLNNASGREKDECTATPSSFNKCHCGEPEHEETPENRKCAIDEEFNEMRNTVINSEFSQSGKLASTISIDPKVNSSPSVCVPSLISYLTQTELADISMLRSDSENILTNYENQSRVETNERANECSHSKNIQNFPSDLIENPIMKSKMSKFCGVNETENEDNTNRDSPIFDYSPRLSALLSHDKLMHSQGSFNDTHTPESNGNKCEAPALSFSDKTMLSGQRIGEKFQDQFLGIAAINISLPGEQYGQKSLNMISSNPQVQYHNDKYISNTSGEDEKTHPGFQQMPEDKEDESEIEEYSCAVTPGGDTDNAIVSLTCATPLLDETISASDYETSLLNDQQNNTGTDTDSDDDFYDTPLFEDDDHDSLLLDGDDRDCLHPEDYDTLQEENDETASPADVFYDVSKENENSMVPQGAPVGSLSVKNKAHCLQDFLMDVEKDELDSGEKIHLNPVGSDKVNGQSLETGSERECTNILEGDESDSLTDYDIVGGKESFTASLKFDDSGSWRGRKEEYVTGQEFHSDTDHLDSMQSEESYGDYIYDSNDQDDDDDDGIDEEGGGIRDENGKPRCQNVAEDMDIQLCASILNENSDENENINTMILLDKMHSCSSLEKQQRVNVVQLASPSENNLVTEKSNLPEYTTEIAGKSKENLLNHEMVLKDVLPPIIKDTESEKTFGPASISHDNNNISSTSELGTDLANTKVKLIQGSELPELTDSVKGKDEYFKNMTPKVDSSLDHIICTEPDLIGKPAEESHLSLIASVTDKDPQGNGSDLIKGRDGKSDILIEDETSIQKMYLGEGEVLVEGLVEEENRHLKLLPGKNTRDSFKLINSQFPFPQITNNEELNQKGSLKKATVTLKDEPNNLQIIVSKSPVQFENLEEIFDTSVSKEISDDITSDITSWEGNTHFEESFTDGPEKELDLFTYLKHCAKNIKAKDVAKPNEDVPSHVLITAPPMKEHLQLGVNNTKEKSTSTQKDSPLNDMIQSNDLCSKESISGGGTEISQFTPESIEATLSILSRKHVEDVGKNDFLQSERCANGLGNDNSSNTLNTDYSFLEINNKKERIEQQLPKEQALSPRSQEKEVQIPELSQVFVEDVKDILKSRLKEGHMNPQEVEEPSACADTKILIQNLIKRITTSQLVNEASTVPSDSQMSDSSGVSPMTNSSELKPESRDDPFCIGNLKSELLLNILKQDQHSQKITGVFELMRELTHMEYDLEKRGITSKVLPLQLENIFYKLLADGYSEKIEHVGDFNQKACSTSEMMEEKPHILGDIKSKEGNYYSPNLETVKEIGLESSTVWASTLPRDEKLKDLCNDFPSHLECTSGSKEMASGDSSTEQFSSELQQCLQHTEKMHEYLTLLQDMKPPLDNQESLDNNLEALKNQLRQLETFELGLAPIAVILRKDMKLAEEFLKSLPSDFPRGHVEELSISHQSLKTAFSSLSNVSSERTKQIMLAIDSEMSKLAVSHEEFLHKLKSFSDWVSEKSKSVKDIEIVNVQDSEYVKKRLEFLKNVLKDLGHTKMQLETTAFDVQFFISEYAQDLSPNQSKQLLRLLNTTQKCFLDVQESVTTQVERLETQLHLEQDLDDQKIVAERQQEYKEKLQGICDLLTQTENRLIGHQEAFMIGDGTVELKKYQSKQEELQKDMQGSAQALAEVVKNTENFLKENGEKLSQEDKALIEQKLNEAKIKCEQLNLKAEQSKKELDKVVTTAIKEETEKVAAVKQLEESKTKIENLLDWLSNVDKDSERAGTKHKQVIEQNGTHFQEGDGKSAIGEEDEVNGNLLETDVDGQVGTTQENLNQQYQKVKAQHEKIISQHQAVIIATQSAQVLLEKQGQYLSPEEKEKLQKNMKELKVHYETALAESEKKMKLTHSLQEELEKFDADYTEFEHWLQQSEQELENLEAGADDINGLMTKLKRQKSFSEDVISHKGDLRYITISGNRVLEAAKSCSKRDGGKVDTSATHREVQRKLDHATDRFRSLYSKCNVLGNNLKDLVDKYQHYEDASCGLLAGLQACEATASKHLSEPIAVDPKNLQRQLEETKALQGQISSQQVAVEKLKKTAEVLLDARGSLLPAKNDIQKTLDDIVGRYEDLSKSVNERNEKLQITLTRSLSVQDGLDEMLDWMGNVESSLKEQGQVPLNSTALQDIISKNIMLEQDIAGRQSSINAMNEKVKKFMETTDPSTASSLQAKMKDLSARFSEASHKHKETLAKMEELKTKVELFENLSEKLQTFLETKTQALTEVDVPGKDVTELSQYMQESTSEFLEHKKHLEVLHSLLKEISSHGLPSDKALVLEKTNNLSKKFKEMEDTIKEKKEAVTSCQEQLDAFQVLVKSLKSWIKETTKKVPIVQPSFGAEDLGKSLEDTKKLQEKWSLKTPEIQKVNNSGISLCNLISAVTTPAKAIAAVKSGGAVLNGEGTATNTEEFWANKGLTSIKKDMTDISHGYEDLGLLLKDKIAELNTKLSKLQKAQEESSAMMQWLQKMNKTATKWQQTPAPTDTEAVKTQVEQNKSFEAELKQNVNKVQELKDKLTELLEENPDTPEAPRWKQMLTEIDSKWQELNQLTIDRQQKLEESSNNLTQFQTVEAQLKQWLVEKELMVSVLGPLSIDPNMLNTQRQQVQILLQEFATRKPQYEQLTAAGQGILSRPGEDPSLRGIVKEQLAAVTQKWDSLTGQLSDRCDWIDQAIVKSTQYQSLLRSLSDKLSDLDNKLSSSLAVSTHPDAMNQQLETAQKMKQEIQQEKKQIKVAQALCEDLSALVKEEYLKAELSRQLEGILKSFKDVEQKAENHVQHLQSACASSHQFQQMSRDFQAWLDTKKEEQNKSHPISAKLDVLESLIKDHKDFSKTLTAQSHMYEKTIAEGENLLLKTQGSEKAALQLQLNTIKTNWDTFNKQVKERENKLKESLEKALKYKEQVETLWPWIDKCQNNLEEIKFCLDPAEGENSIAKLKSLQKEMDQHFGMVELLNNTANSLLSVCEIDKEVVTDENKSLIQKVDMVTEQLHSKKFCLENMTQKFKEFQEVSKESKRQLQCAKEQLDIHDSLGSQAYSNKYLTMLQTQQKSLQALKHQVDLAKRLAQDLVVEASDSKGTSDVLLQVETIAQEHSTLSQQVDEKCSFLETKLQGIGHFQNTIREMFSQFAEFDDELDSMAPVGRDAETLQKQKETIKAFLKKLEALMASNDNANKTCKMMLATEETSPDLVGIKRDLEALSKQCNKLLDRAQAREEQVEGTIKRLEEFYSKLKEFSILLQKAEEHEESQGPVGMETETINQQLNMFKVFQKEEIEPLQGKQQDVNWLGQGLIQSAAKSTSTQGLEHDLDDVNARWKTLNKKVAQRAAQLQEALLHCGRFQDALESLLSWMVDTEELVANQKPPSAEFKVVKAQIQEQKLLQRLLDDRKSTVEVIKREGEKIATTAEPADKVKILKQLSLLDSRWEALLNKAETRNRQLEGISVVAQQFHETLEPLNEWLTTIEKRLVNCEPIGTQASKLEEQIAQHKVLQEDILLRKQNVDQALLNGLELLKQTTGDEVLIIQDKLEAIKARYKDITKLSTDVAKTLEQALQLARRLHSTHEELCTWLDKVEVELLSYETQVLKGEEASQAQMRPKELKKEAKNNKALLDSLNEVSSALLELVPWRAREGLEKMVAEDNERYRLVSDTITQKVEEIDAAILRSQQFDQAADAELSWITETEKKLMSLGDIRLEQDQTSAQLQVQKTFTMEILRHKDIIDDLVKSGHKIMTACSEEEKQSMKKKLDKVLKNYDTICQINSERYLQLERAQSLVNQFWETYEELWPWLTETQSIISQLPAPALEYETLRQQQEEHRQLRELIAEHKPHIDKMNKTGPQLLELSPGEGFSIQEKYVAADTLYSQIKEDVKKRAVALDEAISQSTQFHDKIDQILESLERIVERLRQPPSISAEVEKIKEQISENKNVSVDMEKLQPLYETLKQRGEEMIARSGGTDKDISAKAVQDKLDQMVFIWENIHTLVEEREAKLLDVMELAEKFWCDHMSLIVTIKDTQDFIRDLEDPGIDPSVVKQQQEAAETIREEIDGLQEELDIVINLGSELIAACGEPDKPIVKKSIDELNSAWDSLNKAWKDRIDKLEEAMQAAVQYQDGLQAVFDWVDIAGGKLASMSPIGTDLETVKQQIEELKQFKSEAYQQQIEMERLNHQAELLLKKVTEESDKHTVQDPLMELKLIWDSLEERIINRQHKLEGALLALGQFQHALDELLAWLTHTEGLLSEQKPVGGDPKAIEIELAKHHVLQNDVLAHQSTVEAVNKAGNDLIESSAGEEASNLQNKLEVLNQRWQNVLEKTEQRKQQLDGALRQAKGFHGEIEDLQQWLTDTERHLLASKPLGGLPETAKEQLNVHMEVCAAFEAKEETYKSLMQKGQQMLARCPKSAETNIDQDINNLKEKWESVETKLNERKTKLEEALNLAMEFHNSLQDFINWLTQAEQTLNVASRPSLILDTVLFQIDEHKVFANEVNSHREQIIELDKTGTHLKYFSQKQDVVLIKNLLISVQSRWEKVVQRLVERGRSLDDARKRAKQFHEAWSKLMEWLEESEKSLDSELEIANDPDKIKTQLAQHKEFQKSLGAKHSVYDTTNRTGRSLKEKTSLADDNLKLDDMLSELRDKWDTICGKSVERQNKLEEALLFSGQFTDALQALIDWLYRVEPQLAEDQPVHGDIDLVMNLIDNHKAFQKELGKRTSSVQALKRSARELIEGSRDDSSWVKVQMQELSTRWETVCALSISKQTRLEAALRQAEEFHSVVHALLEWLAEAEQTLRFHGVLPDDEDALRTLIDQHKEFMKKLEEKRAELNKATTMGDTVLAICHPDSITTIKHWITIIRARFEEVLAWAKQHQQRLASALAGLIAKQELLEALLAWLQWAETTLTDKDKEVIPQEIEEVKALIAEHQTFMEEMTRKQPDVDKVTKTYKRRAADPSSLQSHIPVLDKGRAGRKRFPASSLYPSGSQTQIETKNPRVNLLVSKWQQVWLLALERRRKLNDALDRLEELREFANFDFDIWRKKYMRWMNHKKSRVMDFFRRIDKDQDGKITRQEFIDGILSSKFPTSRLEMSAVADIFDRDGDGYIDYYEFVAALHPNKDAYKPITDADKIEDEVTRQVAKCKCAKRFQVEQIGDNKYRFFLGNQFGDSQQLRLVRILRSTVMVRVGGGWMALDEFLVKNDPCRVHHHGSKMLRSESNSSITTTQPTIAKGRTNMELREKFILADGASQGMAAFRPRGRRSRPSSRGASPNRSTSVSSQAAQAASPQVPATTTPKGTPIQGSKLRLPGYLSGKGFHSGEDSGLITTAAARVRTQFADSKKTPSRPGSRAGSKAGSRASSRRGSDASDFDISEIQSVCSDVETVPQTHRPTPRAGSRPSTAKPSKIPTPQRKSPASKLDKSSKR

SEQ ID NO: 4452 - protein, 5375 aa, Homo sapiens
MAGYLSPAAYLYVEEQEYLQAYEDVLERYKDERDKVQKKTFTKWINQHLMKVRKHVNDLYEDLRDGHNLISLLEVLSGDTLPREKGRMRFHRLQNVQIALDYLKRRQVKLVNIRNDDITDGNPKLTLGLIWTIILHFQISDIHVTGESEDMSAKERLLLWTQQATEGYAGIRCENFTTCWRDGKLFNAIIHKYRPDLIDMNTVAVQSNLANLEHAFYVAEKIGVIRLLDPEDVDVSSPDEKSVITYVSSLYDAFPKVPEGGEGIGANDVEVKWIEYQNMVNYLIQWIRHHVTTMSERTFPNNPVELKALYNQYLQFKETEIPPKETEKSKIKRLYKLLEIWIEFGRIKLLQGYHPNDIEKEWGKLIIAMLEREKALRPEVERLEMLQQIANRVQRDSVICEDKLILAGNALQSDSKRLESGVQFQNEAEIAGYILECENLLRQHVIDVQILIDGKYYQADQLVQRVAKLRDEIMALRNECSSVYSKGRILTTEQTKLMISGITQSLNSGFAQTLHPSLTSGLTQSLTPSLTSSSMTSGLSSGMTSRLTPSVTPAYTPGFPSGLVPNFSSGVEPNSLQTLKLMQIRKPLLKSSLLDQNLTEEEINMKFVQDLLNWVDEMQVQLDRTEWGSDLPSVESHLENHKNVHRAIEEFESSLKEAKISEIQMTAPLKLTYAEKLHRLESQYAKLLNTSRNQERHLDTLHNFVSRATNELIWLNEKEEEEVAYDWSERNTNIARKKDYHAELMRELDQKEENIKSVQEIAEQLLLENHPARLTIEAYRAAMQTQWSWILQLCQCVEQHIKENTAYFEFFNDAKEATDYLRNLKDAIQRKYSCDRSSSIHKLEDLVQESMEEKEELLQYKSTIANLMGKAKTIIQLKPRNSDCPLKTSIPIKAICDYRQIEITIYKDDECVLANNSHRAKWKVISPTGNEAMVPSVCFTVPPPNKEAVDLANRIEQQYQNVLTLWHESHINMKSVVSWHYLINEIDRIRASNVASIKTMLPGEHQQVLSNLQSRFEDFLEDSQESQVFSGSDITQLEKEVNVCKQYYQELLKSAEREEQEESVYNLYISEVRNIRLRLENCEDRLIRQIRTPLERDDLHESVFRITEQEKLKKELERLKDDLGTITNKCEEFFSQAAASSSVPTLRSELNVVLQNMNQVYSMSSTYIDKLKTVNLVLKNTQAAEALVKLYETKLCEEEAVIADKNNIENLISTLKQWRSEVDEKRQVFHALEDELQKAKAISDEMFKTYKERDLDFDWHKEKADQLVERWQNVHVQIDNRLRDLEGIGKSLKYYRDTYHPLDDWIQQVETTQRKIQENQPENSKTLATQLNQQKMLVSEIEMKQSKMDECQKYAEQYSATVKDYELQTMTYRAMVDSQQKSPVKRRRMQSSADLIIQEFMDLRTRYTALVTLMTQYIKFAGDSLKRLEEEEKSLEEEKKEHVEKAKELQKWVSNISKTLKDAEKAGKPPFSKQKISSEEISTKKEQLSEALQTIQLFLAKHGDKMTDEERNELEKQVKTLQESYNLLFSESLKQLQESQTSGDVKVEEKIVAERQQEYKEKLQGICDLLTQTENRLIGHQEAFMIGDGTVELKKYQSKQEELQKDMQGSAQALAEVVKNTENFLKENGEKLSQEDKALIEQKLNEAKIKCEQLNLKAEQSKKELDKVVTTAIKEETEKVAAVKQLEESKTKIENLLDWLSNVDKDSERAGTKHKQVIEQNGTHFQEGDGKSAIGEEDEVNGNLLETDVDGQVGTTQENLNQQYQKVKAQHEKIISQHQAVIIATQSAQVLLEKQGQYLSPEEKEKLQKNMKELKVHYETALAESEKKMKLTHSLQEELEKFDADYTEFEHWLQQSEQELENLEAGADDINGLMTKLKRQKSFSEDVISHKGDLRYITISGNRVLEAAKSCSKRDGGKVDTSATHREVQRKLDHATDRFRSLYSKCNVLGNNLKDLVDKYQHYEDASCGLLAGLQACEATASKHLSEPIAVDPKNLQRQLEETKALQGQISSQQVAVEKLKKTAEVLLDARGSLLPAKNDIQKTLDDIVGRYEDLSKSVNERNEKLQITLTRSLSVQDGLDEMLDWMGNVESSLKEQGQVPLNSTALQDIISKNIMLEQDIAGRQSSINAMNEKVKKFMETTDPSTASSLQAKMKDLSARFSEASHKHKETLAKMEELKTKVELFENLSEKLQTFLETKTQALTEVDVPGKDVTELSQYMQESTSEFLEHKKHLEVLHSLLKEISSHGLPSDKALVLEKTNNLSKKFKEMEDTIKEKKEAVTSCQEQLDAFQVLVKSLKSWIKETTKKVPIVQPSFGAEDLGKSLEDTKKLQEKWSLKTPEIQKVNNSGISLCNLISAVTTPAKAIAAVKSGGAVLNGEGTATNTEEFWANKGLTSIKKDMTDISHGYEDLGLLLKDKIAELNTKLSKLQKAQEESSAMMQWLQKMNKTATKWQQTPAPTDTEAVKTQVEQNKSFEAELKQNVNKVQELKDKLTELLEENPDTPEAPRWKQMLTEIDSKWQELNQLTIDRQQKLEESSNNLTQFQTVEAQLKQWLVEKELMVSVLGPLSIDPNMLNTQRQQVQILLQEFATRKPQYEQLTAAGQGILSRPGEDPSLRGIVKEQLAAVTQKWDSLTGQLSDRCDWIDQAIVKSTQYQSLLRSLSDKLSDLDNKLSSSLAVSTHPDAMNQQLETAQKMKQEIQQEKKQIKVAQALCEDLSALVKEEYLKAELSRQLEGILKSFKDVEQKAENHVQHLQSACASSHQFQQMSRDFQAWLDTKKEEQNKSHPISAKLDVLESLIKDHKDFSKTLTAQSHMYEKTIAEGENLLLKTQGSEKAALQLQLNTIKTNWDTFNKQVKERENKLKESLEKALKYKEQVETLWPWIDKCQNNLEEIKFCLDPAEGENSIAKLKSLQKEMDQHFGMVELLNNTANSLLSVCEIDKEVVTDENKSLIQKVDMVTEQLHSKKFCLENMTQKFKEFQEVSKESKRQLQCAKEQLDIHDSLGSQAYSNKYLTMLQTQQKSLQALKHQVDLAKRLAQDLVVEASDSKGTSDVLLQVETIAQEHSTLSQQVDEKCSFLETKLQGIGHFQNTIREMFSQFAEFDDELDSMAPVGRDAETLQKQKETIKAFLKKLEALMASNDNANKTCKMMLATEETSPDLVGIKRDLEALSKQCNKLLDRAQAREEQVEGTIKRLEEFYSKLKEFSILLQKAEEHEESQGPVGMETETINQQLNMFKVFQKEEIEPLQGKQQDVNWLGQGLIQSAAKSTSTQGLEHDLDDVNARWKTLNKKVAQRAAQLQEALLHCGRFQDALESLLSWMVDTEELVANQKPPSAEFKVVKAQIQEQKLLQRLLDDRKSTVEVIKREGEKIATTAEPADKVKILKQLSLLDSRWEALLNKAETRNRQLEGISVVAQQFHETLEPLNEWLTTIEKRLVNCEPIGTQASKLEEQIAQHKVLQEDILLRKQNVDQALLNGLELLKQTTGDEVLIIQDKLEAIKARYKDITKLSTDVAKTLEQALQLARRLHSTHEELCTWLDKVEVELLSYETQVLKGEEASQAQMRPKELKKEAKNNKALLDSLNEVSSALLELVPWRAREGLEKMVAEDNERYRLVSDTITQKVEEIDAAILRSQQFDQAADAELSWITETEKKLMSLGDIRLEQDQTSAQLQVQKTFTMEILRHKDIIDDLVKSGHKIMTACSEEEKQSMKKKLDKVLKNYDTICQINSERYLQLERAQSLVNQFWETYEELWPWLTETQSIISQLPAPALEYETLRQQQEEHRQLRELIAEHKPHIDKMNKTGPQLLELSPGEGFSIQEKYVAADTLYSQIKEDVKKRAVALDEAISQSTQFHDKIDQILESLERIVERLRQPPSISAEVEKIKEQISENKNVSVDMEKLQPLYETLKQRGEEMIARSGGTDKDISAKAVQDKLDQMVFIWENIHTLVEEREAKLLDVMELAEKFWCDHMSLIVTIKDTQDFIRDLEDPGIDPSVVKQQQEAAETIREEIDGLQEELDIVINLGSELIAACGEPDKPIVKKSIDELNSAWDSLNKAWKDRIDKLEEAMQAAVQYQDGLQAVFDWVDIAGGKLASMSPIGTDLETVKQQIEELKQFKSEAYQQQIEMERLNHQAELLLKKVTEESDKHTVQDPLMELKLIWDSLEERIINRQHKLEGALLALGQFQHALDELLAWLTHTEGLLSEQKPVGGDPKAIEIELAKHHVLQNDVLAHQSTVEAVNKAGNDLIESSAGEEASNLQNKLEVLNQRWQNVLEKTEQRKQQLDGALRQAKGFHGEIEDLQQWLTDTERHLLASKPLGGLPETAKEQLNVHMEVCAAFEAKEETYKSLMQKGQQMLARCPKSAETNIDQDINNLKEKWESVETKLNERKTKLEEALNLAMEFHNSLQDFINWLTQAEQTLNVASRPSLILDTVLFQIDEHKVFANEVNSHREQIIELDKTGTHLKYFSQKQDVVLIKNLLISVQSRWEKVVQRLVERGRSLDDARKRAKQFHEAWSKLMEWLEESEKSLDSELEIANDPDKIKTQLAQHKEFQKSLGAKHSVYDTTNRTGRSLKEKTSLADDNLKLDDMLSELRDKWDTICGKSVERQNKLEEALLFSGQFTDALQALIDWLYRVEPQLAEDQPVHGDIDLVMNLIDNHKAFQKELGKRTSSVQALKRSARELIEGSRDDSSWVKVQMQELSTRWETVCALSISKQTRLEAALRQAEEFHSVVHALLEWLAEAEQTLRFHGVLPDDEDALRTLIDQHKEFMKKLEEKRAELNKATTMGDTVLAICHPDSITTIKHWITIIRARFEEVLAWAKQHQQRLASALAGLIAKQELLEALLAWLQWAETTLTDKDKEVIPQEIEEVKALIAEHQTFMEEMTRKQPDVDKVTKTYKRRAADPSSLQSHIPVLDKGRAGRKRFPASSLYPSGSQTQIETKNPRVNLLVSKWQQVWLLALERRRKLNDALDRLEELREFANFDFDIWRKKYMRWMNHKKSRVMDFFRRIDKDQDGKITRQEFIDGILSSKFPTSRLEMSAVADIFDRDGDGYIDYYEFVAALHPNKDAYKPITDADKIEDEVTRQVAKCKCAKRFQVEQIGDNKYRFFLGNQFGDSQQLRLVRILRSTVMVRVGGGWMALDEFLVKNDPCRVHHHGSKMLRSESNSSITTTQPTIAKGRTNMELREKFILADGASQGMAAFRPRGRRSRPSSRGASPNRSTSVSSQAAQAASPQVPATTTPKGTPIQGSKLRLPGYLSGKGFHSGEDSGLITTAAARVRTQFADSKKTPSRPGSRAGSKAGSRASSRRGSDASDFDISEIQSVCSDVETVPQTHRPTPRAGSRPSTAKPSKIPTPQRKSPASKLDKSSKR

SEQ ID NO: 4453 - protein, 5497 aa, Homo sapiens
MAGYLSPAAYLYVEEQEYLQAYEDVLERYKDERDKVQKKTFTKWINQHLMKVRKHVNDLYEDLRDGHNLISLLEVLSGDTLPREKGRMRFHRLQNVQIALDYLKRRQVKLVNIRNDDITDGNPKLTLGLIWTIILHFQISDIHVTGESEDMSAKERLLLWTQQATEGYAGIRCENFTTCWRDGKLFNAIIHKYRPDLIDMNTVAVQSNLANLEHAFYVAEKIGVIRLLDPEDVDVSSPDEKSVITYVSSLYDAFPKVPEGGEGIGANDVEVKWIEYQNMVNYLIQWIRHHVTTMSERTFPNNPVELKALYNQYLQFKETEIPPKETEKSKIKRLYKLLEIWIEFGRIKLLQGYHPNDIEKEWGKLIIAMLEREKALRPEVERLEMLQQIANRVQRDSVICEDKLILAGNALQSDSKRLESGVQFQNEAEIAGYILECENLLRQHVIDVQILIDGKYYQADQLVQRVAKLRDEIMALRNECSSVYSKGRILTTEQTKLMISGITQSLNSGFAQTLHPSLTSGLTQSLTPSLTSSSMTSGLSSGMTSRLTPSVTPAYTPGFPSGLVPNFSSGVEPNSLQTLKLMQIRKPLLKSSLLDQNLTEEEINMKFVQDLLNWVDEMQVQLDRTEWGSDLPSVESHLENHKNVHRAIEEFESSLKEAKISEIQMTAPLKLTYAEKLHRLESQYAKLLNTSRNQERHLDTLHNFVSRATNELIWLNEKEEEEVAYDWSERNTNIARKKDYHAELMRELDQKEENIKSVQEIAEQLLLENHPARLTIEAYRAAMQTQWSWILQLCQCVEQHIKENTAYFEFFNDAKEATDYLRNLKDAIQRKYSCDRSSSIHKLEDLVQESMEEKEELLQYKSTIANLMGKAKTIIQLKPRNSDCPLKTSIPIKAICDYRQIEITIYKDDECVLANNSHRAKWKVISPTGNEAMVPSVCFTVPPPNKEAVDLANRIEQQYQNVLTLWHESHINMKSVVSWHYLINEIDRIRASNVASIKTMLPGEHQQVLSNLQSRFEDFLEDSQESQVFSGSDITQLEKEVNVCKQYYQELLKSAEREEQEESVYNLYISEVRNIRLRLENCEDRLIRQIRTPLERDDLHESVFRITEQEKLKKELERLKDDLGTITNKCEEFFSQAAASSSVPTLRSELNVVLQNMNQVYSMSSTYIDKLKTVNLVLKNTQAAEALVKLYETKLCEEEAVIADKNNIENLISTLKQWRSEVDEKRQVFHALEDELQKAKAISDEMFKTYKERDLDFDWHKEKADQLVERWQNVHVQIDNRLRDLEGIGKSLKYYRDTYHPLDDWIQQVETTQRKIQENQPENSKTLATQLNQQKMLVSEIEMKQSKMDECQKYAEQYSATVKDYELQTMTYRAMVDSQQKSPVKRRRMQSSADLIIQEFMDLRTRYTALVTLMTQYIKFAGDSLKRLEEEEKSLEEEKKEHVEKAKELQKWVSNISKTLKDAEKAGKPPFSKQKISSEEISTKKEQLSEALQTIQLFLAKHGDKMTDEERNELEKQVKTLQESYNLLFSESLKQLQESQTSGDVKVEEKIVAERQQEYKEKLQGICDLLTQTENRLIGHQEAFMIGDGTVELKKYQSKQEELQKDMQGSAQALAEVVKNTENFLKENGEKLSQEDKALIEQKLNEAKIKCEQLNLKAEQSKKELDKVVTTAIKEETEKVAAVKQLEESKTKIENLLDWLSNVDKDSERAGTKHKQVIEQNGTHFQEGDGKSAIGEEDEVNGNLLETDVDGQVGTTQENLNQQYQKVKAQHEKIISQHQAVIIATQSAQVLLEKQGQYLSPEEKEKLQKNMKELKVHYETALAESEKKMKLTHSLQEELEKFDADYTEFEHWLQQSEQELENLEAGADDINGLMTKLKRQKSFSEDVISHKGDLRYITISGNRVLEAAKSCSKRDGGKVDTSATHREVQRKLDHATDRFRSLYSKCNVLGNNLKDLVDKYQHYEDASCGLLAGLQACEATASKHLSEPIAVDPKNLQRQLEETKALQGQISSQQVAVEKLKKTAEVLLDARGSLLPAKNDIQKTLDDIVGRYEDLSKSVNERNEKLQITLTRSLSVQDGLDEMLDWMGNVESSLKEQGQVPLNSTALQDIISKNIMLEQDIAGRQSSINAMNEKVKKFMETTDPSTASSLQAKMKDLSARFSEASHKHKETLAKMEELKTKVELFENLSEKLQTFLETKTQALTEVDVPGKDVTELSQYMQESTSEFLEHKKHLEVLHSLLKEISSHGLPSDKALVLEKTNNLSKKFKEMEDTIKEKKEAVTSCQEQLDAFQVLVKSLKSWIKETTKKVPIVQPSFGAEDLGKSLEDTKKLQEKWSLKTPEIQKVNNSGISLCNLISAVTTPAKAIAAVKSGGAVLNGEGTATNTEEFWANKGLTSIKKDMTDISHGYEDLGLLLKDKIAELNTKLSKLQKAQEESSAMMQWLQKMNKTATKWQQTPAPTDTEAVKTQVEQNKSFEAELKQNVNKVQELKDKLTELLEENPDTPEAPRWKQMLTEIDSKWQELNQLTIDRQQKLEESSNNLTQFQTVEAQLKQWLVEKELMVSVLGPLSIDPNMLNTQRQQVQILLQEFATRKPQYEQLTAAGQGILSRPGEDPSLRGIVKEQLAAVTQKWDSLTGQLSDRCDWIDQAIVKSTQYQSLLRSLSDKLSDLDNKLSSSLAVSTHPDAMNQQLETAQKMKQEIQQEKKQIKVAQALCEDLSALVKEEYLKAELSRQLEGILKSFKDVEQKAENHVQHLQSACASSHQFQQMSRDFQAWLDTKKEEQNKSHPISAKLDVLESLIKDHKDFSKTLTAQSHMYEKTIAEGENLLLKTQGSEKAALQLQLNTIKTNWDTFNKQVKERENKLKESLEKALKYKEQVETLWPWIDKCQNNLEEIKFCLDPAEGENSIAKLKSLQKEMDQHFGMVELLNNTANSLLSVCEIDKEVVTDENKSLIQKVDMVTEQLHSKKFCLENMTQKFKEFQEVSKESKRQLQCAKEQLDIHDSLGSQAYSNKYLTMLQTQQKSLQALKHQVDLAKRLAQDLVVEASDSKGTSDVLLQVETIAQEHSTLSQQVDEKCSFLETKLQGIGHFQNTIREMFSQFAEFDDELDSMAPVGRDAETLQKQKETIKAFLKKLEALMASNDNANKTCKMMLATEETSPDLVGIKRDLEALSKQCNKLLDRAQAREEQVEGTIKRLEEFYSKLKEFSILLQKAEEHEESQGPVGMETETINQQLNMFKVFQKEEIEPLQGKQQDVNWLGQGLIQSAAKSTSTQGLEHDLDDVNARWKTLNKKVAQRAAQLQEALLHCGRFQDALESLLSWMVDTEELVANQKPPSAEFKVVKAQIQEQKLLQRLLDDRKSTVEVIKREGEKIATTAEPADKVKILKQLSLLDSRWEALLNKAETRNRQLEGISVVAQQFHETLEPLNEWLTTIEKRLVNCEPIGTQASKLEEQIAQHKALEDDIINHNKHLHQAVSIGQSLKVLSSREDKDMVQSKLDFSQVWYIEIQEKSHSRSELLQQALCNAKIFGEDEVELMNWLNEVHDKLSKLSVQDYSTEGLWKQQSELRVLQEDILLRKQNVDQALLNGLELLKQTTGDEVLIIQDKLEAIKARYKDITKLSTDVAKTLEQALQLARRLHSTHEELCTWLDKVEVELLSYETQVLKGEEASQAQMRPKELKKEAKNNKALLDSLNEVSSALLELVPWRAREGLEKMVAEDNERYRLVSDTITQKVEEIDAAILRSQQFDQAADAELSWITETEKKLMSLGDIRLEQDQTSAQLQVQKTFTMEILRHKDIIDDLVKSGHKIMTACSEEEKQSMKKKLDKVLKNYDTICQINSERYLQLERAQSLVNQFWETYEELWPWLTETQSIISQLPAPALEYETLRQQQEEHRQLRELIAEHKPHIDKMNKTGPQLLELSPGEGFSIQEKYVAADTLYSQIKEDVKKRAVALDEAISQSTQFHDKIDQILESLERIVERLRQPPSISAEVEKIKEQISENKNVSVDMEKLQPLYETLKQRGEEMIARSGGTDKDISAKAVQDKLDQMVFIWENIHTLVEEREAKLLDVMELAEKFWCDHMSLIVTIKDTQDFIRDLEDPGIDPSVVKQQQEAAETIREEIDGLQEELDIVINLGSELIAACGEPDKPIVKKSIDELNSAWDSLNKAWKDRIDKLEEAMQAAVQYQDGLQAVFDWVDIAGGKLASMSPIGTDLETVKQQIEELKQFKSEAYQQQIEMERLNHQAELLLKKVTEESDKHTVQDPLMELKLIWDSLEERIINRQHKLEGALLALGQFQHALDELLAWLTHTEGLLSEQKPVGGDPKAIEIELAKHHVLQNDVLAHQSTVEAVNKAGNDLIESSAGEEASNLQNKLEVLNQRWQNVLEKTEQRKQQLDGALRQAKGFHGEIEDLQQWLTDTERHLLASKPLGGLPETAKEQLNVHMEVCAAFEAKEETYKSLMQKGQQMLARCPKSAETNIDQDINNLKEKWESVETKLNERKTKLEEALNLAMEFHNSLQDFINWLTQAEQTLNVASRPSLILDTVLFQIDEHKVFANEVNSHREQIIELDKTGTHLKYFSQKQDVVLIKNLLISVQSRWEKVVQRLVERGRSLDDARKRAKQFHEAWSKLMEWLEESEKSLDSELEIANDPDKIKTQLAQHKEFQKSLGAKHSVYDTTNRTGRSLKEKTSLADDNLKLDDMLSELRDKWDTICGKSVERQNKLEEALLFSGQFTDALQALIDWLYRVEPQLAEDQPVHGDIDLVMNLIDNHKAFQKELGKRTSSVQALKRSARELIEGSRDDSSWVKVQMQELSTRWETVCALSISKQTRLEAALRQAEEFHSVVHALLEWLAEAEQTLRFHGVLPDDEDALRTLIDQHKEFMKKLEEKRAELNKATTMGDTVLAICHPDSITTIKHWITIIRARFEEVLAWAKQHQQRLASALAGLIAKQELLEALLAWLQWAETTLTDKDKEVIPQEIEEVKALIAEHQTFMEEMTRKQPDVDKVTKTYKRRAADPSSLQSHIPVLDKGRAGRKRFPASSLYPSGSQTQIETKNPRVNLLVSKWQQVWLLALERRRKLNDALDRLEELREFANFDFDIWRKKYMRWMNHKKSRVMDFFRRIDKDQDGKITRQEFIDGILSSKFPTSRLEMSAVADIFDRDGDGYIDYYEFVAALHPNKDAYKPITDADKIEDEVTRQVAKCKCAKRFQVEQIGDNKYRFFLGNQFGDSQQLRLVRILRSTVMVRVGGGWMALDEFLVKNDPCRAKGRTNMELREKFILADGASQGMAAFRPRGRRSRPSSRGASPNRSTSVSSQAAQAASPQVPATTTPKILHPLTRNYGKPWLTNSKMSTPCKAAECSDFPVPSAEGTPIQGSKLRLPGYLSGKGFHSGEDSGLITTAAARVRTQFADSKKTPSRPGSRAGSKAGSRASSRRGSDASDFDISEIQSVCSDVETVPQTHRPTPRAGSRPSTAKPSKIPTPQRKSPASKLDKSSKR

SEQ ID NO: 4454 - protein, 1674 aa, Homo sapiens
MGKPLSRPDCLRQNPPCVGKGEEEEDLNIEDCYVPQRSIYDTVRLNEQIDSGSKGSLSSRHFTDRTLPYSHRTLDVSSLCSNGALTSSSVFELRGREANKLDEKMIFDALKLNSDIIRTTGLPKAKSHAEKKEHRRSWRMFVPANFMDYANKSESSFVEPADMSDAVTKASKCRWGTNSLTSEEDDSGLCSPPAEREEKQGILTGDQSRIKSLSSTEDILVTDQYRPFFSVNSISEQKIPLLSCQSAHPDENFKMILHDVSPLEEAKHVNGQREIHDENCCLQNNLKESPVKCDPLIMPRNRENEHIFNLGEEDETYGPGESQITAQSRELLKDSPQDLDLSHTDLGESDVDCGSTSLVENVTLLTQYDSGECNIASKEEVEAPLSAQESEMLYKKFSLKFVSARKKAAPRKTGAQAGILDTVCNGFQLVQVFQKEEIEPLQGKQQDVNWLGQGLIQSAAKSTSTQGLEHDLDDVNARWKTLNKKVAQRAAQLQEALLHCGRFQDALESLLSWMVDTEELVANQKPPSAEFKVVKAQIQEQKLLQRLLDDRKSTVEVIKREGEKIATTAEPADKVKILKQLSLLDSRWEALLNKAETRNRQLEGISVVAQQFHETLEPLNEWLTTIEKRLVNCEPIGTQASKLEEQIAQHKALEDDIINHNKHLHQAVSIGQSLKVLSSREDKDMVQSKLDFSQVWYIEIQEKSHSRSELLQQALCNAKIFGEDEVELMNWLNEVHDKLSKLSVQDYSTEGLWKQQSELRVLQEDILLRKQNVDQALLNGLELLKQTTGDEVLIIQDKLEAIKARYKDITKLSTDVAKTLEQALQLARRLHSTHEELCTWLDKVEVELLSYETQVLKGEEASQAQMRPKELKKEAKNNKALLDSLNEVSSALLELVPWRAREGLEKMVAEDNERYRLVSDTITQKVEEIDAAILRSQQFDQAADAELSWITETEKKLMSLGDIRLEQDQTSAQLQVQKTFTMEILRHKDIIDDLVKSGHKIMTACSEEEKQSMKKKLDKVLKNYDTICQINSERYLQLERAQSLVNQFWETYEELWPWLTETQSIISQLPAPALEYETLRQQQEEHRQLRELIAEHKPHIDKMNKTGPQLLELSPGEGFSIQEKYVAADTLYSQIKEDVKKRAVALDEAISQSTQFHDKIDQILESLERIVERLRQPPSISAEVEKIKEQISENKNVSVDMEKLQPLYETLKQRGEEMIARSGGTDKDISAKAVQDKLDQMVFIWENIHTLVEEREAKLLDVMELAEKFWCDHMSLIVTIKDTQDFIRDLEDPGIDPSVVKQQQEAAETIREEIDGLQEELDIVINLGSELIAACGEPDKPIVKKSIDELNSAWDSLNKAWKDRIDKLEEAMQAAVQYQDGLQAVFDWVDIAGGKLASMSPIGTDLETVKQQIEELKQFKSEAYQQQIEMERLNHQAELLLKKVTEESDKHTVQDPLMELKLIWDSLEERIINRQHKLEGALLALGQFQHALDELLAWLTHTEGLLSEQKPVGGDPKAIEIELAKHHVLQNDVLAHQSTVEAVNKAGNDLIESSAGEEASNLQNKLEVLNQRWQNVLEKTEQRKQQLDGALRQAKGFHGEIEDLQQWLTDTERHLLASKPLGGLPETAKEQLNVHMEVCAAFEAKEETYKSLMQKGQQMLARCPKSAETNIDQD

SEQ ID NO: 4455 - protein, 304 aa, Homo sapiens
MGNVCGCVRAEKEEQYVDPAKTPLNPEKYSPGRKYFRRKPIKKTGGDKESVGANNENEGKKKSSSQPSKEQPAPLSRGLVQQESVTLNSALGDGIQQKKTEVVADSVKQKLLPSAVSSWSDCVNTSPAKDSETEVKVSELDERISEKDSTPYCAKRKKHLDDVNTSEITFQEKTDVFSFRKAASLSSIPSGIERSLEKSGFPEDPPKSYSSIQEKQNTERFCPHATQHFQFKKKRCHSLYTSMSSVSKDTDGNEISDIHVTGESEDMSAKERLLLWTQQATEGYAGIRCENFTTCWRDGKLFNA

SEQ ID NO: 4456 - protein, 5171 aa, Homo sapiens
MHSSSYSYRSSDSVFSNTTSTRTSLDSNENLLLVHCGPTLINSCISFGSESFDGHRLEMLQQIANRVQRDSVICEDKLILAGNALQSDSKRLESGVQFQNEAEIAGYILECENLLRQHVIDVQILIDGKYYQADQLVQRVAKLRDEIMALRNECSSVYSKGRILTTEQTKLMISGITQSLNSGFAQTLHPSLTSGLTQSLTPSLTSSSMTSGLSSGMTSRLTPSVTPAYTPGFPSGLVPNFSSGVEPNSLQTLKLMQIRKPLLKSSLLDQNLTEEEINMKFVQDLLNWVDEMQVQLDRTEWGSDLPSVESHLENHKNVHRAIEEFESSLKEAKISEIQMTAPLKLTYAEKLHRLESQYAKLLNTSRNQERHLDTLHNFVSRATNELIWLNEKEEEEVAYDWSERNTNIARKKDYHAELMRELDQKEENIKSVQEIAEQLLLENHPARLTIEAYRAAMQTQWSWILQLCQCVEQHIKENTAYFEFFNDAKEATDYLRNLKDAIQRKYSCDRSSSIHKLEDLVQESMEEKEELLQYKSTIANLMGKAKTIIQLKPRNSDCPLKTSIPIKAICDYRQIEITIYKDDECVLANNSHRAKWKVISPTGNEAMVPSVCFTVPPPNKEAVDLANRIEQQYQNVLTLWHESHINMKSVVSWHYLINEIDRIRASNVASIKTMLPGEHQQVLSNLQSRFEDFLEDSQESQVFSGSDITQLEKEVNVCKQYYQELLKSAEREEQEESVYNLYISEVRNIRLRLENCEDRLIRQIRTPLERDDLHESVFRITEQEKLKKELERLKDDLGTITNKCEEFFSQAAASSSVPTLRSELNVVLQNMNQVYSMSSTYIDKLKTVNLVLKNTQAAEALVKLYETKLCEEEAVIADKNNIENLISTLKQWRSEVDEKRQVFHALEDELQKAKAISDEMFKTYKERDLDFDWHKEKADQLVERWQNVHVQIDNRLRDLEGIGKSLKYYRDTYHPLDDWIQQVETTQRKIQENQPENSKTLATQLNQQKMLVSEIEMKQSKMDECQKYAEQYSATVKDYELQTMTYRAMVDSQQKSPVKRRRMQSSADLIIQEFMDLRTRYTALVTLMTQYIKFAGDSLKRLEEEEKSLEEEKKEHVEKAKELQKWVSNISKTLKDAEKAGKPPFSKQKISSEEISTKKEQLSEALQTIQLFLAKHGDKMTDEERNELEKQVKTLQESYNLLFSESLKQLQESQTSGDVKVEEKIVAERQQEYKEKLQGICDLLTQTENRLIGHQEAFMIGDGTVELKKYQSKQEELQKDMQGSAQALAEVVKNTENFLKENGEKLSQEDKALIEQKLNEAKIKCEQLNLKAEQSKKELDKVVTTAIKEETEKVAAVKQLEESKTKIENLLDWLSNVDKDSERAGTKHKQVIEQNGTHFQEGDGKSAIGEEDEVNGNLLETDVDGQVGTTQENLNQQYQKVKAQHEKIISQHQAVIIATQSAQVLLEKQGQYLSPEEKEKLQKNMKELKVHYETALAESEKKMKLTHSLQEELEKFDADYTEFEHWLQQSEQELENLEAGADDINGLMTKLKRQKSFSEDVISHKGDLRYITISGNRVLEAAKSCSKRDGGKVDTSATHREVQRKLDHATDRFRSLYSKCNVLGNNLKDLVDKYQHYEDASCGLLAGLQACEATASKHLSEPIAVDPKNLQRQLEETKALQGQISSQQVAVEKLKKTAEVLLDARGSLLPAKNDIQKTLDDIVGRYEDLSKSVNERNEKLQITLTRSLSVQDGLDEMLDWMGNVESSLKEQGQVPLNSTALQDIISKNIMLEQDIAGRQSSINAMNEKVKKFMETTDPSTASSLQAKMKDLSARFSEASHKHKETLAKMEELKTKVELFENLSEKLQTFLETKTQALTEVDVPGKDVTELSQYMQESTSEFLEHKKHLEVLHSLLKEISSHGLPSDKALVLEKTNNLSKKFKEMEDTIKEKKEAVTSCQEQLDAFQVLVKSLKSWIKETTKKVPIVQPSFGAEDLGKSLEDTKKLQEKWSLKTPEIQKVNNSGISLCNLISAVTTPAKAIAAVKSGGAVLNGEGTATNTEEFWANKGLTSIKKDMTDISHGYEDLGLLLKDKIAELNTKLSKLQKAQEESSAMMQWLQKMNKTATKWQQTPAPTDTEAVKTQVEQNKSFEAELKQNVNKVQELKDKLTELLEENPDTPEAPRWKQMLTEIDSKWQELNQLTIDRQQKLEESSNNLTQFQTVEAQLKQWLVEKELMVSVLGPLSIDPNMLNTQRQQVQILLQEFATRKPQYEQLTAAGQGILSRPGEDPSLRGIVKEQLAAVTQKWDSLTGQLSDRCDWIDQAIVKSTQYQSLLRSLSDKLSDLDNKLSSSLAVSTHPDAMNQQLETAQKMKQEIQQEKKQIKVAQALCEDLSALVKEEYLKAELSRQLEGILKSFKDVEQKAENHVQHLQSACASSHQFQQMSRDFQAWLDTKKEEQNKSHPISAKLDVLESLIKDHKDFSKTLTAQSHMYEKTIAEGENLLLKTQGSEKAALQLQLNTIKTNWDTFNKQVKERENKLKESLEKALKYKEQVETLWPWIDKCQNNLEEIKFCLDPAEGENSIAKLKSLQKEMDQHFGMVELLNNTANSLLSVCEIDKEVVTDENKSLIQKVDMVTEQLHSKKFCLENMTQKFKEFQEVSKESKRQLQCAKEQLDIHDSLGSQAYSNKYLTMLQTQQKSLQALKHQVDLAKRLAQDLVVEASDSKGTSDVLLQVETIAQEHSTLSQQVDEKCSFLETKLQGIGHFQNTIREMFSQFAEFDDELDSMAPVGRDAETLQKQKETIKAFLKKLEALMASNDNANKTCKMMLATEETSPDLVGIKRDLEALSKQCNKLLDRAQAREEQVEGTIKRLEEFYSKLKEFSILLQKAEEHEESQGPVGMETETINQQLNMFKVFQKEEIEPLQGKQQDVNWLGQGLIQSAAKSTSTQGLEHDLDDVNARWKTLNKKVAQRAAQLQEALLHCGRFQDALESLLSWMVDTEELVANQKPPSAEFKVVKAQIQEQKLLQRLLDDRKSTVEVIKREGEKIATTAEPADKVKILKQLSLLDSRWEALLNKAETRNRQLEGISVVAQQFHETLEPLNEWLTTIEKRLVNCEPIGTQASKLEEQIAQHKALEDDIINHNKHLHQAVSIGQSLKVLSSREDKDMVQSKLDFSQVWYIEIQEKSHSRSELLQQALCNAKIFGEDEVELMNWLNEVHDKLSKLSVQDYSTEGLWKQQSELRVLQEDILLRKQNVDQALLNGLELLKQTTGDEVLIIQDKLEAIKARYKDITKLSTDVAKTLEQALQLARRLHSTHEELCTWLDKVEVELLSYETQVLKGEEASQAQMRPKELKKEAKNNKALLDSLNEVSSALLELVPWRAREGLEKMVAEDNERYRLVSDTITQKVEEIDAAILRSQQFDQAADAELSWITETEKKLMSLGDIRLEQDQTSAQLQVQKTFTMEILRHKDIIDDLVKSGHKIMTACSEEEKQSMKKKLDKVLKNYDTICQINSERYLQLERAQSLVNQFWETYEELWPWLTETQSIISQLPAPALEYETLRQQQEEHRQLRELIAEHKPHIDKMNKTGPQLLELSPGEGFSIQEKYVAADTLYSQIKEDVKKRAVALDEAISQSTQFHDKIDQILESLERIVERLRQPPSISAEVEKIKEQISENKNVSVDMEKLQPLYETLKQRGEEMIARSGGTDKDISAKAVQDKLDQMVFIWENIHTLVEEREAKLLDVMELAEKFWCDHMSLIVTIKDTQDFIRDLEDPGIDPSVVKQQQEAAETIREEIDGLQEELDIVINLGSELIAACGEPDKPIVKKSIDELNSAWDSLNKAWKDRIDKLEEAMQAAVQYQDGLQAVFDWVDIAGGKLASMSPIGTDLETVKQQIEELKQFKSEAYQQQIEMERLNHQAELLLKKVTEESDKHTVQDPLMELKLIWDSLEERIINRQHKLEGALLALGQFQHALDELLAWLTHTEGLLSEQKPVGGDPKAIEIELAKHHVLQNDVLAHQSTVEAVNKAGNDLIESSAGEEASNLQNKLEVLNQRWQNVLEKTEQRKQQLDGALRQAKGFHGEIEDLQQWLTDTERHLLASKPLGGLPETAKEQLNVHMEVCAAFEAKEETYKSLMQKGQQMLARCPKSAETNIDQDINNLKEKWESVETKLNERKTKLEEALNLAMEFHNSLQDFINWLTQAEQTLNVASRPSLILDTVLFQIDEHKVFANEVNSHREQIIELDKTGTHLKYFSQKQDVVLIKNLLISVQSRWEKVVQRLVERGRSLDDARKRAKQFHEAWSKLMEWLEESEKSLDSELEIANDPDKIKTQLAQHKEFQKSLGAKHSVYDTTNRTGRSLKEKTSLADDNLKLDDMLSELRDKWDTICGKSVERQNKLEEALLFSGQFTDALQALIDWLYRVEPQLAEDQPVHGDIDLVMNLIDNHKAFQKELGKRTSSVQALKRSARELIEGSRDDSSWVKVQMQELSTRWETVCALSISKQTRLEAALRQAEEFHSVVHALLEWLAEAEQTLRFHGVLPDDEDALRTLIDQHKEFMKKLEEKRAELNKATTMGDTVLAICHPDSITTIKHWITIIRARFEEVLAWAKQHQQRLASALAGLIAKQELLEALLAWLQWAETTLTDKDKEVIPQEIEEVKALIAEHQTFMEEMTRKQPDVDKVTKTYKRRAADPSSLQSHIPVLDKGRAGRKRFPASSLYPSGSQTQIETKNPRVNLLVSKWQQVWLLALERRRKLNDALDRLEELREFANFDFDIWRKKYMRWMNHKKSRVMDFFRRIDKDQDGKITRQEFIDGILSSKFPTSRLEMSAVADIFDRDGDGYIDYYEFVAALHPNKDAYKPITDADKIEDEVTRQVAKCKCAKRFQVEQIGDNKYRFFLGNQFGDSQQLRLVRILRSTVMVRVGGGWMALDEFLVKNDPCRAKGRTNMELREKFILADGASQGMAAFRPRGRRSRPSSRGASPNRSTSVSSQAAQAASPQVPATTTPKILHPLTRNYGKPWLTNSKMSTPCKAAECSDFPVPSAEGTPIQGSKLRLPGYLSGKGFHSGEDSGLITTAAARVRTQFADSKKTPSRPGSRAGSKAGSRASSRRGSDASDFDISEIQSVCSDVETVPQTHRPTPRAGSRPSTAKPSKIPTPQRKSPASKLDKSSKR

SEQ ID NO: 4457 - protein, 2649 aa, Homo sapiens
MHSSSYSYRSSDSVFSNTTSTRTSLDSNENLLLVHCGPTLINSCISFGSESFDGHRLEMLQQIANRVQRDSVICEDKLILAGNALQSDSKRLESGVQFQNEAEIAGYILECENLLRQHVIDVQILIDGKYYQADQLVQRVAKLRDEIMALRNECSSVYSKGRILTTEQTKLMISGITQSLNSGFAQTLHPSLTSGLTQSLTPSLTSSSMTSGLSSGMTSRLTPSVTPAYTPGFPSGLVPNFSSGVEPNSLQTLKLMQIRKPLLKSSLLDQNLTEEEINMKFVQDLLNWVDEMQVQLDRTEWGSDLPSVESHLENHKNVHRAIEEFESSLKEAKISEIQMTAPLKLTYAEKLHRLESQYAKLLNTSRNQERHLDTLHNFVSRATNELIWLNEKEEEEVAYDWSERNTNIARKKDYHAELMRELDQKEENIKSVQEIAEQLLLENHPARLTIEAYRAAMQTQWSWILQLCQCVEQHIKENTAYFEFFNDAKEATDYLRNLKDAIQRKYSCDRSSSIHKLEDLVQESMEEKEELLQYKSTIANLMGKAKTIIQLKPRNSDCPLKTSIPIKAICDYRQIEITIYKDDECVLANNSHRAKWKVISPTGNEAMVPSVCFTVPPPNKEAVDLANRIEQQYQNVLTLWHESHINMKSVVSWHYLINEIDRIRASNVASIKTMLPGEHQQVLSNLQSRFEDFLEDSQESQVFSGSDITQLEKEVNVCKQYYQELLKSAEREEQEESVYNLYISEVRNIRLRLENCEDRLIRQIRTPLERDDLHESVFRITEQEKLKKELERLKDDLGTITNKCEEFFSQAAASSSVPTLRSELNVVLQNMNQVYSMSSTYIDKLKTVNLVLKNTQAAEALVKLYETKLCEEEAVIADKNNIENLISTLKQWRSEVDEKRQVFHALEDELQKAKAISDEMFKTYKERDLDFDWHKEKADQLVERWQNVHVQIDNRLRDLEGIGKSLKYYRDTYHPLDDWIQQVETTQRKIQENQPENSKTLATQLNQQKMLVSEIEMKQSKMDECQKYAEQYSATVKDYELQTMTYRAMVDSQQKSPVKRRRMQSSADLIIQEFMDLRTRYTALVTLMTQYIKFAGDSLKRLEEEEIKRCKETSEHGAYSDLLQRQKATVLENSKLTGKISELERMVAELKKQKSRVEEELPKVREAAENELRKQQRNVEDISLQKIRAESEAKQYRRELETIVREKEAAERELERVRQLTIEAEAKRAAVEENLLNFRNQLEENTFTRRTLEDHLKRKDLSLNDLEQQKNKLMEELRRKRDNEEELLKLIKQMEKDLAFQKQVAEKQLKEKQKIELEARRKITEIQYTCRENALPVCPITQATSCRAVTGLQQEHDKQKAEELKQQVDELTAANRKAEQDMRELTYELNALQLEKTSSEEKARLLKDKLDETNNTLRCLKLELERKDQAEKGYSQQLRELGRQLNQTTGKAEEAMQEASDLKKIKRNYQLELESLNHEKGKLQREVDRITRAHAVAEKNIQHLNSQIHSFRDEKELERLQICQRKSDHLKEQFEKSHEQLLQNIKAEKENNDKIQRLNEELEKSNECAEMLKQKVEELTRQNNETKLMMQRIQAESENIVLEKQTIQQRCEALKIQADGFKDQLRSTNEHLHKQTKTEQDFQRKIKCLEEDLAKSQNLVSEFKQKCDQQNIIIQNTKKEVRNLNAELNASKEEKRRGEQKVQLQQAQVQELNNRLKKVQDELHLKTIEEQMTHRKMVLFQEESGKFKQSAEEFRKKMEKLMESKVITENDISGIRLDFVSLQQENSRAQENAKLCETNIKELERQLQQYREQMQQGQHMEANHYQKCQKLEDELIAQKREVENLKQKMDQQIKEHEHQLVLLQCEIQKKSTAKDCTFKPDFEMTVKECQHSGELSSRNTGHLHPTPRSPLLRWTQEPQPLEEKWQHRVVEQIPKEVQFQPPGAPLEKEKSQQCYSEYFSQTSTELQITFDETNPITRLSEIEKIRDQALNNSRPPVRYQDNACEMELVKVLTPLEIAKNKQYDMHTEVTTLKQEKNPVPSAEEWMLEGCRASGGLKKGDFLKKGLEPETFQNFDGDHACSVRDDEFKFQGLRHTVTARQLVEAKLLDMRTIEQLRLGLKTVEEVQKTLNKFLTKATSIAGLYLESTKEKISFASAAERIIIDKMVALAFLEAQAATGFIIDPISGQTYSVEDAVLKGVVDPEFRIRLLEAEKAAVGYSYSSKTLSVFQAMENRMLDRQKGKHILEAQIASGGVIDPVRGIRVPPEIALQQGLLNNAILQFLHEPSSNTRVFPNPNNKQALYYSELLRMCVFDVESQCFLFPFGERNISNLNVKKTHRISVVDTKTGSELTVYEAFQRNLIEKSIYLELSGQQYQWKEAMFFESYGHSSHMLTDTKTGLHFNINEAIEQGTIDKALVKKYQEGLITLTELADSLLSRLVPKKDLHSPVAGYWLTASGERISVLKASRRNLVDRITALRCLEAQVSTGGIIDPLTGKKYRVAEALHRGLVDEGFAQQLRQCELVITGIGHPITNKMMSVVEAVNANIINKEMGIRCLEFQYLTGGLIEPQVHSRLSIEEALQVGIIDVLIATKLKDQKSYVRNIICPQTKRKLTYKEALEKADFDFHTGLKLLEVSEPLMTGISSLYYSS

SEQ ID NO: 4458 - protein, 3060 aa, Homo sapiens
MHSSSYSYRSSDSVFSNTTSTRTSLDSNENLLLVHCGPTLINSCISFGSESFDGHRLEMLQQIANRVQRDSVICEDKLILAGNALQSDSKRLESGVQFQNEAEIAGYILECENLLRQHVIDVQILIDGKYYQADQLVQRVAKLRDEIMALRNECSSVYSKGRILTTEQTKLMISGITQSLNSGFAQTLHPSLTSGLTQSLTPSLTSSSMTSGLSSGMTSRLTPSVTPAYTPGFPSGLVPNFSSGVEPNSLQTLKLMQIRKPLLKSSLLDQNLTEEEINMKFVQDLLNWVDEMQVQLDRTEWGSDLPSVESHLENHKNVHRAIEEFESSLKEAKISEIQMTAPLKLTYAEKLHRLESQYAKLLNTSRNQERHLDTLHNFVSRATNELIWLNEKEEEEVAYDWSERNTNIARKKDYHAELMRELDQKEENIKSVQEIAEQLLLENHPARLTIEAYRAAMQTQWSWILQLCQCVEQHIKENTAYFEFFNDAKEATDYLRNLKDAIQRKYSCDRSSSIHKLEDLVQESMEEKEELLQYKSTIANLMGKAKTIIQLKPRNSDCPLKTSIPIKAICDYRQIEITIYKDDECVLANNSHRAKWKVISPTGNEAMVPSVCFTVPPPNKEAVDLANRIEQQYQNVLTLWHESHINMKSVVSWHYLINEIDRIRASNVASIKTMLPGEHQQVLSNLQSRFEDFLEDSQESQVFSGSDITQLEKEVNVCKQYYQELLKSAEREEQEESVYNLYISEVRNIRLRLENCEDRLIRQIRTPLERDDLHESVFRITEQEKLKKELERLKDDLGTITNKCEEFFSQAAASSSVPTLRSELNVVLQNMNQVYSMSSTYIDKLKTVNLVLKNTQAAEALVKLYETKLCEEEAVIADKNNIENLISTLKQWRSEVDEKRQVFHALEDELQKAKAISDEMFKTYKERDLDFDWHKEKADQLVERWQNVHVQIDNRLRDLEGIGKSLKYYRDTYHPLDDWIQQVETTQRKIQENQPENSKTLATQLNQQKMLVSEIEMKQSKMDECQKYAEQYSATVKDYELQTMTYRAMVDSQQKSPVKRRRMQSSADLIIQEFMDLRTRYTALVTLMTQYIKFAGDSLKRLEEEEKSLEEEKKEHVEKAKELQKWVSNISKTLKDAEKAGKPPFSKQKISSEEISTKKEQLSEALQTIQLFLAKHGDKMTDEERNELEKQVKTLQESYNLLFSESLKQLQESQTSGDVKVEEKLDKVIAGTIDQTTGEVLSVFQAVLRGLIDYDTGIRLLETQLMISGLISPELRKCFDLKDAKSHGLIDEQILCQLKELSKAKEIISAASPTTIPVLDALAQSMITESMAIKVLEILLSTGSLVIPATGEQLTLQKAFQQNLVSSALFSKVLERQNMCKDLIDPCTSEKVSLIDMVQRSTLQENTGMWLLPVRPQEGGRITLKCGRNISILRAAHEGLIDRETMFRLLSAQLLSGGLINSNSGQRMTVEEAVREGVIDRDTASSILTYQVQTGGIIQSNPAKRLTVDEAVQCDLITSSSALLVLEAQRGYVGLIWPHSGEIFPTSSSLQQELITNELAYKILNGRQKIAALYIPESSQVIGLDAAKQLGIIDNNTASILKNITLPDKMPDLGDLEACKNARRWLSFCKFQPSTVHDYRQEEDVFDGEEPVTTQTSEETKKLFLSYLMINSYMDANTGQRLLLYDGDLDEAVGMLLEGCHAEFDGNTAIKECLDVLSSSGVFLNNASGREKDECTATPSSFNKCHCGEPEHEETPENRKCAIDEEFNEMRNTVINSEFSQSGKLASTISIDPKVNSSPSVCVPSLISYLTQTELADISMLRSDSENILTNYENQSRVETNERANECSHSKNIQNFPSDLIENPIMKSKMSKFCGVNETENEDNTNRDSPIFDYSPRLSALLSHDKLMHSQGSFNDTHTPESNGNKCEAPALSFSDKTMLSGQRIGEKFQDQFLGIAAINISLPGEQYGQKSLNMISSNPQVQYHNDKYISNTSGEDEKTHPGFQQMPEDKEDESEIEEYSCAVTPGGDTDNAIVSLTCATPLLDETISASDYETSLLNDQQNNTGTDTDSDDDFYDTPLFEDDDHDSLLLDGDDRDCLHPEDYDTLQEENDETASPADVFYDVSKENENSMVPQGAPVGSLSVKNKAHCLQDFLMDVEKDELDSGEKIHLNPVGSDKVNGQSLETGSERECTNILEGDESDSLTDYDIVGGKESFTASLKFDDSGSWRGRKEEYVTGQEFHSDTDHLDSMQSEESYGDYIYDSNDQDDDDDDGIDEEGGGIRDENGKPRCQNVAEDMDIQLCASILNENSDENENINTMILLDKMHSCSSLEKQQRVNVVQLASPSENNLVTEKSNLPEYTTEIAGKSKENLLNHEMVLKDVLPPIIKDTESEKTFGPASISHDNNNISSTSELGTDLANTKVKLIQGSELPELTDSVKGKDEYFKNMTPKVDSSLDHIICTEPDLIGKPAEESHLSLIASVTDKDPQGNGSDLIKGRDGKSDILIEDETSIQKMYLGEGEVLVEGLVEEENRHLKLLPGKNTRDSFKLINSQFPFPQITNNEELNQKGSLKKATVTLKDEPNNLQIIVSKSPVQFENLEEIFDTSVSKEISDDITSDITSWEGNTHFEESFTDGPEKELDLFTYLKHCAKNIKAKDVAKPNEDVPSHVLITAPPMKEHLQLGVNNTKEKSTSTQKDSPLNDMIQSNDLCSKESISGGGTEISQFTPESIEATLSILSRKHVEDVGKNDFLQSERCANGLGNDNSSNTLNTDYSFLEINNKKERIEQQLPKEQALSPRSQEKEVQIPELSQVFVEDVKDILKSRLKEGHMNPQEVEEPSACADTKILIQNLIKRITTSQLVNEASTVPSDSQMSDSSGVSPMTNSSELKPESRDDPFCIGNLKSELLLNILKQDQHSQKITGVFELMRELTHMEYDLEKRGITSKVLPLQLENIFYKLLADGYSEKIEHVGDFNQKACSTSEMMEEKPHILGDIKSKEGNYYSPNLETVKEIGLESSTVWASTLPRDEKLKDLCNDFPSHLECTSGSKEMASGDSSTEQ

SEQ ID NO: 4459 - protein, 1143 aa, Homo sapiens
MHSSSYSYRSSDSVFSNTTSTRTSLDSNENLLLVHCGPTLINSCISFGSESFDGHRLEMLQQIANRVQRDSVICEDKLILAGNALQSDSKRLESGVQFQNEAEIAGYILECENLLRQHVIDVQILIDGKYYQADQLVQRVAKLRDEIMALRNECSSVYSKGRILTTEQTKLMISGITQSLNSGFAQTLHPSLTSGLTQSLTPSLTSSSMTSGLSSGMTSRLTPSVTPAYTPGFPSGLVPNFSSGVEPNSLQTLKLMQIRKPLLKSSLLDQNLTEEEINMKFVQDLLNWVDEMQVQLDRTEWGSDLPSVESHLENHKNVHRAIEEFESSLKEAKISEIQMTAPLKLTYAEKLHRLESQYAKLLNTSRNQERHLDTLHNFVSRATNELIWLNEKEEEEVAYDWSERNTNIARKKDYHAELMRELDQKEENIKSVQEIAEQLLLENHPARLTIEAYRAAMQTQWSWILQLCQCVEQHIKENTAYFEFFNDAKEATDYLRNLKDAIQRKYSCDRSSSIHKLEDLVQESMEEKEELLQYKSTIANLMGKAKTIIQLKPRNSDCPLKTSIPIKAICDYRQIEITIYKDDECVLANNSHRAKWKVISPTGNEAMVPSVCFTVPPPNKEAVDLANRIEQQYQNVLTLWHESHINMKSVVSWHYLINEIDRIRASNVASIKTMLPGEHQQVLSNLQSRFEDFLEDSQESQVFSGSDITQLEKEVNVCKQYYQELLKSAEREEQEESVYNLYISEVRNIRLRLENCEDRLIRQIRTPLERDDLHESVFRITEQEKLKKELERLKDDLGTITNKCEEFFSQAAASSSVPTLRSELNVVLQNMNQVYSMSSTYIDKLKTVNLVLKNTQAAEALVKLYETKLCEEEAVIADKNNIENLISTLKQWRSEVDEKRQVFHALEDELQKAKAISDEMFKTYKERDLDFDWHKEKADQLVERWQNVHVQIDNRLRDLEGIGKSLKYYRDTYHPLDDWIQQVETTQRKIQENQPENSKTLATQLNQQKMLVSEIEMKQSKMDECQKYAEQYSATVKDYELQTMTYRAMVDSQQKSPVKRRRMQSSADLIIQEFMDLRTRYTALVTLMTQYIKFAGDSLKRLEEEEVIINSEHPVNIKELEMSSNYSVVWESKTCFMINLCGR

SEQ ID NO: 4460 - protein, 689 aa, Homo sapiens
MIAAAFLVLLRPYSIQCALFLLLLLLGTIATIVFFCCWHRKLQKGRHPMKSVFSGRSRSRDAVLRSHHFRSEGFRASPRHLRRRVAAAAAARLEEVKPVVEVHHQSEQETSVRKRRIKKSSRVQPEFYHSVQGASIRRPSSGNASYRCSMSSSADFSDEDDFSQKSGSASPAPGDTLPWNLPKHERSKRKIQGGSVLDPAERAVLRIADERDKVQKKTFTKWINQHLMKVRKHVNDLYEDLRDGHNLISLLEVLSGDTLPREKGRMRFHRLQNVQIALDYLKRRQVKLVNIRNDDITDGNPKLTLGLIWTIILHFQISDIHVTGESEDMSAKERLLLWTQQATEGYAGIRCENFTTCWRDGKLFNAIIHKYRPDLIDMNTVAVQSNLANLEHAFYVAEKIGVIRLLDPEDVDVSSPDEKSVITYVSSLYDAFPKVPEGGEGIGANDVEVKWIEYQNMVNYLIQWIRHHVTTMSERTFPNNPVELKALYNQYLQFKETEIPPKETEKSKIKRLYKLLEIWIEFGRIKLLQGYHPNDIEKEWGKLIIAMLEREKALRPEVERLEMLQQIANRVQRDSVICEDKLILAGNALQSDSKRLESGVQFQNEAEIAGYILECENLLRQHVIDVQILIDGKYYQADQLVQRVAKLRDEIMALRNECSSVYSKGRILTTEQTKLMISGITQSLNSGFA

SEQ ID NO: 4461 - protein, 133 aa, Homo sapiens
MKVRKHVNDLYEDLRDGHNLISLLEVLSGDTLPREKGRMRFHRLQNVQIALDYLKRRQVKLVNIRNDDITDGNPKLTLGLIWTIILHFQISDIHVTGESEDMSAKERLLLWTQQATEGYAGIRCENFTTCWRD

SEQ ID NO: 4462 - protein, 154 aa, Homo sapiens
MMGQLMKNDQDWNAKLVGLMCCMDERDKVQKKTFTKWINQHLMKVRKHVNDLYEDLRDGHNLISLLEVLSGDTLPREKGRMRFHRLQNVQIALDYLKRRQVKLVNIRNDDITDGNPKLTLGLIWTIILHFQISDIHVTGESEDMSAKERLLLWT

SEQ ID NO: 4463 - protein, 5537 aa, Homo sapiens
MSSGNASYRCSMSSSADFSDEDDFSQKSGSASPAPGDTLPWNLPKHERSKRKIQGGSVLDPAERAVLRIADERDKVQKKTFTKWINQHLMKVRKHVNDLYEDLRDGHNLISLLEVLSGDTLPREKGRMRFHRLQNVQIALDYLKRRQVKLVNIRNDDITDGNPKLTLGLIWTIILHFQISDIHVTGESEDMSAKERLLLWTQQATEGYAGIRCENFTTCWRDGKLFNAIIHKYRPDLIDMNTVAVQSNLANLEHAFYVAEKIGVIRLLDPEDVDVSSPDEKSVITYVSSLYDAFPKVPEGGEGIGANDVEVKWIEYQNMVNYLIQWIRHHVTTMSERTFPNNPVELKALYNQYLQFKETEIPPKETEKSKIKRLYKLLEIWIEFGRIKLLQGYHPNDIEKEWGKLIIAMLEREKALRPEVERLEMLQQIANRVQRDSVICEDKLILAGNALQSDSKRLESGVQFQNEAEIAGYILECENLLRQHVIDVQILIDGKYYQADQLVQRVAKLRDEIMALRNECSSVYSKGRILTTEQTKLMISGITQSLNSGFAQTLHPSLTSGLTQSLTPSLTSSSMTSGLSSGMTSRLTPSVTPAYTPGFPSGLVPNFSSGVEPNSLQTLKLMQIRKPLLKSSLLDQNLTEEEINMKFVQDLLNWVDEMQVQLDRTEWGSDLPSVESHLENHKNVHRAIEEFESSLKEAKISEIQMTAPLKLTYAEKLHRLESQYAKLLNTSRNQERHLDTLHNFVSRATNELIWLNEKEEEEVAYDWSERNTNIARKKDYHAELMRELDQKEENIKSVQEIAEQLLLENHPARLTIEAYRAAMQTQWSWILQLCQCVEQHIKENTAYFEFFNDAKEATDYLRNLKDAIQRKYSCDRSSSIHKLEDLVQESMEEKEELLQYKSTIANLMGKAKTIIQLKPRNSDCPLKTSIPIKAICDYRQIEITIYKDDECVLANNSHRAKWKVISPTGNEAMVPSVCFTVPPPNKEAVDLANRIEQQYQNVLTLWHESHINMKSVVSWHYLINEIDRIRASNVASIKTMLPGEHQQVLSNLQSRFEDFLEDSQESQVFSGSDITQLEKEVNVCKQYYQELLKSAEREEQEESVYNLYISEVRNIRLRLENCEDRLIRQIRTPLERDDLHESVFRITEQEKLKKELERLKDDLGTITNKCEEFFSQAAASSSVPTLRSELNVVLQNMNQVYSMSSTYIDKLKTVNLVLKNTQAAEALVKLYETKLCEEEAVIADKNNIENLISTLKQWRSEVDEKRQVFHALEDELQKAKAISDEMFKTYKERDLDFDWHKEKADQLVERWQNVHVQIDNRLRDLEGIGKSLKYYRDTYHPLDDWIQQVETTQRKIQENQPENSKTLATQLNQQKMLVSEIEMKQSKMDECQKYAEQYSATVKDYELQTMTYRAMVDSQQKSPVKRRRMQSSADLIIQEFMDLRTRYTALVTLMTQYIKFAGDSLKRLEEEEKSLEEEKKEHVEKAKELQKWVSNISKTLKDAEKAGKPPFSKQKISSEEISTKKEQLSEALQTIQLFLAKHGDKMTDEERNELEKQVKTLQESYNLLFSESLKQLQESQTSGDVKVEEKIVAERQQEYKEKLQGICDLLTQTENRLIGHQEAFMIGDGTVELKKYQSKQEELQKDMQGSAQALAEVVKNTENFLKENGEKLSQEDKALIEQKLNEAKIKCEQLNLKAEQSKKELDKVVTTAIKEETEKVAAVKQLEESKTKIENLLDWLSNVDKDSERAGTKHKQVIEQNGTHFQEGDGKSAIGEEDEVNGNLLETDVDGQVGTTQENLNQQYQKVKAQHEKIISQHQAVIIATQSAQVLLEKQGQYLSPEEKEKLQKNMKELKVHYETALAESEKKMKLTHSLQEELEKFDADYTEFEHWLQQSEQELENLEAGADDINGLMTKLKRQKSFSEDVISHKGDLRYITISGNRVLEAAKSCSKRDGGKVDTSATHREVQRKLDHATDRFRSLYSKCNVLGNNLKDLVDKYQHYEDASCGLLAGLQACEATASKHLSEPIAVDPKNLQRQLEETKALQGQISSQQVAVEKLKKTAEVLLDARGSLLPAKNDIQKTLDDIVGRYEDLSKSVNERNEKLQITLTRSLSVQDGLDEMLDWMGNVESSLKEQGQVPLNSTALQDIISKNIMLEQDIAGRQSSINAMNEKVKKFMETTDPSTASSLQAKMKDLSARFSEASHKHKETLAKMEELKTKVELFENLSEKLQTFLETKTQALTEVDVPGKDVTELSQYMQESTSEFLEHKKHLEVLHSLLKEISSHGLPSDKALVLEKTNNLSKKFKEMEDTIKEKKEAVTSCQEQLDAFQVLVKSLKSWIKETTKKVPIVQPSFGAEDLGKSLEDTKKLQEKWSLKTPEIQKVNNSGISLCNLISAVTTPAKAIAAVKSGGAVLNGEGTATNTEEFWANKGLTSIKKDMTDISHGYEDLGLLLKDKIAELNTKLSKLQKAQEESSAMMQWLQKMNKTATKWQQTPAPTDTEAVKTQVEQNKSFEAELKQNVNKVQELKDKLTELLEENPDTPEAPRWKQMLTEIDSKWQELNQLTIDRQQKLEESSNNLTQFQTVEAQLKQWLVEKELMVSVLGPLSIDPNMLNTQRQQVQILLQEFATRKPQYEQLTAAGQGILSRPGEDPSLRGIVKEQLAAVTQKWDSLTGQLSDRCDWIDQAIVKSTQYQSLLRSLSDKLSDLDNKLSSSLAVSTHPDAMNQQLETAQKMKQEIQQEKKQIKVAQALCEDLSALVKEEYLKAELSRQLEGILKSFKDVEQKAENHVQHLQSACASSHQFQQMSRDFQAWLDTKKEEQNKSHPISAKLDVLESLIKDHKDFSKTLTAQSHMYEKTIAEGENLLLKTQGSEKAALQLQLNTIKTNWDTFNKQVKERENKLKESLEKALKYKEQVETLWPWIDKCQNNLEEIKFCLDPAEGENSIAKLKSLQKEMDQHFGMVELLNNTANSLLSVCEIDKEVVTDENKSLIQKVDMVTEQLHSKKFCLENMTQKFKEFQEVSKESKRQLQCAKEQLDIHDSLGSQAYSNKYLTMLQTQQKSLQALKHQVDLAKRLAQDLVVEASDSKGTSDVLLQVETIAQEHSTLSQQVDEKCSFLETKLQGIGHFQNTIREMFSQFAEFDDELDSMAPVGRDAETLQKQKETIKAFLKKLEALMASNDNANKTCKMMLATEETSPDLVGIKRDLEALSKQCNKLLDRAQAREEQVEGTIKRLEEFYSKLKEFSILLQKAEEHEESQGPVGMETETINQQLNMFKVFQKEEIEPLQGKQQDVNWLGQGLIQSAAKSTSTQGLEHDLDDVNARWKTLNKKVAQRAAQLQEALLHCGRFQDALESLLSWMVDTEELVANQKPPSAEFKVVKAQIQEQKLLQRLLDDRKSTVEVIKREGEKIATTAEPADKVKILKQLSLLDSRWEALLNKAETRNRQLEGISVVAQQFHETLEPLNEWLTTIEKRLVNCEPIGTQASKLEEQIAQHKALEDDIINHNKHLHQAVSIGQSLKVLSSREDKDMVQSKLDFSQVWYIEIQEKSHSRSELLQQALCNAKIFGEDEVELMNWLNEVHDKLSKLSVQDYSTEGLWKQQSELRVLQEDILLRKQNVDQALLNGLELLKQTTGDEVLIIQDKLEAIKARYKDITKLSTDVAKTLEQALQLARRLHSTHEELCTWLDKVEVELLSYETQVLKGEEASQAQMRPKELKKEAKNNKALLDSLNEVSSALLELVPWRAREGLEKMVAEDNERYRLVSDTITQKVEEIDAAILRSQQFDQAADAELSWITETEKKLMSLGDIRLEQDQTSAQLQVQKTFTMEILRHKDIIDDLVKSGHKIMTACSEEEKQSMKKKLDKVLKNYDTICQINSERYLQLERAQSLVNQFWETYEELWPWLTETQSIISQLPAPALEYETLRQQQEEHRQLRELIAEHKPHIDKMNKTGPQLLELSPGEGFSIQEKYVAADTLYSQIKEDVKKRAVALDEAISQSTQFHDKIDQILESLERIVERLRQPPSISAEVEKIKEQISENKNVSVDMEKLQPLYETLKQRGEEMIARSGGTDKDISAKAVQDKLDQMVFIWENIHTLVEEREAKLLDVMELAEKFWCDHMSLIVTIKDTQDFIRDLEDPGIDPSVVKQQQEAAETIREEIDGLQEELDIVINLGSELIAACGEPDKPIVKKSIDELNSAWDSLNKAWKDRIDKLEEAMQAAVQYQDGLQAVFDWVDIAGGKLASMSPIGTDLETVKQQIEELKQFKSEAYQQQIEMERLNHQAELLLKKVTEESDKHTVQDPLMELKLIWDSLEERIINRQHKLEGALLALGQFQHALDELLAWLTHTEGLLSEQKPVGGDPKAIEIELAKHHVLQNDVLAHQSTVEAVNKAGNDLIESSAGEEASNLQNKLEVLNQRWQNVLEKTEQRKQQLDGALRQAKGFHGEIEDLQQWLTDTERHLLASKPLGGLPETAKEQLNVHMEVCAAFEAKEETYKSLMQKGQQMLARCPKSAETNIDQDINNLKEKWESVETKLNERKTKLEEALNLAMEFHNSLQDFINWLTQAEQTLNVASRPSLILDTVLFQIDEHKVFANEVNSHREQIIELDKTGTHLKYFSQKQDVVLIKNLLISVQSRWEKVVQRLVERGRSLDDARKRAKQFHEAWSKLMEWLEESEKSLDSELEIANDPDKIKTQLAQHKEFQKSLGAKHSVYDTTNRTGRSLKEKTSLADDNLKLDDMLSELRDKWDTICGKSVERQNKLEEALLFSGQFTDALQALIDWLYRVEPQLAEDQPVHGDIDLVMNLIDNHKAFQKELGKRTSSVQALKRSARELIEGSRDDSSWVKVQMQELSTRWETVCALSISKQTRLEAALRQAEEFHSVVHALLEWLAEAEQTLRFHGVLPDDEDALRTLIDQHKEFMKKLEEKRAELNKATTMGDTVLAICHPDSITTIKHWITIIRARFEEVLAWAKQHQQRLASALAGLIAKQELLEALLAWLQWAETTLTDKDKEVIPQEIEEVKALIAEHQTFMEEMTRKQPDVDKVTKTYKRRAADPSSLQSHIPVLDKGRAGRKRFPASSLYPSGSQTQIETKNPRVNLLVSKWQQVWLLALERRRKLNDALDRLEELREFANFDFDIWRKKYMRWMNHKKSRVMDFFRRIDKDQDGKITRQEFIDGILSSKFPTSRLEMSAVADIFDRDGDGYIDYYEFVAALHPNKDAYKPITDADKIEDEVTRQVAKCKCAKRFQVEQIGDNKYRFFLGNQFGDSQQLRLVRILRSTVMVRVGGGWMALDEFLVKNDPCRAKGRTNMELREKFILADGASQGMAAFRPRGRRSRPSSRGASPNRSTSVSSQAAQAASPQVPATTTPKILHPLTRNYGKPWLTNSKMSTPCKAAECSDFPVPSAEGTPIQGSKLRLPGYLSGKGFHSGEDSGLITTAAARVRTQFADSKKTPSRPGSRAGSKAGSRASSRRGSDASDFDISEIQSVCSDVETVPQTHRPTPRAGSRPSTAKPSKIPTPQRKSPASKLDKSSKR

SEQ ID NO: 4464 - protein, 1479 aa, Homo sapiens
MSSGNASYRCSMSSSADFSDEDDFSQKSGSASPAPGDTLPWNLPKHERSKRKIQGGSVLDPAERAVLRIADERDKVQKKTFTKWINQHLMKVRKHVNDLYEDLRDGHNLISLLEVLSGDTLPREKGRMRFHRLQNVQIALDYLKRRQVKLVNIRNDDITDGNPKLTLGLIWTIILHFQISDIHVTGESEDMSAKERLLLWTQQATEGYAGIRCENFTTCWRDGKLFNAIIHKYRPDLIDMNTVAVQSNLANLEHAFYVAEKIGVIRLLDPEDVDVSSPDEKSVITYVSSLYDAFPKVPEGGEGIGANDVEVKWIEYQNMVNYLIQWIRHHVTTMSERTFPNNPVELKALYNQYLQFKETEIPPKETEKSKIKRLYKLLEIWIEFGRIKLLQGYHPNDIEKEWGKLIIAMLEREKALRPEVERLEMLQQIANRVQRDSVICEDKLILAGNALQSDSKRLESGVQFQNEAEIAGYILECENLLRQHVIDVQILIDGKYYQADQLVQRVAKLRDEIMALRNECSSVYSKGRILTTEQTKLMISGITQSLNSGFAQTLHPSLTSGLTQSLTPSLTSSSMTSGLSSGMTSRLTPSVTPAYTPGFPSGLVPNFSSGVEPNSLQTLKLMQIRKPLLKSSLLDQNLTEEEINMKFVQDLLNWVDEMQVQLDRTEWGSDLPSVESHLENHKNVHRAIEEFESSLKEAKISEIQMTAPLKLTYAEKLHRLESQYAKLLNTSRNQERHLDTLHNFVSRATNELIWLNEKEEEEVAYDWSERNTNIARKKDYHAELMRELDQKEENIKSVQEIAEQLLLENHPARLTIEAYRAAMQTQWSWILQLCQCVEQHIKENTAYFEFFNDAKEATDYLRNLKDAIQRKYSCDRSSSIHKLEDLVQESMEEKEELLQYKSTIANLMGKAKTIIQLKPRNSDCPLKTSIPIKAICDYRQIEITIYKDDECVLANNSHRAKWKVISPTGNEAMVPSVCFTVPPPNKEAVDLANRIEQQYQNVLTLWHESHINMKSVVSWHYLINEIDRIRASNVASIKTMLPGEHQQVLSNLQSRFEDFLEDSQESQVFSGSDITQLEKEVNVCKQYYQELLKSAEREEQEESVYNLYISEVRNIRLRLENCEDRLIRQIRTPLERDDLHESVFRITEQEKLKKELERLKDDLGTITNKCEEFFSQAAASSSVPTLRSELNVVLQNMNQVYSMSSTYIDKLKTVNLVLKNTQAAEALVKLYETKLCEEEAVIADKNNIENLISTLKQWRSEVDEKRQVFHALEDELQKAKAISDEMFKTYKERDLDFDWHKEKADQLVERWQNVHVQIDNRLRDLEGIGKSLKYYRDTYHPLDDWIQQVETTQRKIQENQPENSKTLATQLNQQKMLVSEIEMKQSKMDECQKYAEQYSATVKDYELQTMTYRAMVDSQQKSPVKRRRMQSSADLIIQEFMDLRTRYTALVTLMTQYIKFAGDSLKRLEEEEKSLEEEK

SEQ ID NO: 4465 - protein, 7 aa, Homo sapiens
MVDTEEL

SEQ ID NO: 4466 - protein, 177 aa, Homo sapiens
  SITE 1: note = misc_feature - Xaa can be any naturally occurring amino acid
XQLNQQKMLVSEIEMKQSKMDECQKYAEQYSATVKDYELQTMTYRAMVDSQQKSPVKRRRMQSSADLIIQEFMDLRTRYTALVTLMTQYIKFAGDSLKRLEEEEIAKNKQYDMHTEVTTLKQEKNPVPSAEEWMLEGCRASGGLKKGDFLKKGLEPETFQNFDGDHACSVRDDEFKF

SEQ ID NO: 4467 - protein, 259 aa, Homo sapiens
  SITE 1: note = misc_feature - Xaa can be any naturally occurring amino acid
XTRQVAKCKCAKRFQVEQIGDNKYRFGDSQQLRLVRILRSTVMVRVGGGWMALDEFLVKNDPCRAKGRTNMELREKFILADGASQGMAAFRPRGRRSRPSSRGASPNRSTSVSSQAAQAASPQVPATTTPKGTPIQGSKLRLPGYLSGKGFHSGEDSGLITTAAARVRTQFADSKKTPSRPGSRAGSKAGSRASSRRGSDASDFDISEIQSVCSDVETVPQTHRPTPRAGSRPSTAKPSKIPTPQRKSPASKLDKSSKR

SEQ ID NO: 4468 - protein, 448 aa, Homo sapiens
  SITE 1: note = misc_feature - Xaa can be any naturally occurring amino acid
XVVTTAIKEETEKVAAVKQLEESKTKIENLLDWLSNVDKDSERAGTKHKQVIEQNGTHFQEGDGKSAIGEEDEVNGNLLETDVDGQVGTTQENLNQQYQKVKAQHEKIISQHQAVIIATQSAQVLLEKQGQYLSPEEKEKLQKNMKELKVHYETALAESEKKMKLTHSLQEELEKFDADYTEFEHWLQQSEQELENLEAGADDINGLMTKLKRQKSFSEDVISHKGDLRYITISGNRVLEAAKSCSKRDGGKVDTSATHREVQRKLDHATDRFRSLYSKCNVLGNNLKDLVDKYQHYEDASCGLLAGLQACEATASKHLSEPIAVDPKNLQRQLEETKALQGQISSQQVAVEKLKKTAEVLLDARGSLLPAKNDIQKTLDDIVGRYEDLSKSVNERNEKLQITLTRSLSVQDGLDEMLDWMGNVESSLKEQDVGTGYCRSSEQYKCHE

SEQ ID NO: 4469 - protein, 43 aa, Homo sapiens
MGFCLALAWTLLVGAWTPLGAQNPISWEVQRFDGWYNNLMEHR

SEQ ID NO: 4470 - protein, 1551 aa, Homo sapiens
MGFCLALAWTLLVGAWTPLGAQNPISWEVQRFDGWYNNLMEHRWGSKGSRLQRLVPASYADGVYQPLGEPHLPNPRDLSNTISRGPAGLASLRNRTVLGVFFGYHVLSDLVSVETPGCPAEFLNIRIPPGDPMFDPDQRGDVVLPFQRSRWDPETGRSPSNPRDPANQVTGWLDGSAIYGSSHSWSDALRSFSRGQLASGPDPAFPRDSQNPLLMWAAPDPATGQNGPRGLYAFGAERGNREPFLQALGLLWFRYHNLWAQRLARQHPDWEDEELFQHARKRVIATYQNIAVYEWLPSFLQKTLPEYTGYRPFLDPSISSEFVAASEQFLSTMVPPGVYMRNASCHFQGVINRNSSVSRALRVCNSYWSREHPSLQSAEDVDALLLGMASQIAEREDHVLVEDVRDFWPGPLKFSRTDHLASCLQRGRDLGLPSYTKARAALGLSPITRWQDINPALSRSNDTVLEATAALYNQDLSWLELLPGGLLESHRDPGPLFSTIVLEQFVRLRDGDRYWFENTRNGLFSKKEIEEIRNTTLQDVLVAVINIDPSALQPNVFVWHKGDPCPQPRQLSTEGLPACAPSVVRDYFEGSGFGFGVTIGTLCCFPLVSLLSAWIVARLRMRNFKRLQGQDRQSIVSEKLVGGMEALEWQGHKEPCRPVLVYLQPGQIRVVDGRLTVLRTIQLQPPQKVNFVLSSNRGRRTLLLKIPKEYDLVLLFNLEEERQALVENLRGALKESGLSIQEWELREQELMRAAVTREQRRHLLETFFRHLFSQVLDINQADAGTLPLDSSQKVREALTCELSRAEFAESLGLKPQDMFVESMFSLADKDGNGYLSFREFLDILVVFMKGSPEEKSRLMFRMYDFDGNGLISKDEFIRMLRSFIEISNNCLSKAQLAEVVESMFRESGFQDKEELTWEDFHFMLRDHNSELRFTQLCVKGVEVPEVIKDLCRRASYISQDMICPSPRVSARCSRSDIETELTPQRLQCPMDTDPPQEIRRRFGKKVTSFQPLLFTEAHREKFQRSCLHQTVQQFKRFIENYRRHIGCVAVFYAIAGGLFLERAYYYAFAAHHTGITDTTRVGIILSRGTAASISFMFSYILLTMCRNLITFLRETFLNRYVPFDAAVDFHRLIASTAIVLTVLHSVGHVVNVYLFSISPLSVLSCLFPGLFHDDGSELPQKYYWWFFQTVPGLTGVVLLLILAIMYVFASHHFRRRSFRGFWLTHHLYILLYVLLIIHGSFALIQLPRFHIFFLVPAIIYGGDKLVSLSRKKVEISVVKAELLPSGVTHLRFQRPQGFEYKSGQWVRIACLALGTTEYHPFTLTSAPHEDTLSLHIRAAGPWTTRLREIYSAPTGDRCARYPKLYLDGPFGEGHQEWHKFEVSVLVGGGIGVTPFASILKDLVFKSSVSCQVFCKKIYFIWVTRTQRQFEWLADIIREVEENDHQDLVSVHIYITQLAEKFDLRTTMLYICERHFQKVLNRSLFTGLRSITHFGRPPFEPFFNSLQEVHPQVRKIGVFSCGPPGMTKNVEKACQLINRQDRTHFSHHYENF

SEQ ID NO: 4471 - protein, 1551 aa, Homo sapiens; identical to SEQ ID NO: 4470

SEQ ID NO: 4472 - protein, 444 aa, Homo sapiens
MGFCLALAWTLLVGAWTPLGAQNPISWEVQRFDGWYNNLMEHRWGSKGSRLQRLVPASYADGVYQPLGEPHLPNPRDLSNTISRGPAGLASLRNRTVLGVFFGYHVLSDLVSVETPGCPAEFLNIRIPPGDPMFDPDQRGDVVLPFQRSRWDPETGRSPSNPRDPANQVTGWLDGSAIYGSSHSWSDALRSFSRGQLASGPDPAFPRDSQNPLLMWAAPDPATGQNGPRGLYAFGAERGNREPFLQALGLLWFRYHNLWAQRLARQHPDWEDEELFQHARKRVIATYQNIAVYEWLPSFLQKTLPEYTGYRPFLDPSISSEFVAASEQFLSTMVPPGVYMRNASCHFQGVINRNSSVSRALRVCNSYWSREHPSLQSAEDVDALLLGMASQIAEREDHVLVEDVRGTGGHSCPVQPGLILARAAPWGTPGEPPGPWTSVQHHRP

SEQ ID NO: 4473 - protein, 1197 aa, Homo sapiens
MWMHCCWAWPPRSQSERTMCWLKMCGVSLRLSLQVVNSWPLGRGSAGLPEPDFWPGPLKFSRTDHLASCLQRGRDLGLPSYTKARAALGLSPITRWQDINPALSRSNDTVLEATAALYNQDLSWLELLPGGLLESHRDPGPLFSTIVLEQFVRLRDGDRYWFENTRNGLFSKKEIEEIRNTTLQDVLVAVINIDPSALQPNVFVWHKGDPCPQPRQLSTEGLPACAPSVVRDYFEGSGFGFGVTIGTLCCFPLVSLLSAWIVARLRMRNFKRLQGQDRQSIVSEKLVGGMEALEWQGHKEPCRPVLVYLQPGQIRVVDGRLTVLRTIQLQPPQKVNFVLSSNRGRRTLLLKIPKEYDLVLLFNLEEERQALVENLRGALKESGLSIQEWELREQELMRAAVTREQRRHLLETFFRHLFSQVLDINQADAGTLPLDSSQKVREALTCELSRAEFAESLGLKPQDMFVESMFSLADKDGNGYLSFREFLDILVVFMKGSPEEKSRLMFRMYDFDGNGLISKDEFIRMLRSFIEISNNCLSKAQLAEVVESMFRESGFQDKEELTWEDFHFMLRDHNSELRFTQLCVKGVEVPEVIKDLCRRASYISQDMICPSPRVSARCSRSDIETELTPQRLQCPMDTDPPQEIRRRFGKKVTSFQPLLFTEAHREKFQRSCLHQTVQQFKRFIENYRRHIGCVAVFYAIAGGLFLERAYYYAFAAHHTGITDTTRVGIILSRGTAASISFMFSYILLTMCRNLITFLRETFLNRYVPFDAAVDFHRLIASTAIVLTVLHSVGHVVNVYLFSISPLSVLSCLFPGLFHDDGSELPQKYYWWFFQTVPGLTGVVLLLILAIMYVFASHHFRRRSFRGFWLTHHLYILLYVLLIIHGSFALIQLPRFHIFFLVPAIIYGGDKLVSLSRKKVEISVVKAELLPSGVTHLRFQRPQGFEYKSGQWVRIACLALGTTEYHPFTLTSAPHEDTLSLHIRAAGPWTTRLREIYSAPTGDRCARYPKLYLDGPFGEGHQEWHKFEVSVLVGGGIGVTPFASILKDLVFKSSVSCQVFCKKIYFIWVTRTQRQFEWLADIIREVEENDHQDLVSVHIYITQLAEKFDLRTTMLYICERHFQKVLNRSLFTGLRSITHFGRPPFEPFFNSLQEVHPQVRKIGVFSCGPPGMTKNVEKACQLINRQDRTHFSHHYENF

SEQ ID NO: 4474 - protein, 122 aa, Homo sapiens
MARSLGVLVALPFPLPVGFNAEEAHNIVKECVDGVLGGEDYNHNNINQWTASIVEQSLTHLVKLGKAYKYIVTCAVVQKSAYGFHTASSCFWDTTSDGTCTVRWENRTMNCIVNVFAIAIVL

SEQ ID NO: 4475 - protein, 152 aa, Homo sapiens
MEEYHRHCDEVGFNAEEAHNIVKECVDGVLGGEDYNHNNINQWTASIVEQSLTHLVKLGKAYKYIVTCAVVQKSAYGFHTASSCFWDTTSDGTCTVRWENRTMNCGVLLCRPGWSAVMQFRLTATSASQVQVILLPQPPEYLELQAHAITPG

SEQ ID NO: 4476 - protein, 116 aa, Homo sapiens
MEEYHRHCDEVGFNAEEAHNIVKECVDGVLGGEDYNHNNINQWTASIVEQSLTHLVKLGKAYKYIVTCAVVQKSAYGFHTASSCFWDTTSDGTCTVRWENRTMNCIVNVFAIAIVL

SEQ ID NO: 4477 - protein, 346 aa, Homo sapiens
MAAAEPASSGQQAPAGQGQGQRPPPQPPQAQAPQPPPPPQLGGAGGGSSRHEKSLGLLTTKFVSLLQEAKDGVLDLKAAADTLAVRQKRRIYDITNVLEGIDLIEKKSKNSIQWKGVGAGCNTKEVIDRLRYLKAEIEDLELKERELDQQKLWLQQSIKNVMDDSINNRFSYVTHEDICNCFNGDTLLAIQAPSGTQLEVPIPEMGQNGQKKYQINLKSHSGPIHVLLINKESSSSKPVVFPVPPPDDLTQPSSQSLTPVTPQKSSMATQNLPEQHVSERSQALQQTSATDISSAGSISGDIIDELMSSDVFPLLRLSPTPADDYNFNLDDNEGVCDLFDVQILNY

SEQ ID NO: 4478 - protein, 345 aa, Homo sapiens
MAAAEPASSGQQAPAGQGQGQRPPPQPPQAQAPQPPPPPQLGGAGGGSSRHEKSLGLLTTKFVSLLQEAKDGVLDLKAAADTLAVRQKRRIYDITNVLEGIDLIEKKSKNSIQWKGVGAGCNTKEVIDRLRYLKAEIEDLELKERELDQQKLWLQQSIKNVMDDSINNRFSYVTHEDICNCFNGDTLLAIQAPSGTQLEVPIPEMGQNGQKKYQINLKSHSGPIHVLLINKESSSSKPVVFPVPPPDDLTQPSSQSLTPVTPQKSSMATQNLPEQHVSERSQALQQTSATDISSGSISGDIIDELMSSDVFPLLRLSPTPADDYNFNLDDNEGVCDLFDVQILNY

SEQ ID NO: 4479 - protein, 185 aa, Homo sapiens
MDDSINNRFSYVTHEDICNCFNGDTLLAIQAPSGTQLEVPIPEMGQNGQKKYQINLKSHSGPIHVLLINKESSSSKPVVFPVPPPDDLTQPSSQSLTPVTPQKSSMATQNLPEQHVSERSQALQQTSATDISSAGSISGDIIDELMSSDVFPLLRLSPTPADDYNFNLDDNEGVCDLFDVQILNY

SEQ ID NO: 4480 - protein, 173 aa, Homo sapiens
MKTSVIALMVSDTLLAIQAPSGTQLEVPIPEMGQNGQKKYQINLKSHSGPIHVLLINKESSSSKPVVFPVPPPDDLTQPSSQSLTPVTPQKSSMATQNLPEQHVSERSQALQQTSATDISSAGSISGDIIDELMSSDVFPLLRLSPTPADDYNFNLDDNEGVCDLFDVQILNY

SEQ ID NO: 4481 - protein, 182 aa, Homo sapiens
SYDSTFSYVTHEDICNCFNGDTLLAIQAPSGTQLEVPIPEMGQNGQKKYQINLKSHSGPIHVLLINKESSSSKPVVFPVPPPDDLTQPSSQSLTPVTPQKSSMATQNLPEQHVSERSQALQQTSATDISSAGSISGDIIDELMSSDVFPLLRLSPTPADDYNFNLDDNEGVCDLFDVQILNY

SEQ ID NO: 4482 - protein, 249 aa, Homo sapiens
  SITE 1: note = misc_feature - Xaa can be any naturally occurring amino acid
XLLQEAKDGVLDLKAAADTLAVRQKRRIYDITNVLEGIDLIEKKSKNSIQWKGVGAGCNTKEVIDRLRYLKAEIEDLELKERELDQQKLWLQQSIKNVMDDSINNRFSYVTHEDICNCFNGDTLLAIQAPSGTQLEVPIPEMGQNGQKKYQINLKSHSGPIHVLLINKESSSSKPVVFPVPPPDDLTQPSSQSLTPVTPQKSSMATQNLPEQHVSERSQALQQTSATDISSAGSISGDIIDELMSSDGK

SEQ ID NO: 4483 - protein, 130 aa, Homo sapiens
  SITE 1: note = misc_feature - Xaa can be any naturally occurring amino acid
XNKESSSSKPVVFPVPPPDDLTQPSSQSLTPVTPQKSSMATQNLPEQHVSERSQALQQTSATDISSAGSISGDIIDELMSSDGGKLKDTTGHQKQVGQGLITCLIFLLPLNCLYFCMSFYPNRRSLPLVK

SEQ ID NO: 4484 - protein, 78 aa, Homo sapiens
MAITQFRLFKFCTCLATVFSFLKRLICRSGRGRKLSGDQITLPTTVDYSSVPKQTDVEEWTSWDEDAPTSVKIEGGNG

SEQ ID NO: 4485 - protein, 197 aa, Homo sapiens
MAITQFRLFKFCTCLATVFSFLKRLICRSGRGRKLSGDQITLPTTVDYSSVPKQTDVEEWTSWDEDAPTSVKIEGGNGNVATQQNSLEQLEPDYFKDMTPTIRKTQKIVIKKREPLNFGIPDGSTGFSSRLAATQDLPFIHQSSELGDLDTWQENTNAWEEEEDAAWQAEEVLRQQKLADREKRAAEQQRKKMEKEA

SEQ ID NO: 4486 - protein, 213 aa, Homo sapiens
MAITQFRLFKFCTCLATVFSFLKRLICRSGRGRKLSGDQITLPTTVDYSSVPKQTDVEEWTSWDEDAPTSVKIEGGNGNVATQQNSLEQLEPDYFKDMTPTIRKTQKIVIKKREPLNFGIPDGSTGFSSRLAATQDLPFIHQSSELGDLDTWQENTNAWEEEEDAAWQAEEVLRQQKLADREKRAAEQQRKKMEKEAQRLMKKEQNKIGVKLS

SEQ ID NO: 4487 - protein, 213 aa, Homo sapiens; identical to SEQ ID NO: 4486

SEQ ID NO: 4488 - protein, 213 aa, Homo sapiens; identical to SEQ ID NO: 4486

SEQ ID NO: 4489 - protein, 258 aa, Homo sapiens
MAITQFRLFKFCTCLATVFSFLKRLICRSGRGRKLSGDQITLPTTVDYSSVPKQTDVEEWTSWDEDAPTSVKIEGGNGNVATQQNSLEQLEPDYFKDMTPTIRKTQKIVIKKREPLNFGIPDGSTGFSSRLAATQDLPFIHQSSELGDLDTWQENTNAWEEEEDAAWQAEEVLRSRTNVCLLCSLLFHHPTPTSTPYINQSVKIERVSLGQWSYGKSKEQQKLADREKRAAEQQRKKMEKEAQRLMKKEQNKIGVKLS

SEQ ID NO: 4490 - protein, 258 aa, Homo sapiens; identical to SEQ ID NO: 4489

SEQ ID NO: 4491 - protein, 153 aa, Homo sapiens
MAITQFRLFKFCTCLATVFSFLKRLICRSGRGRKLSGDQITLPTTVDYSSVPKQTDVEEWTSWDEDAPTSVKIEGGNGNVATQQNSLEQLEPDYFKDMTPTIRKTQKIVIKKREPLNFGIPDGSTGFSSRLAATQDLPFIHQSTSHWVGATII

SEQ ID NO: 4492 - protein, 41 aa, Homo sapiens
MTPTIRKTQKIVIKKREPLNFGIPDGSTGFSSRLAATQDLP

SEQ ID NO: 4493 - protein, 229 aa, Homo sapiens
MTPQLLLALVLWASCPPCSGRKGPPAALTLPRVQCRASRYPIAVDCSWTLPPAPNSTSPVSFIATYRLGMAARGHSWPCLQQTPTSTSCTITDVQLFSMAPYVLNVTAVHPWGSSSSFVPFITEHIIKPDPPEGVRLSPLAERQLQVQWEPPGSWPFPEIFSLKYWIRYKRQGAARFHRVGPIEATSFILRAVRPRARYYVQVAAQDLTDYGELSDWSLPATATMSLGK

SEQ ID NO: 4494 - protein, 83 aa, Homo sapiens
MAKSLLKTASLSGRTKLLHQTGLSLYSTSHGFYEEEVKKTLQQFPGGSIDLQKEDNGIGILTLNNPSRMNAFSEFREISLYQC

SEQ ID NO: 4495 - protein, 125 aa, Homo sapiens
MAKSLLKTASLSGRTKLLHQTGLSLYSTSHGFYEEEVKKTLQQFPGGSIDLQKEDNGIGILTLNNPSRMNAFSGVMMLQLLEKVIELENWTEGKGLIVRGAKNTFSSGSDLNAVKSLGTPEANFL

SEQ ID NO: 4496 - protein, 135 aa, Homo sapiens
MAKSLLKTASLSGRTKLLHQTGLSLYSTSHGFYEEEVKKTLQQFPGGSIDLQKEDNGIGILTLNNPSRMNAFSGVMMLQLLEKVIELENWTEGKGLIVRGAKNTFSSGSDLNAVKSLGTPEDGMAVCMFMQNTLT

SEQ ID NO: 4497 - protein, 139 aa, Homo sapiens
MAKSLLKTASLSGRTKLLHQTGLSLYSTSHGFYEEEVKKTLQQFPGGSIDLQKEDNGIGILTLNNPSRMNAFSGVMMLQLLEKVIELENWTEGKGLIVRGAKNTFSSGSDLNAVKSLGTPEDGMAVCMFMQNTLTRFMR

SEQ ID NO: 4498 - protein, 151 aa, Homo sapiens
MAKSLLKTASLSGRTKLLHQTGLSLYSTSHGFYEEEVKKTLQQFPGGSIDLQKEDNGIGILTLNNPSRMNAFSGVMMLQLLEKVIELENWTEGKGLIVRGAKNTFSSGSDLNAVKSLGTPEDGMAVCMFMQNTLTRFMRLPLISVALVQGW

SEQ ID NO: 4499 - protein, 301 aa, Homo sapiens
MAKSLLKTASLSGRTKLLHQTGLSLYSTSHGFYEEEVKKTLQQFPGGSIDLQKEDNGIGILTLNNPSRMNAFSGVMMLQLLEKVIELENWTEGKGLIVRGAKNTFSSGSDLNAVKSLGTPEDGMAVCMFMQNTLTRFMRLPLISVALVQGWALGGGAEFTTACDFRLMTPESKIRFVHKEMGIIPSWGGTTRLVEIIGSRQALKVLSGALKLDSKNALNIGMVEEVLQSSDETKSLEEAQEWLKQFIQGPPEVIRALKKSVCSGRELYLEEALQNERDLLGTVWGGPANLEAIAKKGKFNK

SEQ ID NO: 4500 - protein, 301 aa, Homo sapiens; identical to SEQ ID NO: 4499

SEQ ID NO: 4501 - protein, 301 aa, Homo sapiens; identical to SEQ ID NO: 4499

SEQ ID NO: 4502 - protein, 179 aa, Homo sapiens
MAKSLLKTASLSGRTKLLHQTGLSLYSTSHGFYEEEVKKTLQQFPGGSIDLQKEDNGIGILTLNNPSRMNAFSGVMMLQLLEKVIELENWTEGKGLIVRGAKNTFSSGSDLNAVKSLGTPEESCRWNTEFLYTLHPVSPFINILYSYGWNGRMHVHAKHLNKIYETSFNKCCAGSRLGI

SEQ ID NO: 4503 - protein, 125 aa, Homo sapiens
MAKSLLKTASLSGRTKLLHQTGLSLYSTSHGFYEEEVKKTLQQFPGGSIDLQKEDNGIGILTLNNPSRMNAFSGVMMLQLLEKVIELENWTEGKGLIVRGAKNTFSSGSDLNAVKSLGTPEGDFL

SEQ ID NO: 4504 - protein, 145 aa, Homo sapiens
MAKSLLKTASLSGRTKLLHQTGLSLYSTSHGFYEEEVKKTLQQFPGGSIDLQKEDNGIGILTLNNPSRMNAFSGVMMLQLLEKVIELENWTEGKGLIVRGAKNTFSSGSDLNAVKSLGTPETSFNKCCAGSRLGIGWRSRIYYSM

SEQ ID NO: 4505 - protein, 145 aa, Homo sapiens; identical to SEQ ID NO: 4504

SEQ ID NO: 4506 - protein, 307 aa, Homo sapiens
MALKQEMAKSLLKTASLSGRTKLLHQTGLSLYSTSHGFYEEEVKKTLQQFPGGSIDLQKEDNGIGILTLNNPSRMNAFSGVMMLQLLEKVIELENWTEGKGLIVRGAKNTFSSGSDLNAVKSLGTPEDGMAVCMFMQNTLTRFMRLPLISVALVQGWALGGGAEFTTACDFRLMTPESKIRFVHKEMGIIPSWGGTTRLVEIIGSRQALKVLSGALKLDSKNALNIGMVEEVLQSSDETKSLEEAQEWLKQFIQGPPEVIRALKKSVCSGRELYLEEALQNERDLLGTVWGGPANLEAIAKKGKFNK

SEQ ID NO: 4507 - protein, 226 aa, Homo sapiens
MMLQLLEKVIELENWTEGKGLIVRGAKNTFSSGSDLNAVKSLGTPEDGMAVCMFMQNTLTRFMRLPLISVALVQGWALGGGAEFTTACDFRLMTPESKIRFVHKEMGIIPSWGGTTRLVEIIGSRQALKVLSGALKLDSKNALNIGMVEEVLQSSDETKSLEEAQEWLKQFIQGPPEVIRALKKSVCSGRELYLEEALQNERDLLGTVWGGPANLEAIAKKGKFNK

SEQ ID NO: 4508 - protein, 70 aa, Homo sapiens
MMLQLLEKVIELENWTEGKGLIVRGAKNTFSSGSDLNAVKSLGTPETSFNKCCAGSRLGIGWRSRIYYSM

SEQ ID NO: 4509 - protein, 34 aa, Homo sapiens
  SITE 1: note = misc_feature - Xaa can be any naturally occurring amino acid
XFMRLPLISVALVQGWALGGGAEFTTACDFSFRH

SEQ ID NO: 4510 - protein, 76 aa, Homo sapiens
  SITE 1: note = misc_feature - Xaa can be any naturally occurring amino acid
XMLQLLEKVIELENWTEGKGLIVRGAKNTFSSGSDLNAVKSLGTPEDGMAVCMFMQNTLTRFMSRMCGEVVCIQRR

SEQ ID NO: 4511 - protein, 100 aa, Homo sapiens
  SITE 1: note = misc_feature - Xaa can be any naturally occurring amino acid
XTPEVKKQRGKILLGLSRLPLISVALVQGWALGGGAEFTTACDFRLMTPESKIRFVHKEMGIIPSWGGTTRLVEIIGSRQALKVLSGALKLDSKNALNIG

SEQ ID NO: 4512 - protein, 255 aa, Homo sapiens
  SITE 1: note = misc_feature - Xaa can be any naturally occurring amino acid
XTSHGFYEEEVKKTLQQFPGGSIDLQKEDNGIGILTLNNPSRMNAFSGVMMLQLLEKVIELENWTEGKGLIVRGAKNTFSSGSDLNAVKSLGTPEESCRWNTEFLYTLHPVSPFINILYSYGWNGRMHVHAKHLNKIYEVKKQRGKILLGLSRLPLISVALVQGWALGGGAEFTTACDFRLMTPESKIRFVHKEMGIIPSWGGTTRLVEIIGSRQALKVLSGALKLDSKNALNIGMVEEVLQSSDETKSLEEAQE

SEQ ID NO: 4513 - protein, 567 aa, Homo sapiens
MGTTARAALVLTYLAVASAASEGGFTATGQRQLRPEHFQEVGYAAPPSPPLSRSLPMDHPDSSQHGPPFEGQSGKEGRGPRPHSQPWLGERVGCSHIPPSIVQPPPSQEATPLQQEKLLPAQLPAEKEVGPPLPQEAVPLQKELPSLQHPNEQKEGTPAPFGDQSHPEPESWNAAQHCQQDRSQGGWGHRLDGFPPGRPSPDNLNQICLPNRQHVVYGPWNLPQSSYSHLTRQGETLNFLEIGYSRCCHCRSHTNRLECAKLVWEEAMSRFCEAEFSVKTRPHWCCTRQGEARFSCFQEEAPQPHYQLRACPSHQPDISSGLELPFPPGVPTLDNIKNICHLRRFRSVPRNLPATDPLQRELLALIQLEREFQRCCRQGNNHTCTWKAWEDTLDKYCDREYAVKTHHHLCCRHPPSPTRDECFARRAPYPNYDRDILTIDIGRVTPNLMGHLCGNQRVLTKHKHIPGLIHNMTARCCDLPFPEQACCAEEEKLTFINDLCGPRRNIWRDPALCCYLSPGDEQVNCFNINYLRNVALVSGDTENAKGQGEQGSTGGTNISSTSEPKEE

SEQ ID NO: 4514 - protein, 415 aa, Homo sapiens
MGTTARAALVLTYLAVASAASEGGFTATGQRQLRPEHFQEVGYAAPPSPPLSRSLPMDHPDSSQHGPPFEGQSQVQPPPSQEATPLQQEKLLPAQLPAEKEVGPPLPQEAVPLQKELPSLQHPNEQKEGTPAPFGDQSHPEPESWNAAQHCQQDRSQGGWGHRLDGFPPGRPSPDNLNQICLPNRQHVVYGPWNLPQSSYSHLTRQGETLNFLEIGYSRCCHCRSHTNRLECAKLVWEDTLDKYCDREYAVKTHHHLCCRHPPSPTRDECFARRAPYPNYDRDILTIDIGRVTPNLMGHLCGNQRVLTKHKHIPGLIHNMTARCCDLPFPEQACCAEEEKLTFINDLCGPRRNIWRDPALCCYLSPGDEQVNCFNINYLRNVALVSGDTENAKGQGEQGSTGGTNISSTSEPKEE

SEQ ID NO: 4515 - protein, 540 aa, Homo sapiens
MGTTARAALVLTYLAVASAASEGGFTATGQRQLRPEHFQEVGYAAPPSPPLSRSLPMDHPDSSQHGPPFEGQSQVQPPPSQEATPLQQEKLLPAQLPAEKEVGPPLPQEAVPLQKELPSLQHPNEQKEGTPAPFGDQSHPEPESWNAAQHCQQDRSQGGWGHRLDGFPPGRPSPDNLNQICLPNRQHVVYGPWNLPQSSYSHLTRQGETLNFLEIGYSRCCHCRSHTNRLECAKLVWEEAMSRFCEAEFSVKTRPHWCCTRQGEARFSCFQEEAPQPHYQLRACPSHQPDISSGLELPFPPGVPTLDNIKNICHLRRFRSVPRNLPATDPLQRELLALIQLEREFQRCCRQGNNHTCTWKAWEDTLDKYCDREYAVKTHHHLCCRHPPSPTRDECFARRAPYPNYDRDILTIDIGRVTPNLMGHLCGNQRVLTKHKHIPGLIHNMTARCCDLPFPEQACCAEEEKLTFINDLCGPRRNIWRDPALCCYLSPGDEQVNCFNINYLRNVALVSGDTENAKGQGEQGSTGGTNISSTSEPKEE

SEQ ID NO: 4516 - protein, 160 aa, Homo sapiens
MKIAVLFCFFLLIIFQTDFGKNEEIPRKQRRKIYHRRLRKSSTSHKHRSNRQLGIQQTTVFTPVARLPIVNFDYSMEEKFESFSSFPGVESSYNVLPGKKGHCLVKGITMYNKAVWSPEPCTTCLCSDGRVLCDETMCHPQRCPQTVIPEGECCPVCSAT

SEQ ID NO: 4517 - protein, 643 aa, Homo sapiens
MKIAVLFCFFLLIIFQTDFGKNEEIPRKQRRKIYHRRLRKSSTSHKHRSNRQLGIQQTTVFTPVARLPIVNFDYSMEEKFESFSSFPGVESSYNVLPGKKGHCLVKGITMYNKAVWSPEPCTTCLCSDGRVLCDETMCHPQRCPQTVIPEGECCPVCSATEQREPTNLLHKQLPPPQVGMDRIVRKEALQSEEDEEVKEEDTEQKRETPESRNQGQLYSEGDSRGGDRKQRPGEERRLAHQQQRQGREEEEDEEEEGEEGEEDEEDEEDPVRGDMFRMPSRSPLPAPPRGTLRLPSGCSLSYRTISCINAMLTQIPPLTAPQITSLELTGNSIASIPDEAFNGLPNLERLDLSKNNITSSGIGPKAFKLLKKLMRLNMDGNNLIQIPSQLPSTLEELKVNENNLQAIDEESLSDLNQLVTLELEGNNLSEANVNPLAFKPLKSLAYLRLGKNKFRIIPQGLPGSIEELYLENNQIEEITEICFNHTRKINVIVLRYNKIEENRIAPLAWINQENLESIDLSYNKLYHVPSYLPKSLLHLVLLGNQIERIPGYVFGHMEPGLEYLYLSFNKLADDGMDRVSFYGAYHSLRELFLDHNDLKSIPPGIQEMKALHFLRLNNNKIRCVSDAVLETVTNRSDVAFPLW

SEQ ID NO: 4518 - protein, 164 aa, Homo sapiens
MKIAVLFCFFLLIIFQTDFGKNEEIPRKQRRKIYHRRLRKSSTSHKHRSNRQLGIQQTTVFTPVARLPIVNFDYSMEEKFESFSSFPGVESSYNVLPGKKGHCLVKGITMYNKAVWSPEPCTTCLCSDGRVLCDETMCHPQRCPQTVIPEGECCPVCSATGTEI

SEQ ID NO: 4519 - protein, 699 aa, Homo sapiens
MKIAVLFCFFLLIIFQTDFGKNEEIPRKQRRKIYHRRLRKSSTSHKHRSNRQLGIQQTTVFTPVARLPIVNFDYSMEEKFESFSSFPGVESSYNVLPGKKGHCLVKGITMYNKAVWSPEPCTTCLCSDGRVLCDETMCHPQRCPQTVIPEGECCPVCSATVSYSLLSGIALNDRNEFSGDSSEQREPTNLLHKQLPPPQVGMDRIVRKEALQSEEDEEVKEEDTEQKRETPESRNQGQLYSEGDSRGGDRKQRPGEERRLAHQQQRQGREEEEDEEEEGEEGEEDEEDEEDPVRGDMFRMPSRSPLPAPPRGTLRLPSGCSLSYRTISCINAMLTQIPPLTAPQITSLELTGNSIASIPDEAFNGLPNLERLDLSKNNITSSGIGPKAFKLLKKLMRLNMDGNNLIQIPSQLPSTLEELKVNENNLQAIDEESLSDLNQLVTLELEGNNLSEANVNPLAFKPLKSLAYLRLGKNKFRIIPQGLPGSIEELYLENNQIEEITEICFNHTRKINVIVLRYNKIEENRIAPLAWINQENLESIDLSYNKLYHVPSYLPKSLLHLVLLGNQIERIPGYVFGHMEPGLEYLYLSFNKLADDGMDRVSFYGAYHSLRELFLDHNDLKSIPPGIQEMKALHFLRLNNNKIRNILPEEICNAEEDDDSNLEHLHLENNYIKIREIPSYTFSCIRSYSSIVLKPQNIK

SEQ ID NO: 4520 - protein, 102 aa, Homo sapiens
MREYGVERDLAVYNQLLNIFPKEVFRPRNIIQRIFVHYPRQQECGIAVLEQMENHGVMPNKETEFLLIQIFGRKSYPMLKLVRLKLWFPRFMNVNPFPVPRD

SEQ ID NO: 4521 - protein, 223 aa, Homo sapiens
MREYGVERDLAVYNQLLNIFPKEVFRPRNIIQRIFVHYPRQQECGIAVLEQMENHGVMPNKETEFLLIQIFGRKSYPMLKLVRLKLWFPRFMNVNPFPVPRDLPQDPVELAMFGLRHMEPDLSARVTIYQVPLPKDSTGAADPPQPHIVGIQSPDQQAALARHNPARPVFVEGPFSLWLRNKCVYYHILRADLLPPEEREVEETPEEWNLYYPMQLDLEYVRS

SEQ ID NO: 4522 - protein, 267 aa, Homo sapiens
MREYGVERDLAVYNQLLNIFPKEVFRPRNIIQRIFVHYPRQQECGIAVLEQMENHGVMPNKETEFLLIQIFGRKSYPMLKLVRLKLWFPRFMNVNPFPVPRDLPQDPVELAMFGLRHMEPDLSARVTIYQVPLPKDSTGAADPPQPHIVGKSESMGAAKSLTLPRPCQVLAGPRLGSLGLWAESLAGHRACMSPHQESRVPISRPPWPATIQPGLSLLRAPSPCGSATSVCITTSSELTCCPRRRGKWKRRRRSGTSTTRCSWTWSM

SEQ ID NO: 4523 - protein, 25 aa, Homo sapiens
MSWVQATLLARGLCRAWGGTCGAAL

SEQ ID NO: 4524 - protein, 217 aa, Homo sapiens
MSWVQATLLARGLCRAWGGTCGAALTGTSISQVPLPKDSTGAADPPQPHIVGIQSPDQQAALARHNPARPVFVEGPFSLWLRNKCVYYHILRADLLPPEEREVEETPEEWNLYYPMQLDLEYVRSGWDNYEFDINEVEEGPVFAMCMAGAHDQATMAKWIQGLQETNPTLAQIPVVFRLAGSTRELQTSSAGLEEPPLPEDHQEEDDNLQRQQQGQS

SEQ ID NO: 4525 - protein, 82 aa, Homo sapiens
MSWVQATLLARGLCRAWGGTCGAALTGTSISQVPLPKDSTGAADPPQPHIVGSGRDAGGVEPLLPDAAGPGVCEEWLGQLRV

SEQ ID NO: 4526 - protein, 227 aa, Homo sapiens
MSWVQATLLARGLCRAWGGTCGAALTGTSISQVPRRLPRGLHCSAAAHSSEQSLVPSPPEPRQRPTKALVPFEDLFGQAPGGERDKASFLQTVQKFAEHSVRKRGHIDFIYLALRKMREYGVERDLAVYNQLLNIFPKEVFRPRNIIQRIFVHYPRQQECGIAVLEQMENHGVMPNKETEFLLIQIFGRKSYPMLKLVRLKLWFPRFMNVNPFPVPRDLPQDPVELA

SEQ ID NO: 4527 - protein, 296 aa, Homo sapiens
MSWVQATLLARGLCRAWGGTCGAALTGTSISQVPRRLPRGLHCSAAAHSSEQSLVPSPPEPRQRPTKALVPFEDLFGQAPGGERDKASFLQTVQKFAEHSVRKRGHIDFIYLALRKMREYGVERDLAVYNQLLNIFPKEVFRPRNIIQRIFVHYPRQQECGIAVLEQMENHGVMPNKETEFLLIQIFGRKSYPMLKLVRLKLWFPRFMNVNPFPVPRDLPQDPVELAMFGLRHMEPDLSARVTIYQVPLPKDSTGAADPPQPHIVGSGRDAGGVEPLLPDAAGPGVCEEWLGQLRV

SEQ ID NO: 4528 - protein, 431 aa, Homo sapiens
MSWVQATLLARGLCRAWGGTCGAALTGTSISQVPRRLPRGLHCSAAAHSSEQSLVPSPPEPRQRPTKALVPFEDLFGQAPGGERDKASFLQTVQKFAEHSVRKRGHIDFIYLALRKMREYGVERDLAVYNQLLNIFPKEVFRPRNIIQRIFVHYPRQQECGIAVLEQMENHGVMPNKETEFLLIQIFGRKSYPMLKLVRLKLWFPRFMNVNPFPVPRDLPQDPVELAMFGLRHMEPDLSARVTIYQVPLPKDSTGAADPPQPHIVGIQSPDQQAALARHNPARPVFVEGPFSLWLRNKCVYYHILRADLLPPEEREVEETPEEWNLYYPMQLDLEYVRSGWDNYEFDINEVEEGPVFAMCMAGAHDQATMAKWIQGLQETNPTLAQIPVVFRLAGSTRELQTSSAGLEEPPLPEDHQEEDDNLQRQQQGQS

SEQ ID NO: 4529 - protein, 296 aa, Homo sapiens
MSWVQATLLARGLCRAWGGTCGAALTGTSISQVPRRLPRGLHCSAAAHSSEQSLVPSPPEPRQRPTKALVPFEDLFGQAPGGERDKASFLQTVQKFAEHSVRKRGHIDFIYLALRKMREYGVERDLAVYNQLLNIFPKEVFRPRNIIQRIFVHYPRQQECGIAVLEQMENHGVMPNKETEFLLIQIFGRKSYPMLKLVRLKLWFPRFMNVNPFPVPRDLPQDPVELAMFGLRHMEPDLSARVTIYQVPLPKDSTGAADPPQPHIVELTCCPRRRGKWKRRRRSGTSTTRCSWTWSM

SEQ ID NO: 4530 - protein, 59 aa, Homo sapiens
  SITE 1: note = misc_feature - Xaa can be any naturally occurring amino acid
XMREYGVERDLAVYNQLLNIFPKEVFRPRNIIQRIFVHYPRQQECGIAVLEQMENHAQV

SEQ ID NO: 4531 - protein, 71 aa, Homo sapiens
  SITE 1: note = misc_feature - Xaa can be any naturally occurring amino acid
XVNPFPVPRDLPQDPVELAMFGLRHMEPDLSARVTIYQAPCAAPDAARLPPQRFLCPKTQQVQQIPPSPTS

SEQ ID NO: 4532 - protein, 147 aa, Homo sapiens
MTSSLKIWGILLALLCILCRLCVYSNNIYWREFIKLHYLSPSREFKEYKCDVLMREKEALKGKSFHMFIYSLWFKIQRACINEKGSDRYRNAYVWAPGALKVLECHWEKYNNRYTESRSFSYIEFHCGVDGYVDNIEDLRIIEPISN

SEQ ID NO: 4533 - protein, 147 aa, Homo sapiens
MASSLKIWGTLLALLCILCTLLVQSKEVSWREFMKQHYLSPSREFREYKCDVLMRENEALKDKSSHMFIYISWYKIEHICTSDNWMDRFRNAYVWVQNPLKVLKCHQENSKNSYTESRSFNYIEFHCSMDGYVDSIEDLKMVEPIGN

SEQ ID NO: 4534 - protein, 578 aa, Homo sapiens
MPFRLLIPLGLLCALLPQHHGAPGPDGSAPDPAHYRERVKAMFYHAYDSYLENAFPFDELRPLTCDGHDTWGSFSLTLIDALDTLLILGNVSEFQRVVEVLQDSVDFDIDVNASVFETNIRVVGGLLSAHLLSKKAGVEVEAGWPCSGPLLRMAEEAARKLLPAFQTPTGMPYGTVNLLHGVNPGETPVTCTAGIGTFIVEFATLSSLTGDPVFEDVARVALMRLWESRSDIGLVGNHIDVLTGKWVAQDAGIGAGVDSYFEYLVKGAILLQDKKLMAMFLEYNKAIRNYTRFDDWYLWVQMYKGTVSMPVFQSLEAYWPGLQSLIGDIDNAMRTFLNYYTVWKQFGGLPEFYNIPQGYTVEKREGYPLRPELIESAMYLYRATGDPTLLELGRDAVESIEKISKVECGFATIKDLRDHKLDNRMESFFLAETVKYLYLLFDPTNFIHNNGSTFDAVITPYGECILGAGGYIFNTEAHPIDPAALHCCQRLKEEQWEVEDLMREFYSLKRSRSKFQKNTVSSGPWEPPARPGTLFSPENHDQARERKPAKQKVPLLSCPSQPFTSKLALLGQVFLDSS

SEQ ID NO: 4535 - protein, 541 aa, Homo sapiens
MPFRLLIPLGLLCALLPQHHGAPGPDGSAPDPAHYSFSLTLIDALDTLLILGNVSEFQRVVEVLQDSVDFDIDVNASVFETNIRVVGGLLSAHLLSKKAGVEVEAGWPCSGPLLRMAEEAARKLLPAFQTPTGMPYGTVNLLHGVNPGETPVTCTAGIGTFIVEFATLSSLTGDPVFEDVARVALMRLWESRSDIGLVGNHIDVLTGKWVAQDAGIGAGVDSYFEYLVKGAILLQDKKLMAMFLEYNKAIRNYTRFDDWYLWVQMYKGTVSMPVFQSLEAYWPGLQSLIGDIDNAMRTFLNYYTVWKQFGGLPEFYNIPQGYTVEKREGYPLRPELIESAMYLYRATGDPTLLELGRDAVESIEKISKVECGFATIKDLRDHKLDNRMESFFLAETVKYLYLLFDPTNFIHNNGSTFDAVITPYGECILGAGGYIFNTEAHPIDPAALHCCQRLKEEQWEVEDLMREFYSLKRSRSKFQKNTVSSGPWEPPARPGTLFSPENHDQARERKPAKQKVPLLSCPSQPFTSKLALLGQVFLDSS

SEQ ID NO: 4536 - protein, 932 aa, Homo sapiens
MSEAGGRGCGSPVPQRARWRLVAATAAFCLVSATSVWTAGAEPMSREEKQKLGNQVLEMFDHAYGNYMEHAYPADELMPLTCRGRVRGQEPSRGDVDDALGKFSLTLIDSLDTLVVLNKTKEFEDAVRKVLRDVNLDNDVVVSVFETNIRVLGGLLGGHSLAIMLKEKGEYMQWYNDELLQMAKQLGYKLLPAFNTTSGLPYPRINLKFGIRKPEARTGTETDTCTACAGTLILEFAALSRFTGATIFEEYARKALDFLWEKRQRSSNLVGVTINIHTGDWVRKDSGVGAGIDSYYEYLLKAYVLLGDDSFLERFNTHYDAIMRYISQPPLLLDVHIHKPMLNARTWMDALLAFFPGLQVLKGDIRPAIETHEMLYQVIKKHNFLPEAFTTDFRVHWAQHPLRPEFAESTYFLYKATGDPYYLEVGKTLIENLNKYARVPCGFAAMKDVRTGSHEDRMDSFFLAEMFKYLYLLFADKEDIIFDIEDYIFTTEAHLLPLWLSTTNQSISKKNTTSEYTELDDSNFDWTCPNTQILFPNDPLYAQSIREPLKNVVDKSCPRGIIRVEESFRSGAKPPLRARDFMATNPEHLEILKKMGVSLIHLKDGRVQLVQHAIQAASSIDAEDGLRFMQEMIELSSQQQKEQQLPPRAVQIVSHPFFGRVVLTAGPAQFGLDLSKHKETRGFVASSKPSNGCSELTNPEAVMGKIALIQRGQCMFAEKARNIQNAGAIGGIVIDDNEGSSSDTAPLFQMAGDGKDTDDIKIPMLFLFSKEGSIILDAIREYEEVEVLLSDKAKDRDPEMENEEQPSSENDSQNQSGEQISSSSQEVDLVDQESSEENSLNSHPESLSLADMDNAASISPSEQTSNPTENHETTNLNGECTDLDNQLQEQSETEEDSNPNVSWGKKVQPIDSILADWNEDIEAFEMMEKDEL

SEQ ID NO: 4537 - protein, 905 aa, Homo sapiens
MSREEKQKLGNQVLEMFDHAYGNYMEHAYPADELMPLTCRGRVRGQEPSRGDVDDALGKFSLTLIDSLDTLVVLNKTKEFEDAVRKVLRDVNLDNDVVVSVFETNIRVLGGLLGGHSLAIMLKEKGEYMQWYNDELLQMAKQLGYKLLPAFNTTSGLPYPRINLKFGIRKPEARTGTETDTCTACAGTLILEFAALSRFTGATIFEEYARKALDFLWEKRQRSSNLVGVTINIHTGDWVRKDSGVGAGIDSYYEYLLKAYVLLGDDSFLERFNTHYDAIMRYISQPPLLLDVHIHKPMLNARTWMDALLAFFPGLQVLKGDIRPAIETHEMLYQVIKKHNFLPEAFTTDFRVHWAQHPLRPEFAESTYFLYKATGDPYYLEVGKTLIENLNKYARVPCGFAAMKDVRTGSHEDRMDSFFLAEMFKYLYLLFADKEDIIFDIEDYIFTTEAHLLPLWLSTTNQSISKKNTTSEYTELDDSNFDWTCPNTQILFPNDPLYAQSIREPLKNVVDKSCPRGIIRVEESFRSGAKPPLRARDFMATNPEHLEILKKMGVSLIHLKDGRVQLVQHAIQAASSIDAEDGLRFMQEMIELSSQQQKEQQLPPRAVQIVSHPFFGRVVLTAGPAQFGLDLSKHKETRGFVASSKPSNGCSELTNPEAVMGKIALIQRGQCMFAEKARNIQNAGAIGGIVIDDNEGSSSDTAPLFQMAGDGKDTDDIKIPMLFLFSKEGSIILDAIREYEEVEVLLSDKAKDRAAILKGKMIPSYIINSNPEMENEEQPSSENDSQNQSGEQISSSSQEVDLVDQESSEENSLNSHPESLSLADMDNAASISPSEQTSNPTENHETTNLNGECTDLDNQLQEQSETEEDSNPNVSWGKKVQPIDSILADWNEDIEAFEMMEKDEL

SEQ ID NO: 4538 - protein, 380 aa, Homo sapiens
VDKSCPRGIIRVEESFRSGAKPPLRARDFMATNPEHLEILKKMGVSLIHLKDGRVQLVQHAIQAASSIDAEDGLRFMQEMIELSSQQQKEQQLPPRAVQIVSHPFFGRVVLTAGPAQFGLDLSKHKETRGFVASSKPSNGCSELTNPEAVMGKIALIQRGQCMFAEKARNIQNAGAIGGIVIDDNEGSSSDTAPLFQMAGDGKDTDDIKIPMLFLFSKEGSIILDAIREYEEVEVLLSDKAKDRDPEMENEEQPSSENDSQNQSGEQISSSSQEVDLVDQESSEENSLNSHPESLSLADMDNAASISPSEQTSNPTENHETTNLNGECTDLDNQLQEQSETEEDSNPNVSWGKKVQPIDSILADWNEDIEAFEMMEKDEL

SEQ ID NO: 4539 - protein, 480 aa, Homo sapiens
MKRSVAVWLLVGLSLGVPQFGKGDICDPNPCENGGICLPGLADGSFSCECPDGFTDPNCSSVVEVASDEEEPTSAGPCTPNPCHNGGTCEISEAYRGDTFIGYVCKCPRGFNGIHCQHNINECEVEPCKNGGICTDLVANYSCECPGEFMGRNCQYKCSGPLGIEGGIISNQQITASSTHRALFGLQKWYPYYARLNKKGLINAWTAAENDRWPWIQINLQRKMRVTGVITQGAKRIGSPEYIKSYKIAYSNDGKTWAMYKVKGTNEDMVFRGNIDNNTPYANSFTPPIKAQYVRLYPQVCRRHCTLRMELLGCELSGCSEPLGMKSGHIQDYQITASSIFRTLNMDMFTWEPRKARLDKQGKVNAWTSGHNDQSQWLQVDLLVPTKVTGIITQGAKDFGHVQFVGSYKLAYSNDGEHWTVYQDEKQRKDKVFQGNFDNDTHRKNVIDPPIYARHIRILPWSWYGRITLRSELLGCTEEE

SEQ ID NO: 4540 - protein, 470 aa, Homo sapiens
MKRSVAVWLLVGLSLGVPQFGKGDICDPNPCENGGICLPGLADGSFSCECPDGFTDPNCSSVVEVGPCTPNPCHNGGTCEISEAYRGDTFIGYVCKCPRGFNGIHCQHNINECEVEPCKNGGICTDLVANYSCECPGEFMGRNCQYKCSGPLGIEGGIISNQQITASSTHRALFGLQKWYPYYARLNKKGLINAWTAAENDRWPWIQINLQRKMRVTGVITQGAKRIGSPEYIKSYKIAYSNDGKTWAMYKVKGTNEDMVFRGNIDNNTPYANSFTPPIKAQYVRLYPQVCRRHCTLRMELLGCELSGCSEPLGMKSGHIQDYQITASSIFRTLNMDMFTWEPRKARLDKQGKVNAWTSGHNDQSQWLQVDLLVPTKVTGIITQGAKDFGHVQFVGSYKLAYSNDGEHWTVYQDEKQRKDKVFQGNFDNDTHRKNVIDPPIYARHIRILPWSWYGRITLRSELLGCTEEE

SEQ ID NO: 4541 - protein, 212 aa, Homo sapiens
MDYLLMIFSLLFVACQGAPETAVLGAELSAVGENGGEKPTPSPPWRLRRSKRCSCSSLMDKECVYFCHLDIIWVNTPEHVVPYGLGSPRSKRALENLLPTKATDRENRCQCASQKDKKCWNFCQAGKELRAEDIMEKDWNNHKKGKDCSKLGKKCIYQQLVRGRKIRRSSEEHLRQTRSETMRNSVKSSFHDPKLKGKPSRERYVTHNRAHW

SEQ ID NO: 4542 - protein, 178 aa, Homo sapiens
MVSVPTTWCSVALALLVALHEGKGQAAATLEQPASSSHAQGTHLRLRRCSCSSWLDKECVYFCHLDIIWVNTPEQTAPYGLGNPPRRRRRSLPRRCQCSSARDPACATFCLRRPWTEAGAVPSRKSPADVFQTGKTGATTGELLQRLRDISTVKSLFAKRQQEAMREPRSTHSRWRKR

SEQ ID NO: 4543 - protein, 192 aa, Homo sapiens
MEPGLWLLFGLTVTSAAGFVPCSQSGDAGRRGVSQAPTAARSEGDCEETVAGPGEETVAGPGEGTVAPTALQGPSPGSPGQEQAAEGAPEHHRSRRCTCFTYKDKECVYYCHLDIIWINTPEQTVPYGLSNYRGSFRGKRSAGPLPGNLQLSHRPHLRCACVGRYDKACLHFCTQTLDVSRLKSRTNKASRL

SEQ ID NO: 4544 - protein, 224 aa, Homo sapiens
MEPGLWLLFGLTVTSAAGFVPCSQSGDAGRRGVSQAPTAARSEGDCEETVAGPGEETVAGPGEGTVAPTALQGPSPGSPGQEQAAEGAPEHHRSRRCTCFTYKDKECVYYCHLDIIWINTPEQTVPYGLSNYRGSFRGKRSAGPLPGNLQLSHRPHLRCACVGRYDKACLHFCTQTLDVSRQVEVKDQQSKQALDLHHPKLMPGSGLALAPSTCPRCLFQEGAP

SEQ ID NO: 4545 - protein, 238 aa, Homo sapiens
MEPGLWLLFGLTVTSAAGFVPCSQSGDAGRRGVSQAPTAARSEGDCEETVAGPGEETVAGPGEGTVAPTALQGPSPGSPGQEQAAEGAPEHHRSRRCTCFTYKDKECVYYCHLDIIWINTPEQTVPYGLSNYRGSFRGKRSAGPLPGNLQLSHRPHLRCACVGRYDKACLHFCTQTLDVSSNSRTAEKTDKEEEGKVEVKDQQSKQALDLHHPKLMPGSGLALAPSTCPRCLFQEGAP

SEQ ID NO: 4546 - protein, 238 aa, Homo sapiens; identical to SEQ ID NO: 4545

SEQ ID NO: 4547 - protein, 219 aa, Homo sapiens
MEPGLWLLFGLTVTSAAGFVPCSQSGDAGRRGVSQAPTAARSEGDCEETVAGPGEETVAGPGEGTVAPTALQGPSPGSPGQEQAAEGAPEHHRSRRCTCFTYKDKECVYYCHLDIIWINTPEQTVPYGLSNYRGSFRGKRSAGPLPGNLQLSHRPHLRCACVGRYDKACLHFCTQTLDVSSNSRTAEKTDKEEEGKVRGANRGLCQRRLKSRTNKASRL

SEQ ID NO: 4548 - protein, 198 aa, Homo sapiens
MEPGLWLLFGLTVTSAAGFVPCSQSGDAGRRGVSQAPTAARSEGDCEETVAGPGEETVAGPGEGTVAPTALQGPSPGSPGQEQAAEGAPEHHRSRRCTCFTYKDKECVYYCHLDIIWINTPEQTVPYGLSNYRGSFRGKRSAGPLPGNLQLSHRPHLRCACVGRYDKACLHFCTQTLDVSSNSRTAEKTDKEEEGKVT

SEQ ID NO: 4549 - protein, 162 aa, Homo sapiens
KLVPFIQKASVGITVLSLCALSIDRYRAVASWSRIKGIGVPKWTAVEIVLIWVVSVVLAVPEAIGFDIITMDYKGSYLRICLLHPVQKTAFMQFYKTAKDWWLFSFYFCLPLAITAFFYTLMTCEMLRKKSGMQIALNDHLKQLSVGIGLYWYQHGFTEFLH

SEQ ID NO: 4550 - protein, 532 aa, Homo sapiens
MNKSTCLMAAETPSKRWRLHCLAFSQRFVRAGPACSSREACSSPRAGWNPAGFRLPGRWSPFVALHLVCQIREALKLRSGHRTPSGAGSSMQPPPSLCGRALVALVLACGLSRIWGEERGFPPDRATPLLQTAEIMTPPTKTLWPKGSNASLARSLAPAEVPKGDRTAGSPPRTISPPPCQGPIEIKETFKYINTVVSCLVFVLGIIGNSTLLRIIYKNKCMRNGPNILIASLALGDLLHIVIDIPINVYKLLAEDWPFGAEMCKLVPFIQKASVGITVLSLCALSIDRYRAVASWSRIKGIGVPKWTAVEIVLIWVVSVVLAVPEAIGFDIITMDYKGSYLRICLLHPVQKTAFMQFYKTAKDWWLFSFYFCLPLAITAFFYTLMTCEMLRKKSGMQIALNDHLKQRREVAKTVFCLVLVFALCWLPLHLSRILKLTLYNQNDPNRCELLSFLLVLDYIGINMASLNSCINPIALYLVSKRFKNCFKSCLCCWCQSFEEKQSLEEKQSCLKFKANDHGYDNFRSSNKYSSS

SEQ ID NO: 4551 - protein, 442 aa, Homo sapiens
MQPPPSLCGRALVALVLACGLSRIWGEERGFPPDRATPLLQTAEIMTPPTKTLWPKGSNASLARSLAPAEVPKGDRTAGSPPRTISPPPCQGPIEIKETFKYINTVVSCLVFVLGIIGNSTLLRIIYKNKCMRNGPNILIASLALGDLLHIVIDIPINVYKLLAEDWPFGAEMCKLVPFIQKASVGITVLSLCALSIDRYRAVASWSRIKGIGVPKWTAVEIVLIWVVSVVLAVPEAIGFDIITMDYKGSYLRICLLHPVQKTAFMQFYKTAKDWWLFSFYFCLPLAITAFFYTLMTCEMLRKKSGMQIALNDHLKQRREVAKTVFCLVLVFALCWLPLHLSRILKLTLYNQNDPNRCELLSFLLVLDYIGINMASLNSCINPIALYLVSKRFKNCFKSCLCCWCQSFEEKQSLEEKQSCLKFKANDHGYDNFRSSNKYSSS

SEQ ID NO: 4552 - protein, 409 aa, Homo sapiens
MQPPPSLCGRALVALVLACGLSRIWGEERGFPPDRATPLLQTAEIMTPPTKTLWPKGSNASLARSLAPAEVPKGDRTAGSPPRTISPPPCQGPIEIKETFKYINTVVSCLVFVLGIIGNSTLLRIIYKNKCMRNGPNILIASLALGDLLHIVIDIPINVYKLLAEDWPFGAEMCKLVPFIQKASVGITVLSLCALSIDRYRAVASWSRIKGIGVPKWTAVEIVLIWVVSVVLAVPEAIGFDIITMDYKGSYLRICLLHPVQKTAFMQFYKTAKDWWLFSFYFCLPLAITAFFYTLMTCEMLRKKSGMQIALNDHLKQRREVAKTVFCLVLVFALCWLPLHLSRILKLTLYNQNDPNRCELLSFLLVLDYIGINMASLNSCINPIALYLVSKRFKNCFKVRDYPKIKSSL

SEQ ID NO: 4553 - protein, 442 aa, Homo sapiens; identical to SEQ ID NO: 4551

SEQ ID NO: 4554 - protein, 436 aa, Homo sapiens
MQPPPSLCGRALVALVLACGLSRIWGEERGFPPDRATPLLQTAEIMTPPTKTLWPKGSNASLARSLAPAEVPKGDRTAGSPPRTISPPPCQGPIEIKETFKYINTVVSCLVFVLGIIGNSTLLRIIYKNKCMRNGPNILIASLALGDLLHIVIDIPINVYKLLAEDWPFGAEMCKLVPFIQKASVGITVLSLCALSIDRYRAVASWSRIKGIGVPKWTAVEIVLIWVVSVVLAVPEAIGFDIITMDYKGSYLRICLLHPVQKTAFMQFYKTAKDWWLFSFYFCLPLAITAFFYTLMTCEMLRKKSGMQIALNDHLKQRREVAKTVFCLVLVFALCWLPLHLSRILKLTLYNQNDPNRCELLSFLLVLDYIGINMASLNSCINPIALYLVSKRFKNCFKAGPHVGNKLVMLFSVNIECDGTVNQNPTMWPERKSNNN

SEQ ID NO: 4555 - protein, 442 aa, Homo sapiens; identical to SEQ ID NO: 4551

SEQ ID NO: 4556 - protein, 442 aa, Homo sapiens; identical to SEQ ID NO: 4551

SEQ ID NO: 4557 - protein, 442 aa, Homo sapiens; identical to SEQ ID NO: 4551

SEQ ID NO: 4558 - protein, 27 aa, Homo sapiens
MLKALFLTMLTLALVKSQDTEETITYT

SEQ ID NO: 4559 - protein, 52 aa, Homo sapiens
MLKALFLTMLTLALVKSQDTEETITYTQCTDGYEWDPVRQQCKDIDECDIVP

SEQ ID NO: 4560 - protein, 62 aa, Homo sapiens
MLKALFLTMLTLALVKSQDTEETITYTQCTDGYEWDPVRQQCKDIDECDIVPDACKGGMKCV

SEQ ID NO: 4561 - protein, 87 aa, Homo sapiens
MLKALFLTMLTLALVKSQDTEETITYTQCTDGYEWDPVRQQCKDIDECDIVPDACKGGMKCVNHYGGYLCLPKTAQIIVNNEQPQQE

SEQ ID NO: 4562 - protein, 106 aa, Homo sapiens
MLKALFLTMLTLALVKSQDTEETITYTQCTDGYEWDPVRQQCKDIDECDIVPDACKGGMKCVNHYGGYLCLPKTAQIIVNNEQPQQETQPAEGTSGATTGVVAASS

SEQ ID NO: 4563 - protein, 119 aa, Homo sapiens
MLKALFLTMLTLALVKSQDTEETITYTQCTDGYEWDPVRQQCKDIDECDIVPDACKGGMKCVNHYGGYLCLPKTAQIIVNNEQPQQETQPAEGTSGATTGVVAASSMATSGVLPGGGFV

SEQ ID NO: 4564 - protein, 172 aa, Homo sapiens
MLKALFLTMLTLALVKSQDTEETITYTQCTDGYEWDPVRQQCKDIDECDIVPDACKGGMKCVNHYGGYLCLPKTAQIIVNNEQPQQETQPAEGTSGATTGVVAASSMATSGVLPGGGFVASAAAVAGPEMQTGRNNFVIRRNPADPQRIPSNPSHRIQCAAGYEQSEHNVCQ

SEQ ID NO: 4565 - protein, 493 aa, Homo sapiens
MLKALFLTMLTLALVKSQDTEETITYTQCTDGYEWDPVRQQCKDIDECDIVPDACKGGMKCVNHYGGYLCLPKTAQIIVNNEQPQQETQPAEGTSGATTGVVAASSMATSGVLPGGGFVASAAAVAGPEMQTGRNNFVIRRNPADPQRIPSNPSHRIQCAAGYEQSEHNVCQDIDECTAGTHNCRADQVCINLRGSFACQCPPGYQKRGEQCVDIDECTIPPYCHQRCVNTPGSFYCQCSPGFQLAANNYTCVDINECDASNQCAQQCYNILGSFICQCNQGYELSSDRLNCEDIDECRTSSYLCQYQCVNEPGKFSCMCPQGYQVVRSRTCQDINECETTNECREDEMCWNYHGGFRCYPRNPCQDPYILTPENRCVCPVSNAMCRELPQSIVYKYMSIRSDRSVPSDIFQIQATTIYANTINTFRIKSGNENGEFYLRQTSPVSAMLVLVKSLSGPREHIVDLEMLTVSSIGTFRTSSVLRLTIIVGPFSF

SEQ ID NO: 4566 - protein, 493 aa, Homo sapiens; identical to SEQ ID NO: 4565

SEQ ID NO: 4567 - protein, 46 aa, Homo sapiens
MLKALFLTMLTLALVKSQDTEETITYTQCTDGYEWDPVRQQCKEDS

SEQ ID NO: 4568 - protein, 280 aa, Homo sapiens
  SITE 1: note = misc_feature - Xaa can be any naturally occurring amino acid
XNNFVIRRNPADPQRIPSNPSHRIQCAAGYEQSEHNVCQDIDECTAGTHNCRADQVCINLRGSFACQCPPGYQKRGEQCVDIDECRTSSYLCQYQCVNEPGKFSCMCPQGYQVVRSRTCQDINECETTNECREDEMCWNYHGGFRCYPRNPCQDPYILTPENRCVCPVSNAMCRELPQSIVYKYMSIRSDRSVPSDIFQIQATTIYANTINTFRIKSGNENGEFYLRQTSPVSAMLVLVKSLSGPREHIVDLEMLTVSSIGTFRTSSVLRLTIIVGPFSF

SEQ ID NO: 4569 - protein, 182 aa, Homo sapiens
DECESGAHQCSEAQTCVNFHGGYRCVDTNRCVEPYIQVSENRCLCPASNPLCREQPSSIVHRYMTITSERSVPADVFQIQATSVYPGAYNAFQIRAGNSQGDFYIRGPTPSEEQEGATLPAATLAEEPVVRGRMRKAQGPPLTGAGSSAPRASVTPRGEEVTRRADSRPRPRDLDLAGLQGS

SEQ ID NO: 4570 - protein, 183 aa, Homo sapiens
MLPCASCLPGSLLLWALLLLLLGSASPQDSEEPDSYTECTDGYEWDPDSQHCRDVNECLTIPEACKGEMKCINHYGGYLCLPRSAAVINDLHGEGPPPPVPPAQHPNPCPPGYEPDDQDSCVDVDECAQALHDCRPSQDCHNLPGSYQCTCPDGYRKIGPECVDIDECRYRYCQHRCVNLPGS

SEQ ID NO: 4571 - protein, 202 aa, Homo sapiens
MLPCASCLPGSLLLWALLLLLLGSASPQDSEEPDSYTECTDGYEWDPDSQHCRDVNECLTIPEACKGEMKCINHYGGYLCLPRSAAVINDLHGEGPPPPVPPAQHPNPCPPGYEPDDQDSCVDVDECAQALHDCRPSQDCHNLPGSYQCTCPDGYRKIGPECVDIDECRYRYCQHRCVNLPGSFRCQCEPGFQLGPNNRSCV

SEQ ID NO: 4572 - protein, 443 aa, Homo sapiens
MLPCASCLPGSLLLWALLLLLLGSASPQDSEEPDSYTECTDGYEWDPDSQHCRDVNECLTIPEACKGEMKCINHYGGYLCLPRSAAVINDLHGEGPPPPVPPAQHPNPCPPGYEPDDQDSCVDVDECAQALHDCRPSQDCHNLPGSYQCTCPDGYRKIGPECVDIDECRYRYCQHRCVNLPGSFRCQCEPGFQLGPNNRSCVDVNECDMGAPCEQRCFNSYGTFLCRCHQGYELHRDGFSCSDIDECSYSSYLCQYRCINEPGRFSCHCPQGYQLLATRLCQDIDECESGAHQCSEAQTCVNFHGGYRCVDTNRCVEPYIQVSENRCLCPASNPLCREQPSSIVHRYMTITSERSVPADVFQIQATSVYPGAYNAFQIRAGNSQGDFYIRQINNVSAMLVLARPVTGPREYVLDLEMVTMNSLMSYRASSVLRLTVFVGAYTF

SEQ ID NO: 4573 - protein, 443 aa, Homo sapiens; identical to SEQ ID NO: 4572

SEQ ID NO: 4574 - protein, 436 aa, Homo sapiens
MLPCASCLPGSLLLWALLLLLLGSASPQDSEEPDSYTECTDGYEWDPDSQHCRDVNECLTIPEACKGEMKCINHYGGYLCLPRSAAVINDLHGEGPPPPVPPAQHPNPCPPGYEPDDQDSCVDVDECAQALHDCRPSQDCHNLPGSYQCTCPDGYRKIGPECVDIDECRYRYCQHRCVNLPGSFRCQCEPGFQLGPNNRSCVDVNECDMGAPCEQRCFNSYGTFLCRCHQGYELHRDGFSCSDIDECSYSSYLCQYRCINEPGRFSCHCPQGYQLLATRLCQDIDECESGAHQCSEAQTCVNFHGGYRCVDTNRCVEPYIQVSENRCLCPASNPLCREQPSSIVHRYMTITSERSVPADVFQIQATSVYPGAYNAFQIRAGNSQGDFYIRAQGPPLTGAGSSAPRASVTPRGEEVTRRADSRPRPRDLDLAGLQGS

SEQ ID NO: 4575 - protein, 77 aa, Homo sapiens
MLPCASCLPGSLLLWALLLLLLGSASPQDSEEPDSYTECTDGYEWDPDSQHCRGPAQETGCAQQAPLCRCQRVSDHP

SEQ ID NO: 4576 - protein, 58 aa, Homo sapiens
MLPCASCLPGSLLLWALLLLLLGSASPQDSEEPDSYTVGTVRAAGLGQEGCQRVSDHP

SEQ ID NO: 4577 - protein, 76 aa, Homo sapiens
MTITSERSVPADVFQIQATSVYPGAYNAFQIRAGNSQGDFYIRQINNVSAMLVLARPVTGPREYVLDLEMVTMNSL

SEQ ID NO: 4578 - protein, 74 aa, Homo sapiens
SIVHRYMTITSERSVPADVFQIQATSVYPGAYNAFQIRAGNSQGDFYIRQINNVSAMLVLARPVTGPREPRGPH

SEQ ID NO: 4579 - protein, 69 aa, Homo sapiens
  SITE 1: note = misc_feature - Xaa can be any naturally occurring amino acid
XFQIRAGNSQGDFYIRQINNVSAMLVLARPVTGPREYVLDLEMVTMNSLMSYRASSVLRLTVFVGAYTF

SEQ ID NO: 4580 - protein, 54 aa, Homo sapiens
  SITE 1: note = misc_feature - Xaa can be any naturally occurring amino acid
XQINNVSAMLVLARPVTGPREYVLDLEMVTMNSLMSYRASSVLRLTVFVGAYTF

SEQ ID NO: 4581 - protein, 183 aa, Homo sapiens
MEFLWAPLLGLCCSLAAADRHTVFWNSSNPKFRNEDYTIHVQLNDYVDIICPHYEDHSVADAAMEQYILYLVEHEEYQLCQPQSKDQVRWQCNRPSAKHGPEKLSEKFQRFTPFTLGKEFKEGHSYYYISHSPQAHDNPQEKRLAADDPEVRVLHSIGHSAAPRLFPLAWTVLLLPLLLLQTP

SEQ ID NO: 4582 - protein, 205 aa, Homo sapiens
MEFLWAPLLGLCCSLAAADRHTVFWNSSNPKFRNEDYTIHVQLNDYVDIICPHYEDHSVADAAMEQYILYLVEHEEYQLCQPQSKDQVRWQCNRPSAKHGPEKLSEKFQRFTPFTLGKEFKEGHSYYYISKPIHQHEDRCLRLKVTVSGKITHSPQAHDNPQEKRLAADDPEVRVLHSIGHSAAPRLFPLAWTVLLLPLLLLQTP

SEQ ID NO: 4583 - protein, 213 aa, Homo sapiens
MAPAQRPLLPLLLLLLPLPPPPFARAEDAARANSDRYAVYWNRSNPRFHAGAGDDGGGYTVEVSINDYLDIYCPHYGAPLPPAERMEHYVLYMVNGEGHASCDHRQRGFKRWECNRPAAPGGPLKFSEKFQLFTPFSLGFEFRPGHEYYYISATPPNAVDRPCLRLKVYVRPTNETLYEAPEPIFTSNNSCSSPGGCRLFLSTIPVLWTLLGS

SEQ ID NO: 4584 - protein, 201 aa, Homo sapiens
MRLLPLLRTVLWAAFLGSPLRGGSSLRHVVYWNSSNPRLLRGDAVVELGLNDYLDIVCPHYEGPGPPEGPETFALYMVDWPGYESCQAEGPRAYKRWVCSLPFGHVQFSEKIQRFTPFSLGFEFLPGETYYYISVPTPESSGQCLRLQVSVCCKERKSESAHPVGSPGESGTSGWRGGDTPSPLCLLLLLLLLILRLLRIL

SEQ ID NO: 4585 - protein, 193 aa, Homo sapiens
MRLLPLLRTVLWAAFLGSPLRGGSSLRHVVYWNSSNPRLLRGDAVVELGLNDYLDIVCPHYEGPGPPEGPETFALYMVDWPGYESCQAEGPRAYKRWVCSLPFGHVQFSEKIQRFTPFSLGFEFLPGETYYYISVPTPESSGQCLRLQVSVCCKERNLPSHPKEPESSQDPLEEEGSLLPALGVPIQTDKMEH

SEQ ID NO: 4586 - protein, 207 aa, Homo sapiens
MRLLPLLRTVLWAAFLGSPLRGGSSLRHVVYWNSSNPRLLRGDAVVELGLNDYLDIVCPHYEGPGPPEGPETFALYMVDWPGYESCQAEGPRAYKRWVCSLPFGHVQFSEKIQRFTPFSLGFEFLPGETYYYISVPTPESSGQCLRLQVSVCCKERRARVLPRSPGGGGIPAACTGGANSDRQDGALMGEIRGSEVTLAGACPLITG

SEQ ID NO: 4587 - protein, 553 aa, Homo sapiens
MPLPWSLALPLLLSWVAGGFGNAASARHHGLLASARQPGVCHYGTKLACCYGWRRNSKGVCEATCEPGCKFGECVGPNKCRCFPGYTGKTCSQDVNECGMKPRPCQHRCVNTHGSYKCFCLSGHMLMPDATCVNSRTCAMINCQYSCEDTEEGPQCLCPSSGLRLAPNGRDCLDIDECASGKVICPYNRRCVNTFGSYYCKCHIGFELQYISGRYDCIDINECTMDSHTCSHHANCFNTQGSFKCKCKQGYKGNGLRCSAIPENSVKEVLRAPGTIKDRIKKLLAHKNSMKKKAKIKNVTPEPTRTPTPKVNLQPFNYEEIVSRGGNSHGGKKGNEEKMKEGLEDEKREEKALKNDIEERSLRGDVFFPKVNEAGEFGLILVQRKALTSKLEHKDLNISVDCSFNHGICDWKQDREDDFDWNPADRDNAIGFYMAVPALAGHKKDIGRLKLLLPDLQPQSNFCLLFDYRLAGDKVGKLRVFVKNSNNALAWEKTTSEDEKWKTGKIQLYQGTDATKSIIFEAERGKGKTGEIAVDGVLLVSGLCPDSLLSVDD

SEQ ID NO: 4588 - protein, 554 aa, Homo sapiens
MPLPWSLALPLLLSWVAGGFGNAASARHHGLLASARQPGVCHYGTKLACCYGWRRNSKGVCEATCEPGCKFGECVGPNKCRCFPGYTGKTCSQDVNECGMKPRPCQHRCVNTHGSYKCFCLSGHMLMPDATCVNSRTCAMINCQYSCEDTEEGPQCLCPSSGLRLAPNGRDCLDIDECASGKVICPYNRRCVNTFGSYYCKCHIGFELQYISGRYDCIDINECTMDSHTCSHHANCFNTQGSFKCKCKQGYKGNGLRCSAIPENSVKEVLRAPGTIKDRIKKLLAHKNSMKKKAKIKNVTPEPTRTPTPKVNLQPFNYEEIVSRGGNSHGGKKGNEEKMKEGLEDEKREEKALKNDIEERSLRGDVFFPKVNEAGEFGLILVQRKALTSKLEHKADLNISVDCSFNHGICDWKQDREDDFDWNPADRDNAIGFYMAVPALAGHKKDIGRLKLLLPDLQPQSNFCLLFDYRLAGDKVGKLRVFVKNSNNALAWEKTTSEDEKWKTGKIQLYQGTDATKSIIFEAERGKGKTGEIAVDGVLLVSGLCPDSLLSVDD

SEQ ID NO: 4589 - protein, 66 aa, Homo sapiens
MRGSQEVLLMWLLVLAVGGTEHAYRPGRRVCAVRAHGDPVSESFVQRVYQPFLTTCDGHRACSTYR

SEQ ID NO: 4590 - protein, 273 aa, Homo sapiens
MRGSQEVLLMWLLVLAVGGTEHAYRPGRRVCAVRAHGDPVSESFVQRVYQPFLTTCDGHRACSTYRTIYRTAYRRSPGLAPARPRYACCPGWKRTSGLPGACGAAICQPPCRNGGSCVQPGRCRCPAGWRGDTCQSDVDECSARRGGCPQRCVNTAGSYWCQCWEGHSLSADGTLCVPKGGPPRVAPNPTGVDSAMKEEVQRLQSRVDLLEEKLQLVLAPLHSLASQALEHGLPDPGSLLVHSFQQLGRIDSLSEQISFLEEQLGSCSCKKDS

SEQ ID NO: 4591 - protein, 273 aa, Homo sapiens; identical to SEQ ID NO: 4590

SEQ ID NO: 4592 - protein, 273 aa, Homo sapiens; identical to SEQ ID NO: 4590

SEQ ID NO: 4593 - protein, 273 aa, Homo sapiens; identical to SEQ ID NO: 4590

SEQ ID NO: 4594 - protein, 293 aa, Homo sapiens
MGSRAELCTLLGGFSFLLLLIPGEGAKGGSLRESQGVCSKQTLVVPLHYNESYSQPVYKPYLTLCAGRRICSTYRTMYRVMWREVRREVQQTHAVCCQGWKKRHPGALTCEAICAKPCLNGGVCVRPDQCECAPGWGGKHCHVDVDECRTSITLCSHHCFNTAGSFTCGCPHDLVLGVDGRTCMEGSPEPPTSASILSVAVREAEKDERALKQEIHELRGRLERLEQWAGQAGAWVRAVLPVPPEELQPEQVAELWGRGDRIESLSDQVLLLEERLGACSCEDNSLGLGVNHR

SEQ ID NO: 4595 - protein, 293 aa, Homo sapiens; identical to SEQ ID NO: 4594

SEQ ID NO: 4596 - protein, 258 aa, Homo sapiens
MGSRAELCTLLGGFSFLLLLIPGEGAKGGSLRESQGVCSKQTLVVPLHYNESYSQPVYKPYLTLCAGRRICSTYRTMYRVMWREVRREVQQTHAVCCQGWKKRHPGALTCEAICAKPCLNGGVCVRPDQCECAPGWGGKHCHVGSFTCGCPHDLVLGVDGRTCMEGSPEPPTSASILSVAVREAEKDERALKQEIHELRGRLERLEQWAGQAGAWVRAVLPVPPEELQPEQVAELWGRGDRIESLSDQVLLLEERLGA

SEQ ID NO: 4597 - protein, 1009 aa, Homo sapiens
MDLIRGVLLRLLLLASSLGPGAVSLRAAIRKPGKVGPPLDIKLGALNCTAFSIQWKMPRHPGSPILGYTVFYSEVGADKSLQEQLHSVPLSRDIPTTEEVIGDLKPGTEYRVSIAAYSQAGKGRLSSPRHVTTLSQDSCLPPAAPQQPHVIVVSDSEVALSWKPGASEGSAPIQYYSVEFIRPDFDKKWTSIHERIQMDSMVIKGLDPDTNYQFAVRAMNSHGPSPRSWPSDIIRTLCPEEAGSGRYGPRYITDMGAGEDDEGFEDDLDLDISFEEVKPLPATKGGNKKFLVESKKMSISNPKTISRLIPPTSASLPVTTVAPQPIPIQRKGKNGVAIMSRLFDMPCDETLCSADSFCVNDYTWGGSRCQCTLGKGGESCSEDIVIQYPQFFGHSYVTFEPLKNSYQAFQITLEFRAEAEDGLLLYCGENEHGRGDFMSLAIIRRSLQFRFNCGTGVAIIVSETKIKLGGWHTVMLYRDGLNGLLQLNNGTPVTGQSQGQYSKITFRTPLYLGGAPSAYWLVRATGTNRGFQGCVQSLAVNGRRIDMRPWPLGKALSGADVGECSSGICDEASCIHGGTCTAIKADSYICLCPLGFKGRHCEDAFTLTIPQFRESLRSYAATPWPLEPQHYLSFMEFEITFRPDSGDGVLLYSYDTGSKDFLSINLAGGHVEFRFDCGSGTGVLRSEDPLTLGNWHELRVSRTAKNGILQVDKQKIVEGMAEGGFTQIKCNTDIFIGGVPNYDDVKKNSGVLKPFSGSIQKIILNDRTIHVKHDFTSGVNVENAAHPCVRAPCAHGGSCRPRKEGYDCDCPLGFEGLHCQKAIIEAIEIPQFIGRSYLTYDNPDILKRVSGSRSNVFMRFKTTAKDGLLLWRGDSPMRPNSDFISLGLRDGALVFSYNLGSGVASIMVNGSFNDGRWHRVKAVRDGQSGKITVDDYGARTGKSPGMMRQLNINGALYVGGMKEIALHTNRQYMRGLVGCISHFTLSTDYHISLVEDAVDGKNINTCGAK

SEQ ID NO: 4598 - protein, 1017 aa, Homo sapiens
MDLIRGVLLRLLLLASSLGPGAVSLRAAIRKPGKVGPPLDIKLGALNCTAFSIQWKMPRHPGSPILGYTVFYSEVGADKSLQEQLHSVPLSRDIPTTEEVIGDLKPGTEYRVSIAAYSQAGKGRLSSPRHVTTLSQDSCLPPAAPQQPHVIVVSDSEVALSWKPGASEGSAPIQYYSVEFIRPDFDKKWTSIHERIQMDSMVIKGLDPDTNYQFAVRAMNSHGPSPRSWPSDIIRTLCPEEAGSGRYGPRYITDMGAGEDDEGFEDDLDLDISFEEVKPLPATKGGNKKFLVESKKMSISNPKTISRLIPPTSASLPVTTVAPQPIPIQRKGKNGVAIMSRLFDMPCDETLCSADSFCVNDYTWGGSRCQCTLGKGGESCSEDIVIQYPQFFGHSYVTFEPLKNSYQAFQITLEFRAEAEDGLLLYCGENEHGRGDFMSLAIIRRSLQFRFNCGTGVAIIVSETKIKLGGWHTVMLYRDGLNGLLQLNNGTPVTGQSQGQYSKITFRTPLYLGGAPSAYWLVRATGTNRGFQGCVQSLAVNGRRIDMRPWPLGKALSGADVGECSSGICDEASCIHGGTCTAIKADSYICLCPLGFKGRHCEDAFTLTIPQFRESLRSYAATPWPLEPQHYLSFMEFEITFRPDSGDGVLLYSYDTGSKDFLSINLAGGHVEFRFDCGSGTGVLRSEDPLTLGNWHELRVSRTAKNGILQVDKQKIVEGMAEGGFTQIKCNTDIFIGGVPNYDDVKKNSGVLKPFSGSIQKIILNDRTIHVKHDFTSGVNVENAAHPCVRAPCAHGGSCRPRKEGYDCDCPLGFEGLHCQKECGNYCLNTIIEAIEIPQFIGRSYLTYDNPDILKRVSGSRSNVFMRFKTTAKDGLLLWRGDSPMRPNSDFISLGLRDGALVFSYNLGSGVASIMVNGSFNDGRWHRVKAVRDGQSGKITVDDYGARTGKSPGMMRQLNINGALYVGGMKEIALHTNRQYMRGLVGCISHFTLSTDYHISLVEDAVDGKNINTCGAK

SEQ ID NO: 4599 - protein, 47 aa, Homo sapiens
MDLIRGVLLRLLLLASSLGPGAVSLRAAIRKPGRCWRMTVTKTWTEP

SEQ ID NO: 4600 - protein, 375 aa, Homo sapiens
MEFEITFRPDSGDGVLLYSYDTGSKDFLSINLAGGHVEFRFDCGSGTGVLRSEDPLTLGNWHELRVSRTAKNGILQVDKQKIVEGMAEGGFTQIKCNTDIFIGGVPNYDDVKKNSGVLKPFSGSIQKIILNDRTIHVKHDFTSGVNVENAAHPCVRAPCAHGGSCRPRKEGYDCDCPLGFEGLHCQKAIIEAIEIPQFIGRSYLTYDNPDILKRVSGSRSNVFMRFKTTAKDGLLLWRGDSPMRPNSDFISLGLRDGALVFSYNLGSGVASIMVNGSFNDGRWHRVKAVRDGQSGKITVDDYGARTGKSPGMMRQLNINGALYVGGMKEIALHTNRQYMRGLVGCISHFTLSTDYHISLVEDAVDGKNINTCGAK

SEQ ID NO: 4601 - protein, 775 aa, Homo sapiens
MHPGPEEAGSGRYGPRYITDMGAGEDDEGFEDDLDLDISFEEVKPLPATKGGNKKFLVESKKMSISNPKTISRLIPPTSASLPVTTVAPQPIPIQRKGKNGVAIMSRLFDMPCDETLCSADSFCVNDYTWGGSRCQCTLGKGGESCSEDIVIQYPQFFGHSYVTFEPLKNSYQAFQITLEFRAEAEDGLLLYCGENEHGRGDFMSLAIIRRSLQFRFNCGTGVAIIVSETKIKLGGWHTVMLYRDGLNGLLQLNNGTPVTGQSQGQYSKITFRTPLYLGGAPSAYWLVRATGTNRGFQGCVQSLAVNGRRIDMRPWPLGKALSGADVGECSSGICDEASCIHGGTCTAIKADSYICLCPLGFKGRHCEDAFTLTIPQFRESLRSYAATPWPLEPQHYLSFMEFEITFRPDSGDGVLLYSYDTGSKDFLSINLAGGHVEFRFDCGSGTGVLRSEDPLTLGNWHELRVSRTAKNGILQVDKQKIVEGMAEGGFTQIKCNTDIFIGGVPNYDDVKKNSGVLKPFSGSIQKIILNDRTIHVKHDFTSGVNVENAAHPCVRAPCAHGGSCRPRKEGYDCDCPLGFEGLHCQKAIIEAIEIPQFIGRSYLTYDNPDILKRVSGSRSNVFMRFKTTAKDGLLLWRGDSPMRPNSDFISLGLRDGALVFSYNLGSGVASIMVNGSFNDGRWHRVKAVRDGQSGKITVDDYGARTGKSPGMMRQLNINGALYVGGMKEIALHTNRQYMRGLVGCISHFTLSTDYHISLVEDAVDGKNINTCGAK

SEQ ID NO: 4602 - protein, 112 aa, Homo sapiens
MRFKTTAKDGLLLWRGDSPMRPNSDFISLGLRDGALVFSYNLGSGVASIMVNGSFNDGRWHRVKAVRDGQSGKITVDDYGARTGKSPGMMRQLNINGALYVGGMKEIALHTN

SEQ ID NO: 4603 - protein, 152 aa, Homo sapiens
MRFKTTAKDGLLLWRGDSPMRPNSDFISLGLRDGALVFSYNLGSGVASIMVNGSFNDGRWHRVKAVRDGQSGKITVDDYGARTGKSPGMMRQLNINGALYVGGMKEIALHTNRQYMRGLVGCISHFTLSTDYHISLVEDAVDGKNINTCGAK

SEQ ID NO: 4604 - protein, 152 aa, Homo sapiens; identical to SEQ ID NO: 4603

SEQ ID NO: 4605 - protein, 152 aa, Homo sapiens; identical to SEQ ID NO: 4603

SEQ ID NO: 4606 - protein, 128 aa, Homo sapiens
MFNNCEVVLGNLEITYVQRNYDLSFLKTIQEVAGYVLIALNTVERIPLENLQIIRGNMYYENSYALAVLSNYDANKTGLKELPMRNLQEILHGAVRFSNNPALCNVESIQWRDIVSSDFLSNMSMDFQ

SEQ ID NO: 4607 - protein, 1210 aa, Homo sapiens [sequence omitted]

SEQ ID NO: 4608 - protein, 628 aa, Homo sapiens
MRPSGTAGAALLALLAALCPASRALEEKKVCQGTSNKLTQLGTFEDHFLSLQRMFNNCEVVLGNLEITYVQRNYDLSFLKTIQEVAGYVLIALNTVERIPLENLQIIRGNMYYENSYALAVLSNYDANKTGLKELPMRNLQEILHGAVRFSNNPALCNVESIQWRDIVSSDFLSNMSMDFQNHLGSCQKCDPSCPNGSCWGAGEENCQKLTKIICAQQCSGRCRGKSPSDCCHNQCAAGCTGPRESDCLVCRKFRDEATCKDTCPPLMLYNPTTYQMDVNPEGKYSFGATCVKKCPRNYVVTDHGSCVRACGADSYEMEEDGVRKCKKCEGPCRKVCNGIGIGEFKDSLSINATNIKHFKNCTSISGDLHILPVAFRGDSFTHTPPLDPQELDILKTVKEITGFLLIQAWPENRTDLHAFENLEIIRGRTKQHGQFSLAVVSLNITSLGLRSLKEISDGDVIISGNKNLCYANTINWKKLFGTSGQKTKIISNRGENSCKATGQVCHALCSPEGCWGPEPRDCVSCRNVSRGRECVDKCNLLEGEPREFVENSECIQCHPECLPQAMNITCTGRGPDNCIQCAHYIDGPHCVKTCPAGVMGENNTLVWKYADAGHVCHLCHPNCTYGS

SEQ ID NO: 4609 - protein, 705 aa, Homo sapiens
MRPSGTAGAALLALLAALCPASRALEEKKVCQGTSNKLTQLGTFEDHFLSLQRMFNNCEVVLGNLEITYVQRNYDLSFLKTIQEVAGYVLIALNTVERIPLENLQIIRGNMYYENSYALAVLSNYDANKTGLKELPMRNLQEILHGAVRFSNNPALCNVESIQWRDIVSSDFLSNMSMDFQNHLGSCQKCDPSCPNGSCWGAGEENCQKLTKIICAQQCSGRCRGKSPSDCCHNQCAAGCTGPRESDCLVCRKFRDEATCKDTCPPLMLYNPTTYQMDVNPEGKYSFGATCVKKCPRNYVVTDHGSCVRACGADSYEMEEDGVRKCKKCEGPCRKVCNGIGIGEFKDSLSINATNIKHFKNCTSISGDLHILPVAFRGDSFTHTPPLDPQELDILKTVKEITGFLLIQAWPENRTDLHAFENLEIIRGRTKQHGQFSLAVVSLNITSLGLRSLKEISDGDVIISGNKNLCYANTINWKKLFGTSGQKTKIISNRGENSCKATGQVCHALCSPEGCWGPEPRDCVSCRNVSRGRECVDKCNLLEGEPREFVENSECIQCHPECLPQAMNITCTGRGPDNCIQCAHYIDGPHCVKTCPAGVMGENNTLVWKYADAGHVCHLCHPNCTYGPGNESLKAMLFCLFKLSSCNQSNDGSVSHQSGSPAAQESCLGWIPSLLPSEFQLGWGGCSHLHAWPSASVIITASSCH

SEQ ID NO: 4610 - protein, 405 aa, Homo sapiens
MRPSGTAGAALLALLAALCPASRALEEKKVCQGTSNKLTQLGTFEDHFLSLQRMFNNCEVVLGNLEITYVQRNYDLSFLKTIQEVAGYVLIALNTVERIPLENLQIIRGNMYYENSYALAVLSNYDANKTGLKELPMRNLQEILHGAVRFSNNPALCNVESIQWRDIVSSDFLSNMSMDFQNHLGSCQKCDPSCPNGSCWGAGEENCQKLTKIICAQQCSGRCRGKSPSDCCHNQCAAGCTGPRESDCLVCRKFRDEATCKDTCPPLMLYNPTTYQMDVNPEGKYSFGATCVKKCPRNYVVTDHGSCVRACGADSYEMEEDGVRKCKKCEGPCRKVCNGIGIGEFKDSLSINATNIKHFKNCTSISGDLHILPVAFRGDSFTHTPPLDPQELDILKTVKEITGLS

SEQ ID NO: 4611 - protein, 1091 aa, Homo sapiens
MRPSGTAGAALLALLAALCPASRALEEKKVCQGTSNKLTQLGTFEDHFLSLQRMFNNCEVVLGNLEITYVQRNYDLSFLKTIQEVAGYVLIALNTVERIPLENLQIIRGNMYYENSYALAVLSNYDANKTGLKELPMRNLQGQKCDPSCPNGSCWGAGEENCQKLTKIICAQQCSGRCRGKSPSDCCHNQCAAGCTGPRESDCLVCRKFRDEATCKDTCPPLMLYNPTTYQMDVNPEGKYSFGATCVKKCPRNYVVTDHGSCVRACGADSYEMEEDGVRKCKKCEGPCRKVCNGIGIGEFKDSLSINATNIKHFKNCTSISGDLHILPVAFRGDSFTHTPPLDPQELDILKTVKEITGFLLIQAWPENRTDLHAFENLEIIRGRTKQHGQFSLAVVSLNITSLGLRSLKEISDGDVIISGNKNLCYANTINWKKLFGTSGQKTKIISNRGENSCKATGQVCHALCSPEGCWGPEPRDCVSCRNVSRGRECVDKCNLLEGEPREFVENSECIQCHPECLPQAMNITCTGRGPDNCIQCAHYIDGPHCVKTCPAGVMGENNTLVWKYADAGHVCHLCHPNCTYGCTGPGLEGCPTNGPKIPSIATGMVGALLLLLVVALGIGLFMRRRHIVRKRTLRRLLQERELVEPLTPSGEAPNQALLRILKETEFKKIKVLGSGAFGTVYKGLWIPEGEKVKIPVAIKELREATSPKANKEILDEAYVMASVDNPHVCRLLGICLTSTVQLITQLMPFGCLLDYVREHKDNIGSQYLLNWCVQIAKGMNYLEDRRLVHRDLAARNVLVKTPQHVKITDFGLAKLLGAEEKEYHAEGGKVPIKWMALESILHRIYTHQSDVWSYGVTVWELMTFGSKPYDGIPASEISSILEKGERLPQPPICTIDVYMIMVKCWMIDADSRPKFRELIIEFSKMARDPQRYLVIQGDERMHLPSPTDSNFYRALMDEEDMDDVVDADEYLIPQQGFFSSPSTSRTPLLSSLSATSNNSTVACIDRNGLQSCPIKEDSFLQRYSSDPTGALTEDSIDDTFLPVPGEWLVWKQSCSSTSSTHSAAASLQCPSQVLPPASPEGETVADLQTQ

SEQ ID NO: 4612 - protein, 1165 aa, Homo sapiens
MRPSGTAGAALLALLAALCPASRALEEKKVCQGTSNKLTQLGTFEDHFLSLQRMFNNCEVVLGNLEITYVQRNYDLSFLKTIQEVAGYVLIALNTVERIPLENLQIIRGNMYYENSYALAVLSNYDANKTGLKELPMRNLQGQKCDPSCPNGSCWGAGEENCQKLTKIICAQQCSGRCRGKSPSDCCHNQCAAGCTGPRESDCLVCRKFRDEATCKDTCPPLMLYNPTTYQMDVNPEGKYSFGATCVKKCPRNYVVTDHGSCVRACGADSYEMEEDGVRKCKKCEGPCRKVCNGIGIGEFKDSLSINATNIKHFKNCTSISGDLHILPVAFRGDSFTHTPPLDPQELDILKTVKEITGFLLIQAWPENRTDLHAFENLEIIRGRTKQHGQFSLAVVSLNITSLGLRSLKEISDGDVIISGNKNLCYANTINWKKLFGTSGQKTKIISNRGENSCKATGQVCHALCSPEGCWGPEPRDCVSCRNVSRGRECVDKCNLLEGEPREFVENSECIQCHPECLPQAMNITCTGRGPDNCIQCAHYIDGPHCVKTCPAGVMGENNTLVWKYADAGHVCHLCHPNCTYGCTGPGLEGCPTNGPKIPSIATGMVGALLLLLVVALGIGLFMRRRHIVRKRTLRRLLQERELVEPLTPSGEAPNQALLRILKETEFKKIKVLGSGAFGTVYKGLWIPEGEKVKIPVAIKELREATSPKANKEILDEAYVMASVDNPHVCRLLGICLTSTVQLITQLMPFGCLLDYVREHKDNIGSQYLLNWCVQIAKGMNYLEDRRLVHRDLAARNVLVKTPQHVKITDFGLAKLLGAEEKEYHAEGGKVPIKWMALESILHRIYTHQSDVWSYGVTVWELMTFGSKPYDGIPASEISSILEKGERLPQPPICTIDVYMIMVKCWMIDADSRPKFRELIIEFSKMARDPQRYLVIQGDERMHLPSPTDSNFYRALMDEEDMDDVVDADEYLIPQQGFFSSPSTSRTPLLSSLSATSNNSTVACIDRNGLQSCPIKEDSFLQRYSSDPTGALTEDSIDDTFLPVPEYINQSVPKRPAGSVQNPVYHNQPLNPAPSRDPHYQDPHSTAVGNPEYLNTVQPTCVNSTFDSPAHWAQKGSHQISLDNPDYQQDFFPKEAKPNGIFKGSTAENAEYLRVAPQSSEFIGA

SEQ ID NO: 4613 - protein, 464 aa, Homo sapiens
MSSLTKIICAQQCSGRCRGKSPSDCCHNQCAAGCTGPRESDCLVCRKFRDEATCKDTCPPLMLYNPTTYQMDVNPEGKYSFGATCVKKCPRNYVVTDHGSCVRACGADSYEMEEDGVRKCKKCEGPCRKVCNGIGIGEFKDSLSINATNIKHFKNCTSISGDLHILPVAFRGDSFTHTPPLDPQELDILKTVKEITGFLLIQAWPENRTDLHAFENLEIIRGRTKQHGQFSLAVVSLNITSLGLRSLKEISDGDVIISGNKNLCYANTINWKKLFGTSGQKTKIISNRGENSCKATGQVCHALCSPEGCWGPEPRDCVSCRNVSRGRECVDKCNLLEGEPREFVENSECIQCHPECLPQAMNITCTGRGPDNCIQCAHYIDGPHCVKTCPAGVMGENNTLVWKYADAGHVCHLCHPNCTYGCTGPGLEGCPTNGPKIPSIATGMVGALLLLLVVALGIGLFMRR

SEQ ID NO: 4614 - protein, 77 aa, Homo sapiens
MASVWKRLQRVGKHASKFQFVASYQELMVECTKKWQPDKLVVVWTRRSRRKSSKAHSWQPGIKNPYRGVVVWPVPEN

SEQ ID NO: 4615 - protein, 1231 aa, Homo sapiens
MASVWKRLQRVGKHASKFQFVASYQELMVECTKKWQPDKLVVVWTRRSRRKSSKAHSWQPGIKNPYRGVVVWPVPENIEITVTLFKDPHAEEFEDKEWTFVIENESPSGRRKALATSSINMKQYASPMPTQTDVKLKFKPLSKKVVSAALQFSLSCIFLREGKATDEDMQSLASLMSMKQADIGNLDDFEEDNEDDDENRVNQEEKAAKITEIVNQLNALSSLDEDQDDCIKQANMRSAKSASSSEELINKLNFLDEAEKDLATVNSNPFDDPDAAELNPFGDPDSEEPITETASPRKTEDSFYNNSYNPFKEVQTPQYLNPFDEPEAFVTIKDSPPQSTKRKNIRPVDMSKYLYADSSKTEEEELDESNPFYEPKSTPPPNNLVNPVQELETERRVKRKAPAPPVLSPKTGVLNENTVSAGKDLSTSPKPSPIPSPVLGRKPNASQSLLVWCKEVTKNYRGVKITNFTTSWRNGLSFCAILHHFRPDLIDYKSLNPQDIKENNKKAYDGFASIGISRLLEPSDMVLLAIPDKLTVMTYLYQIRAHFSGQELNVVQIEENSSKSTYKVGNYETDTNSSVDQEKFYAELSDLKREPELQQPISGAVDFLSQDDSVFVNDSGVGESESEHQTPDDHLSPSTASPYCRRTKSDTEPQKSQQSSGRTSGSDDPGICSNTDSTQAQVLLGKKRLLKAETLELSDLYVSDKKKDMSPPFICEETDEQKLQTLDIGSNLEKEKLENSRSLECRSDPESPIKKTSLSPTSKLGYSYSRDLDLAKKKHASLRQTESDPDADRTTLNHADHSSKIVQHRLLSRQEELKERARVLLEQARRDAALKAGNKHNTNTATPFCNRQLSDQQDEERRRQLRERARQLIAEARSGVKMSELPSYGEMAAEKLKERSKASGDENDNIEIDTNEEIPEGFVVGGGDELTNLENDLDTPEQNSKLVDLKLKKLLEVQPQVANSPSSAAQKAVTESSEQDMKSGTEDLRTERLQKTTERFRNPVVFSKDSTVRKTQLQSFSQYIENRPEMKRQRSIQEDTKKGNEEKAAITETQRKPSEDEVLNKGFKDTSQYVVGELAALENEQKQIDTRAALVEKRLRYLMDTGRNTEEEEAMMQEWFMLVNKKNALIRRMNQLSLLEKEHDLERRYELLNRELRAMLAIEDWQKTEAQKRREQLLLDELVALVNKRDALVRDLDAQEKQAEEEDEHLERTLEQNKGKMAKKEEKCVLQ

SEQ ID NO: 4616 - protein, 1160 aa, Homo sapiens
MASVWKRLQRVGKHASKFQFVASYQELMVECTKKWQPDKLVVVWTRRSRRKSSKAHSWQPGIKNPYRGVVVWPVPENIEITVTLFKDPHAEEFEDKEWTFVIENESPSGRRKALATSSINMKQYASPMPTQTDVKLKFKPLSKKVVSAALQFSLSCIFLREGKATDEDMQSLASLMSMKQADIGNLDDFEEDNEDDDENRVNQEEKAAKITELINKLNFLDEAEKDLATVNSNPFDDPDAAELNPFGDPDSEEPITETASPRKTEDSFYNNSYNPFKEVQTPQYLNPFDEPEAFVTIKDSPPQSTKRKNIRPVDMSKYLYADSSKTEEEELDESNPFYEPKSTPPPNNLVNPVQELETERRVKRKAPAPPVLSPKTGVLNENTVSAGKDLSTSPKPSPIPSPVLGRKPNASQSLLVWCKEVTKNYRGVKITNFTTSWRNGLSFCAILHHFRPDLIDYKSLNPQDIKENNKKAYDGFASIGISRLLEPSDMVLLAIPDKLTVMTYLYQIRAHFSGQELNVVQIEENSSKSTYKVGNYETDTNSSVDQEKFYAELSDLKREPELQQPISGAVDFLSQDDSVFVNDSGVGESESEHQTPDDHLSPSTASPYCRRTKSDTEPQKSQQSSGRTSGSDDPGICSNTDSTQAQVLLGKKRLLKAETLELSDLYVSDKKKDMSPPFICEETDEQKLQTLDIGSNLEKEKLENSRSLECRSDPESPIKKTSLSPTSKLGYSYSRDLDLAKKKHASLRQTESDPDADRTTLNHADHSSKIVQHRLLSRQEELKERARVLLEQARRDAALKAGNKHNTNTATPFCNRQLSDQQDEERRRQLRERARQLIAEARSGVKMSELPSYGEMAAEKLKERSKASGEQNSKLVDLKLKKLLEVQPQVANSPSSAAQKAVTESSEQDMKSGTEDLRTERLQKTTERFRNPVVFSKDSTVRKTQLQSFSQYIENRPEMKRQRSIQEDTKKGNEEKAAITETQRKPSEDEVLNKGFKDTSQYVVGELAALENEQKQIDTRAALVEKRLRYLMDTGRNTEEEEAMMQEWFMLVNKKNALIRRMNQLSLLEKEHDLERRYELLNRELRAMLAIEDWQKTEAQKRREQLLLDELVALVNKRDALVRDLDAQEKQAEEEDEHLERTLEQNKGKMAKKEEKCVLQ

SEQ ID NO: 4617 - protein, 310 aa, Homo sapiens
MASVWKRLQRVGKHASKFQFVASYQELMVECTKKWQPDKLVVVWTRRSRRKSSKAHSWQPGIKNPYRGVVVWPVPENIEITVTLFKDPHAEEFEDKEWTFVIENESPSGRRKALATSSINMKQYASPMPTQTDVKLKFKPLSKKVVSAALQFSLSCIFLREGKATDEDMQSLASLMSMKQADIGNLDDFEEDNEDDDENRVNQEEKAAKITELINKLNFLDEAEKDLATVNSNPFDDPDAAELNPFGDPDSEEPITETASPRKTEDSFYNNSYNPFKEVQTPQYLNPFDEPEAFVTIKDSPPQSTKRKNI

SEQ ID NO: 4618 - protein, 1196 aa, Homo sapiens
MASVWKRLQRVGKHASKFQFVASYQELMVECTKKWQPDKLVVVWTRRSRRKSSKAHSWQPGIKNPYRGVVVWPVPENIEITVTLFKDPHAEEFEDKEWTFVIENESPSGRRKALATSSINMKQYASPMPTQTDVKLKFKPLSKKVVSAALQFSLSCIFLREGKATDEDMQSLASLMSMKQADIGNLDDFEEDNEDDDENRVNQEEKAAKITELINKLNFLDEAEKDLATVNSNPFDDPDAAELNPFGDPDSEEPITETASPRKTEDSFYNNSYNPFKEVQTPQYLNPFDEPEAFVTIKDSPPQSTKRKNIRPVDMSKYLYADSSKTEEEELDESNPFYEPKSTPPPNNLVNPVQELETERRVKRKAPAPPVLSPKTGVLNENTVSAGKDLSTSPKPSPIPSPVLGRKPNASQSLLVWCKEVTKNYRGVKITNFTTSWRNGLSFCAILHHFRPDLIDYKSLNPQDIKENNKKAYDGFASIGISRLLEPSDMVLLAIPDKLTVMTYLYQIRAHFSGQELNVVQIEENSSKSTYKVGNYETDTNSSVDQEKFYAELSDLKREPELQQPISGAVDFLSQDDSVFVNDSGVGESESEHQTPDDHLSPSTASPYCRRTKSDTEPQKSQQSSGRTSGSDDPGICSNTDSTQAQVLLGKKRLLKAETLELSDLYVSDKKKDMSPPFICEETDEQKLQTLDIGSNLEKEKLENSRSLECRSDPESPIKKTSLSPTSKLGYSYSRDLDLAKKKHASLRQTESDPDADRTTLNHADHSSKIVQHRLLSRQEELKERARVLLEQARRDAALKAGNKHNTNTATPFCNRQLSDQQDEERRRQLRERARQLIAEARSGVKMSELPSYGEMAAEKLKERSKASGDENDNIEIDTNEEIPEGFVVGGGDELTNLENDLDTPEQNSKLVDLKLKKLLEVQPQVANSPSSAAQKAVTESSEQDMKSGTEDLRTERLQKTTERFRNPVVFSKDSTVRKTQLQSFSQYIENRPEMKRQRSIQEDTKKGNEEKAAITETQRKPSEDEVLNKGFKDTSQYVVGELAALENEQKQIDTRAALVEKRLRYLMDTGRNTEEEEAMMQEWFMLVNKKNALIRRMNQLSLLEKEHDLERRYELLNRELRAMLAIEDWQKTEAQKRREQLLLDELVALVNKRDALVRDLDAQEKQAEEEDEHLERTLEQNKGKMAKKEEKCVLQ

SEQ ID NO: 4619 - protein, 1160 aa, Homo sapiens; identical to SEQ ID NO: 4616

SEQ ID NO: 4620 - protein, 41 aa, Homo sapiens
MKQYASPMPTQTDVKLKFKPLSKKVVSAALQFSLSCIFLRE

SEQ ID NO: 4621 - protein, 95 aa, Homo sapiens
MKQYASPMPTQTDVKLKFKPLSKKVVSAALQFSLSCIFLREGKATDEDMQSLASLMSMKQADIGNLDDFEEDNEDDDENRVNQEEKAAKITEIVN

SEQ ID NO: 4622 - protein, 108 aa, Homo sapiens
MNWQPDKLVVVWTRRSRRKSSKAHSWQPGIKNPYRGVVVWPVPENIEITVTLFKDPHAEEFEDKEWTFVIENESPSGRRKALATSSINMKQYASPMPTQTDVKLKFKP

SEQ ID NO: 4623 - protein, 110 aa, Homo sapiens
  SITE 1: note = misc_feature - Xaa can be any naturally occurring amino acid
XLEKEKLENSRSLECRSDPESPIKKTSLSPTSKLGYSYSRDLDLAKKKHASLRQTESDPDADRTTLNHADHSSKIVQQQDEERRRQLRERARQLIAEARSGVKMSELPSY

SEQ ID NO: 4624 - protein, 223 aa, Homo sapiens
  SITE 1: note = misc_feature - Xaa can be any naturally occurring amino acid
XNTNTATPFCNRQLSDQDEERRRQLRERARQLIAEARSGVKMSELPSYGEMAAEKLKERSKASGDENDNIEIDTNEEIPEGFVVGGGDELTNLENDLDTPEQNSKLVDLKLKKLLEVQPQVANSPSSAAQKAVTESSEQDMKSGTEDLRTERLQKTTERFRNPVVFSKDSTVRKTQLQSFSQYIENRPEMKRQRSIQEDTKKGNEEKAAITETQRKPSEDEVL

SEQ ID NO: 4625 - protein, 154 aa, Homo sapiens
  SITE 1: note = misc_feature - Xaa can be any naturally occurring amino acid
XRLLEPSDMTESDPDADRTTLNHADHSSKIVQHRLLSRQEELKERARVLLEQARRDAALKAGNKHNTNTATPFCNRQLSDQQDEERRRQLRERARQLIAEARSGVKMSELPSYGEMAAEKLKERSKASGDENDNIEIDTNEEIPEGFVVGGGDE

SEQ ID NO: 4626 - protein, 322 aa, Homo sapiens
MGLPERRGLVLLLSLAEILFKIMILEGGGVMNLNPGNNLLHQPPAWTDSYSTCNVSSGFFGGQWHEIHPQYWTKYQVWEWLQHLLDTNQLDANCIPFQEFDINGEHLCSMSLQEFTRAAGTAGQLLYSNLQHLKWNGQCSSDLFQSTHNVIVKTEQTEPSIMNTWKDENYLYDTNYGSTVDLLDSKTFCRAQISMTTTSHLPVAESPDMKKEQDPPAKCHTKKHNPRGTHLWEFIRDILLNPDKNPGLIKWEDRSEGVFRFLKSEAVAQLWGKKKNNSSMTYEKLSRAMRYYYKREILERVDGRRLVYKFGKNARGWRENEN

SEQ ID NO: 4627 - protein, 126 aa, Homo sapiens
MILEGGGVMNLNPGNNLLHQPPAWTDSYSTCNVSSGFFGGQWHEIHPQYWTKYQVWEWLQHLLDTNQLDANCIPFQEFDINGEHLCSMSLQEFTRAAGTAGQLLYSNLQHLKWNGDSLFLCLSLPC

SEQ ID NO: 4628 - protein, 126 aa, Homo sapiens; identical to SEQ ID NO: 4627

SEQ ID NO: 4629 - protein, 158 aa, Homo sapiens
MILEGGGVMNLNPGNNLLHQPPAWTDSYSTCNVSSGFFGGQWHEIHPQYWTKYQVWEWLQHLLDTNQLDANCIPFQEFDINGEHLCSMSLQEFTRAAGTAGQLLYSNLQHLKWNGQCSSDLFQSTHNVIVKTEQTEPSIMNTWKDENYLYDTNYGSTV

SEQ ID NO: 4630 - protein, 166 aa, Homo sapiens
MILEGGGVMNLNPGNNLLHQPPAWTDSYSTCNVSSGFFGGQWHEIHPQYWTKYQVWEWLQHLLDTNQLDANCIPFQEFDINGEHLCSMSLQEFTRAAGTAGQLLYSNLQHLKWNGQCSSDLFQSTHNVIVKTEQTEPSIMNTWKDENYLYDTNYGSTVAESPDMKK

SEQ ID NO: 4631 - protein, 277 aa, Homo sapiens
MILEGGGVMNLNPGNNLLHQPPAWTDSYSTCNVSSGFFGGQWHEIHPQYWTKYQVWEWLQHLLDTNQLDANCIPFQEFDINGEHLCSMSLQEFTRAAGTAGQLLYSNLQHLKWNGQCSSDLFQSTHNVIVKTEQTEPSIMNTWKDENYLYDTNYGSTVAESPDMKKEQDPPAKCHTKKHNPRGTHLWEFIRDILLNPDKNPGLIKWEDRSEGVFRFLKSEAVAQLWGKKKNNSSMTYEKLSRAMRYYYKREILERVDGRRLVYKFGKNARGWRENEN

SEQ ID NO: 4632 - protein, 173 aa, Homo sapiens
MILEGGGVMNLNPGNNLLHQPPAWTDSYSTCNVSSGFFGGQWHEIHPQYWTKYQVWEWLQHLLDTNQLDANCIPFQEFDINGEHLCSMSLQEFTRAAGTAGQLLYSNLQHLKWNGQCSSDLFQSTHNVIVKTEQTEPSIMNTWKDENYLYDTNYGSTVDLLDSKTFCRAQISM

SEQ ID NO: 4633 - protein, 300 aa, Homo sapiens
MILEGGGVMNLNPGNNLLHQPPAWTDSYSTCNVSSGFFGGQWHEIHPQYWTKYQVWEWLQHLLDTNQLDANCIPFQEFDINGEHLCSMSLQEFTRAAGTAGQLLYSNLQHLKWNGQCSSDLFQSTHNVIVKTEQTEPSIMNTWKDENYLYDTNYGSTVDLLDSKTFCRAQISMTTTSHLPVAESPDMKKEQDPPAKCHTKKHNPRGTHLWEFIRDILLNPDKNPGLIKWEDRSEGVFRFLKSEAVAQLWGKKKNNSSMTYEKLSRAMRYYYKREILERVDGRRLVYKFGKNARGWRENEN

SEQ ID NO: 4634 - protein, 300 aa, Homo sapiens; identical to SEQ ID NO: 4633

SEQ ID NO: 4635 - protein, 300 aa, Homo sapiens; identical to SEQ ID NO: 4633

SEQ ID NO: 4636 - protein, 370 aa, Homo sapiens
GLGRPTPGLSQGPGKETLESALIALDSEKPKKLRFHPKQLYFSARQGELQKVLLMLVDGIDPNFKMEHQNKRSPLHAAAEAGHVDICHMLVQAGANIDTCSEDQRTPLMEAAENNHLEAVKYLIKAGALVDPKDAEGSTCLHLAAKKGHYEVVQYLLSNGQMDVNCQDDGGWTPMIWATEYKHVDLVKLLLSKGSDINIRDNEENICLHWAAFSGCVDIAEILLAAKCDLHAVNIHGDSPLHIAARENRYDCVVLFLSRDSDVTLKNKEGETPLQCASLNSQVWSALQMSKALQDSAPDRPSPVERIVSRDIARGYERIPIPCVNAVDSEPCPSNYKYVSQNCVTSPMNIDRNITHLQALDMFLPAQPSP

SEQ ID NO: 4637 - protein, 1298 aa, Homo sapiens
MAAADAEAVPARGEPQQDCCVKTELLGEETPMAADEGSAEKQAGEAHMAADGETNGSCENSDASSHANAAKHTQDSARVNPQDGTNTLTRIAENGVSERDSEAAKQNHVTADDFVQTSVIGSNGYILNKPALQAQPLRTTSTLASSLPGHAAKTLPGGAGKGRTPSAFPQTPAAPPATLGEGSADTEDRKLPAPGADVKVHRARKTMPKSVVGLHAASKDPREVREARDHKEPKEEINKNISDFGRQQLLPPFPSLHQSLPQNQCYMATTKSQTACLPFVLAAAVSRKKKRRMGTYSLVPKKKTKVLKQRTVIEMFKSITHSTVGSKGEKDLGASSLHVNGESLEMDSDEDDSEELEEDDGHGAEQAAAFPTEDSRTSKESMSEADRAQKMDGESEEEQESVDTGEEEEGGDESDLSSESSIKKKFLKRKGKTDSPWIKPARKRRRRSRKKPSGALGSESYKSSAGSAEQTAPGDSTGYMEVSLDSLDLRVKGILSSQAEGLANGPDVLETDGLQEVPLCSCRMETPKSREITTLANNQCMATESVDHELGRCTNSVVKYELMRPSNKAPLLVLCEDHRGRMVKHQCCPGCGYFCTAGNFMECQPESSISHRFHKDCASRVNNASYCPHCGEESSKAKEVTIAKADTTSTVTPVPGQEKGSALEGRADTTTGSAAGPPLSEDDKLQGAASHVPEGFDPTGPAGLGRPTPGLSQGPGKETLESALIALDSEKPKKLRFHPKQLYFSARQGELQKVLLMLVDGIDPNFKMEHQNKRSPLHAAAEAGHVDICHMLVQAGANIDTCSEDQRTPLMEAAENNHLEAVKYLIKAGALVDPKDAEGSTCLHLAAKKGHYEVVQYLLSNGQMDVNCQDDGGWTPMIWATEYKHVDLVKLLLSKGSDINIRDNEENICLHWAAFSGCVDIAEILLAAKCDLHAVNIHGDSPLHIAARENRYDCVVLFLSRDSDVTLKNKEGETPLQCASLNSQVWSALQMSKALQDSAPDRPSPVERIVSRDIARGYERIPIPCVNAVDSEPCPSNYKYVSQNCVTSPMNIDRNITHLQYCVCIDDCSSSNCMCGQLSMRCWYDKDGRLLPEFNMAEPPLIFECNHACSCWRNCRNRVVQNGLRARLQLYRTRDMGWGVRSLQDIPPGTFVCEYVGELISDSEADVREEDSYLFDLDNKDGEVYCIDARFYGNVSRFINHHCEPNLVPVRVFMAHQDLRFPRIAFFSTRLIEAGEQLGFDYGERFWDIKGKLFSCRCGSPKCRHSSAALAQRQASAAQEAQEDGLPDTSSAAAADPL

SEQ ID NO: 4638 - protein, 808 aa, Homo sapiens
MAAADAEAVPARGEPQQDCCVKTELLGEETPMAADEGSAEKQAGEAHMAADGETNGSCENSDASSHANAAKHTQDSARVNPQDGTNTLTRIAENGVSERDSEAAKQNHVTADDFVQTSVIGSNGYILNKPALQAQPLRTTSTLASSLPGHAAKTLPGGAGKGRTPSAFPQTPAAPPATLGEGSADTEDRKLPAPGADVKVHRARKTMPKSVVGLHAASKDPREVREARDHKEPKEEINKNISDFGRQQLLPPFPSLHQSLPQNQCYMATTKSQTACLPFVLAAAVSRKKKRRMGTYSLVPKKKTKVLKQRTVIEMFKSITHSTVGSKGEKDLGASSLHVNGESLEMDSDEDDSEELEEDDGHGAEQAAAFPTEDSRTSKESMSEADRAQKMDGESEEEQESVDTGEEEEGGDESDLSSESSIKKKFLKRKGKTDSPWIKPARKRRRRSRKKPSGALGSESYKSSAGSAEQTAPGDSTGYMEVSLDSLDLRVKGILSSQAEGLANGPDVLETDGLQEVPLCSCRMETPKSREITTLANNQCMATESVDHELGRCTNSVVKYELMRPSNKAPLLVLCEDHRGRMVKHQCCPGCGYFCTAGNFMECQPESSISHRFHKDCASRVNNASYCPHCGEESSKAKEVTIAKADTTSTVTPVPGQEKGSALEGRADTTTGSAAGPPLSEDDKLQGAASHVPEGFDPTGPAGLGRPTPGLSQGPGKETLESALIALDSEKPKKLRFHPKQLYFSARQGELQKVLLMLVDGIDPNFKMEHQNKRSPLHAAAEAGHVDICHMLVQFCRLGSPRSRGCLW

SEQ ID NO: 4639 - protein, 556 aa, Homo sapiens
MAAADAEAVPARGEPQQDCCVKTELLGEETPMAADEGSAEKQAGEAHMAADGETNGSCENSDASSHANAAKHTQDSARVNPQDGTNTLTRIAENGVSERDSEAAKQNHVTADDFVQTSVIGSNGYILNKPALQAQPLRTTSTLASSLPGHAAKTLPGGAGKGRTPSAFPQTPAAPPATLGEGSADTEDRKLPAPGADVKVHRARKTMPKSVVGLHAASKDPREVREARDHKEPKEEINKNISDFGRQQLLPPFPSLHQSLPQNQCYMATTKSQTACLPFVLAAAVSRKKKRRMGTYSLVPKKKTKVLKQRTVIEMFKSITHSTVGSKGEKDLGASSLHVNGESLEMDSDEDDSEELEEDDGHGAEQAAAFPTEDSRTSKESMSEADRAQKMDGESEEEQESVDTGEEEEGGDESDLSSESSIKKKFLKRKGKTDSPWIKPARKRRRRSRKKPSGALGSESYKSSAGSAEQTAPGDSTGYMEVSLDSLDLRVKGILSSQAEGLANGPDVLETDGLQEVPLCSCRMETPKSREITTLANNQCMATESVDHEVSTFVFI

SEQ ID NO: 4640 - protein, 66 aa, Homo sapiens
MAAADAERHLWLPMKAQQRNRQERPTWLRTVRPMGLVKTAMPAVMQMLQSTLRTAQGSTPRMAPTH

SEQ ID NO: 4641 - protein, 106 aa, Homo sapiens
MAADEGSAEKQAGEAHMAADGETNGSCENSDASSHANAAKHTQDSARVNPQDGTNTLTRIAENGVSERDSEAAKQNHVTADDFVQTSVIGSNGYILNKPALQAQPL

SEQ ID NO: 4642 - protein, 134 aa, Homo sapiens
MAADEGSAEKQAGEAHMAADGETNGSCENSDASSHANAAKHTQDSARVNPQDGTNTLTRIAENGVSERDSEAAKQNHVTADDFVQTSVIGSNGYILNKPALQAQPLRTTSTLASSLPGHAAKTLPGGAGKGRTP

SEQ ID NO: 4643 - protein, 137 aa, Homo sapiens
MAADEGSAEKQAGEAHMAADGETNGSCENSDASSHANAAKHTQDSARVNPQDGTNTLTRIAENGVSERDSEAAKQNHVTADDFVQTSVIGSNGYILNKPALQAQPLRTTSTLASSLPGHAAKTLPGGAGKGRTPSAF

SEQ ID NO: 4644 - protein, 139 aa, Homo sapiens
MAADEGSAEKQAGEAHMAADGETNGSCENSDASSHANAAKHTQDSARVNPQDGTNTLTRIAENGVSERDSEAAKQNHVTADDFVQTSVIGSNGYILNKPALQAQPLRTTSTLASSLPGHAAKTLPGGAGKGRTPSAFPQ

SEQ ID NO: 4645 - protein, 982 aa, Homo sapiens
MAADEGSAEKQAGEAHMAADGETNGSCENSDASSHANAAKHTQDSARVNPQDGTNTLTRIAENGVSERDSEAAKQNHVTADDFVQTSVIGSNGYILNKPALQAQPLRTTSTLASSLPGHAAKTLPGGAGKGRTPSAFPQTPAAPPATLGEGSADTEDRKLPAPGADVKVHRARKTMPKSVVGLHAASKDPREVREARDHKEPKEEINKNISDFGRQQLLPPFPSLHQSLPQNQCYMATTKSQTAAAVSRKKKRRMGTYSLVPKKKTKVLKQRTVIEMFKSITHSTVGSKGEKDLGASSLHVNGESLEMDSDEDDSEELEEDDGHGAEQAAAFPTEDSRTSKESMSEADRAQKMDGESEEEQESVDTGEEEEGGDESDLSSESSIKKKFLKRKGKTDSPWIKPARKRRRRSRKKPSGALGSESYKSSAGSAEQTAPGDSTGYMEVSLDSLDLRVKGILSSQAEGLANGPDVLETDGLQEVPLCSCRMETPKSREITTLANNQCMATESVDHELGRCTNSVVKYELMRPSNKAPLLVLCEDHRGRMVKHQCCPGCGYFCTAGNFMECQPESSISHRFHKDCASRVNNASYCPHCGEESSKAKEVTIAKADTTSTVTPVPGQEKGSALEGRADTTTGSAAGPPLSEDDKLQGAASHVPEGFDPTGPAGLGRPTPGLSQGPGKETLESALIALDSEKPKKLRFHPKQLYFSARQGELQKVLLMLVDGIDPNFKMEHQNKRSPLHAAAEAGHVDICHMLVQAGANIDTCSEDQRTPLMEAAENNHLEAVKYLIKAGALVDPKDAEGSTCLHLAAKKGHYEVVQYLLSNGQMDVNCQDDGGWTPMIWATEYKHVDLVKLLLSKGSDINIRDNEENICLHWAAFSGCVDIAEILLAAKCDLHAVNIHGDSPLHIAARENRYDCVVLFLSRDSDVTLKNKEGETPLQCASLNSQVWSALQMSKALQDSAPDRPSPVERIVSRDIARGYER

SEQ ID NO: 4646 - protein, 1267 aa, Homo sapiens
MAADEGSAEKQAGEAHMAADGETNGSCENSDASSHANAAKHTQDSARVNPQDGTNTLTRIAENGVSERDSEAAKQNHVTADDFVQTSVIGSNGYILNKPALQAQPLRTTSTLASSLPGHAAKTLPGGAGKGRTPSAFPQTPAAPPATLGEGSADTEDRKLPAPGADVKVHRARKTMPKSVVGLHAASKDPREVREARDHKEPKEEINKNISDFGRQQLLPPFPSLHQSLPQNQCYMATTKSQTACLPFVLAAAVSRKKKRRMGTYSLVPKKKTKVLKQRTVIEMFKSITHSTVGSKGEKDLGASSLHVNGESLEMDSDEDDSEELEEDDGHGAEQAAAFPTEDSRTSKESMSEADRAQKMDGESEEEQESVDTGEEEEGGDESDLSSESSIKKKFLKRKGKTDSPWIKPARKRRRRSRKKPSGALGSESYKSSAGSAEQTAPGDSTGYMEVSLDSLDLRVKGILSSQAEGLANGPDVLETDGLQEVPLCSCRMETPKSREITTLANNQCMATESVDHELGRCTNSVVKYELMRPSNKAPLLVLCEDHRGRMVKHQCCPGCGYFCTAGNFMECQPESSISHRFHKDCASRVNNASYCPHCGEESSKAKEVTIAKADTTSTVTPVPGQEKGSALEGRADTTTGSAAGPPLSEDDKLQGAASHVPEGFDPTGPAGLGRPTPGLSQGPGKETLESALIALDSEKPKKLRFHPKQLYFSARQGELQKVLLMLVDGIDPNFKMEHQNKRSPLHAAAEAGHVDICHMLVQAGANIDTCSEDQRTPLMEAAENNHLEAVKYLIKAGALVDPKDAEGSTCLHLAAKKGHYEVVQYLLSNGQMDVNCQDDGGWTPMIWATEYKHVDLVKLLLSKGSDINIRDNEENICLHWAAFSGCVDIAEILLAAKCDLHAVNIHGDSPLHIAARENRYDCVVLFLSRDSDVTLKNKEGETPLQCASLNSQVWSALQMSKALQDSAPDRPSPVERIVSRDIARGYERIPIPCVNAVDSEPCPSNYKYVSQNCVTSPMNIDRNITHLQYCVCIDDCSSSNCMCGQLSMRCWYDKDGRLLPEFNMAEPPLIFECNHACSCWRNCRNRVVQNGLRARLQLYRTRDMGWGVRSLQDIPPGTFVCEYVGELISDSEADVREEDSYLFDLDNKDGEVYCIDARFYGNVSRFINHHCEPNLVPVRVFMAHQDLRFPRIAFFSTRLIEAGEQLGFDYGERFWDIKGKLFSCRCGSPKCRHSSAALAQRQASAAQEAQEDGLPDTSSAAAADPL

SEQ ID NO: 4647 - protein, 117 aa, Homo sapiens
MEAAENNHLEAVKYLIKAGALVDPKDAEGSTCLHLAAKKGHYEVVQYLLSNGQMDVNCQDDGGWTPMIWATEYKHVDLVKLLLSKGSDINIRDNDDGTMKRGALSRQKEEKREAEEP

SEQ ID NO: 4648 - protein, 107 aa, Homo sapiens
MEAAENNHLEAVKYLIKAGALVDPKDAEGSTCLHLAAKKGHYEVVQYLLSNGQMDVNCQDDGGWTPMIWATEYKHVDLVKLLLSKGSDINIRDNRVPEARNGKSSHK

SEQ ID NO: 4649 - protein, 394 aa, Homo sapiens
MGFAAAAVSRKKKRRMGTYSLVPKKKTKVLKQRTVIEMFKSITHSTVGSKGEKDLGASSLHVNGESLEMDSDEDDSEELEEDDGHGAEQAAAFPTEDSRTSKESMSEADRAQKMDGESEEEQESVDTGEEEEGGDESDLSSESSIKKKFLKRKGKTDSPWIKPARKRRRRSRKKPSGALGSESYKSSAGSAEQTAPGDSTGYMEVSLDSLDLRVKGILSSQAEGLANGPDVLETDGLQEVPLCSCRMETPKSREITTLANNQCMATESVDHELGRCTNSVVKYELMRPSNKAPLLVLCEDHRGRMVKHQCCPGCGYFCTAGNFMECQPESSISHRFHKDCASRVNNASYCPHCGEESSKAKEVTIAKADTTSTVTPVPGQEKGSALEGRADTTT

SEQ ID NO: 4650 - protein, 126 aa, Homo sapiens
MGTYSLVPKKKTKVLKQRTVIEMFKSITHSTVGSKGEKDLGASSLHVNGESLEMDSDEDDSEELEEDDGHGAEQAAAFPTEDSRTSKESMSEADRAQKKHEEENTASSPHCPGGSGTLKQSLQELP

SEQ ID NO: 4651 - protein, 126 aa, Homo sapiens; identical to SEQ ID NO: 4650

SEQ ID NO: 4652 - protein, 268 aa, Homo sapiens
MLYFSRSHFPRPCGGQVSAGSGLTLLLLLLPALWRGWLEGDGQQAVPARGEPQQDCCVKTELLGEETPMAADEGSAEKQAGEAHMAADGETNGSCENSDASSHANAAKHTQDSARVNPQDGTNTLTRIAENGVSERDSEAAKQNHVTADDFVQTSVIGSNGYILNKPALQAQPLRTTSTLASSLPGHAAKTLPGGAGKGRTPSAFPQTPAAPPATLGEGSADTEDRKLPAPGADVKVHRARKTMPKSVVGLHAASKDPREVREARDHK

SEQ ID NO: 4653 - protein, 803 aa, Homo sapiens
MSEADRAQKMDGESEEEQESVDTGEEEEGGDESDLSSESSIKKKFLKRKGKTDSPWIKPARKRRRRSRKKPSGALGSESYKSSAGSAEQTAPGDSTGYMEVSLDSLDLRVKGILSSQAEGLANGPDVLETDGLQEVPLCSCRMETPKSREITTLANNQCMATESVDHELGRCTNSVVKYELMRPSNKAPLLVLCEDHRGRMVKHQCCPGCGYFCTAGNFMECQPESSISHRFHKDCASRVNNASYCPHCGEESSKAKEVTIAKADTTSTVTPVPGQEKGSALEGRADTTTGSAAGPPLSEDDKLQGAASHVPEGFDPTGPAGLGRPTPGLSQGPGKETLESALIALDSEKPKKLRFHPKQLYFSARQGELQKVLLMLVDGIDPNFKMEHQNKRSPLHAAAEAGHVDICHMLVQAGANIDTCSEDQRTPLMEAAENNHLEAVKYLIKAGALVDPKDAEGSTCLHLAAKKGHYEVVQYLLSNGQMDVNCQDDGGWTPMIWATEYKHVDLVKLLLSKGSDINIRDNEENICLHWAAFSGCVDIAEILLAAKCDLHAVNIHGDSPLHIAARENRYDCVVLFLSRDSDVTLKNKEGETPLQCASLNSQVWSALQMSKALQDSAPDRPSPVERIVSRDIARGYERIPIPCVNAVDSEPCPSNYKYVSQNCVTSPMNIDRNITHLQYCVCIDDCSSSNCMCGQLSMRCWYDKDGRLLPEFNMAEPPLIFECNHACSCWRNCRNRVVQNGLRARLQLYRTRDMGWGVRSLQDIPPGTFVCEYVGELISDSEADVREEDSYLFDLDNKISSA

SEQ ID NO: 4654 - protein, 153 aa, Homo sapiens
SPLHAAAEAGHVDICHMLVQAGANIDTCSEDQRTPLMEAAENNHLEAVKYLIKAGALVDPKDAEGSTCLHLAAKKGHYEVVQYLLSNGQMDVNCQDDGGWTPMIWATEYKHVDLVKLLLSKGSDINIRDNDDGTMKRGALSRQKEEKREAEEP

SEQ ID NO: 4655 - protein, 277 aa, Homo sapiens
VPARGEPQQDCCVKTELLGEETPMAADEGSAEKQAGEAHMAADGETNGSCENSDASSHANAAKHTQDSARVNPQDGTNTLTRIAENGVSERDSEAAKQNHVTADDFVQTSVIGSNGYILNKPALQAQPLRTTSTLASSLPGHAAKTLPGGAGKGRTPSAFPQTPAAPPATLGEGSADTEDRKLPAPGADVKVHRARKTMPKSVVGLHAASKDPREVREARDHKEPKEEINKNISDFGRQQLLPPFPSLHQSLPQNQCYMATTKSQTGKEDPATVSAL

SEQ ID NO: 4656 - protein, 168 aa, Homo sapiens
WIKPARKRRRRSRKKPSGALGSESYKSSAGSAEQTAPGDSTGYMEVSLDSLDLRVKGILSSQAEGLANGPDVLETDGLQEVPLCSCRMETPKSREITTLANNQCMATESVDHEGNFMECQPESSISHRFHKDCASRVNNASYCPHCGEESSKAKEVTIAKADTTSTVT

SEQ ID NO: 4657 - protein, 543 aa, Homo sapiens
  SITE 1: note = misc_feature - Xaa can be any naturally occurring amino acid
XCVKTELLGEETPMAADEGSAEKQAGEAHMAADGETNGSCENSDASSHANAAKHTQDSARVNPQDGTNTLTRIAENGVSERDSEAAKQNHVTADDFVQTSVIGSNGYILNKPALQAQPLRTTSTLASSLPGHAAKTLPGGAGKGRTPSAFPQTPAAPPATLGEGSADTEDRKLPAPGADVKVHRARKTMPKSVVGLHAASKDPREVREARDHKEPKEEINKNISDFGRQQLLPPFPSLHQSLPQNQCYMATTKSQTACLPFVLAAAVSRKKKRRMGTYSLVPKKKTKVLKQRTVIEMFKSITHSTVGSKGEKDLGASSLHVNGESLEMDSDEDDSEELEEDDGHGAEQAAAFPTEDSRTSKESMSEADRAQKMDGESEEEQESVDTGEEEEGGDESDLSSESSIKKKFLKRKGKTDSPWIKPARKRRRRSRKKPSGALGSESYKSSAGSAEQTAPGDSTGYMEVSLDSLDLRVKGILSSQAEGLANGPDVLETDGLQEVPLCSCRMETPKSREITTLANNQCMATESVDHEVLNRIQWSQIPV

SEQ ID NO: 4658 - protein, 433 aa, Homo sapiens
  SITE 1: note = misc_feature - Xaa can be any naturally occurring amino acid
XGEETPMAADEGSAEKQAGEAHMAADGETNGSCENSDASSHANAAKHTQDSARVNPQDGTNTLTRIAENGVSERDSEAAKQNHVTADDFVQTSVIGSNGYILNKPALQAQPLRTTSTLASSLPGHAAKTLPGGAGKGRTPSAFPQTPAAPPATLGEGSADTEDRKLPAPGADVKVHRARKTMPKSVVGLHAASKDPREVREARDHKEPKEEINKNISDFGRQQLLPPFPSLHQSLPQNQCYMATTKSQTAAAVSRKKKRRMGTYSLVPKKKTKVLKQRTVIEMFKSITHSTVGSKGEKDLGASSLHVNGESLEMDSDEDDSEELEEDDGHGAEQAAAFPTEDSRTSKESMSEADRAQKMDGESEEEQESVDTGEEEEGGDESDLSSESSIKKKFLKRKGKTDSPWIKPARKRRRRSRKKPSGALGSESYKSSA

SEQ ID NO: 4659 - protein, 112 aa, Homo sapiens
  SITE 1: note = misc_feature - Xaa can be any naturally occurring amino acid
XPALQAQPLRTTSTLASSLPGHAAKTLPGGAGKGRTPSAFPQTPAAPPATLGEGSADTEDRKLPAPGADVKVHRARKTMPKSVVGLVILCLLLLFPFSHLFCFNNGKWTLVH

SEQ ID NO: 4660 - protein, 230 aa, Homo sapiens
  SITE 1: note = misc_feature - Xaa can be any naturally occurring amino acid
XPFVLAAAVSRKKKRRMGTYSLVPKKKTKVLKQRTVIEMFKSITHSTVGSKGEKDLGASSLHVNGESLEMDSDEDDSEELEEDDGHGAEQAAAFPTEDSRTSKESMSEADRAQKSSESSIKKKFLKRKGKTDSPWIKPARKRRRRSRKKPSGALGSESYKSSAGSAEQTAPGDSTGYMEVSLDSLDLRVKGILSSQAEGLANGPDVLETDGLQEVPLCSCRMETPKSREI

SEQ ID NO: 4661 - protein, 108 aa, Homo sapiens
  SITE 1: note = misc_feature - Xaa can be any naturally occurring amino acid
XPLMEAAENNHLEAVKYLIKAGALVDPKDAEGSTCLHLAAKKGHYEVVQYLLSNGQMDVNCQDDGGWTPMIWATEYKHVDLVKLLLSKGSDINIRDNVGCIYSKYTLG

SEQ ID NO: 4662 - protein, 1176 aa, Homo sapiens
MAAAAGAAAAAAAEGEAPAEMGALLLEKETRGATERVHGSLGDTPRSEETLPKATPDSLEPAGPSSPASVTVTVGDEGADTPVGATPLIGDESENLEGDGDLRGGRILLGHATKSFPSSPSKGGSCPSRAKMSMTGAGKSPPSVQSLAMRLLSMPGAQGAAAAGSEPPPATTSPEGQPKVHRARKTMSKPGNGQPPVPEKRPPEIQHFRMSDDVHSLGKVTSDLAKRRKLNSGGGLSEELGSARRSGEVTLTKGDPGSLEEWETVVGDDFSLYYDSYSVDERVDSDSKSEVEALTEQLSEEEEEEEEEEEEEEEEEEEEEEEEDEESGNQSDRSGSSGRRKAKKKWRKDSPWVKPSRKRRKREPPRAKEPRGVSNDTSSLETERGFEELPLCSCRMEAPKIDRISERAGHKCMATESVDGELSGCNAAILKRETMRPSSRVALMVLCETHRARMVKHHCCPGCGYFCTAGTFLECHPDFRVAHRFHKACVSQLNGMVFCPHCGEDASEAQEVTIPRGDGVTPPAGTAAPAPPPLSQDVPGRADTSQPSARMRGHGEPRRPPCDPLADTIDSSGPSLTLPNGGCLSAVGLPLGPGREALEKALVIQESERRKKLRFHPRQLYLSVKQGELQKVILMLLDNLDPNFQSDQQSKRTPLHAAAQKGSVEICHVLLQAGANINAVDKQQRTPLMEAVVNNHLEVARYMVQRGGCVYSKEEDGSTCLHHAAKIGNLEMVSLLLSTGQVDVNAQDSGGWTPIIWAAEHKHIEVIRMLLTRGADVTLTDNEENICLHWASFTGSAAIAEVLLNARCDLHAVNYHGDTPLHIAARESYHDCVLLFLSRGANPELRNKEGDTAWDLTPERSDVWFALQLNRKLRLGVGNRAIRTEKIICRDVARGYENVPIPCVNGVDGEPCPEDYKYISENCETSTMNIDRNITHLQHCTCVDDCSSSNCLCGQLSIRCWYDKDGRLLQEFNKIEPPLIFECNQACSCWRNCKNRVVQSGIKVRLQLYRTAKMGWGVRALQTIPQGTFICEYVGELISDAEADVREDDSYLFDLDNKDGEVYCIDARYYGNISRFINHLCDPNIIPVRVFMLHQDLRFPRIAFFSSRDIRTGEELGFDYGDRFWDIKSKYFTCQCGSEKCKHSAEAIALEQSRLARLDPHPELLPELGSLPPVNT

SEQ ID NO: 4663 - protein, 1210 aa, Homo sapiens
MAAAAGAAAAAAAEGEAPAEMGALLLEKETRGATERVHGSLGDTPRSEETLPKATPDSLEPAGPSSPASVTVTVGDEGADTPVGATPLIGDESENLEGDGDLRGGRILLGHATKSFPSSPSKGGSCPSRAKMSMTGAGKSPPSVQSLAMRLLSMPGAQGAAAAGSEPPPATTSPEGQPKVHRARKTMSKPGNGQPPVPEKRPPEIQHFRMSDDVHSLGKVTSDLAKRRKLNSGGGLSEELGSARRSGEVTLTKGDPGSLEEWETVVGDDFSLYYDSYSVDERVDSDSKSEVEALTEQLSEEEEEEEEEEEEEEEEEEEEEEEEDEESGNQSDRSGSSGRRKAKKKWRKDSPWVKPSRKRRKREPPRAKEPRGVNGVGSSGPSEYMEVPLGSLELPSEGTLSPNHAGVSNDTSSLETERGFEELPLCSCRMEAPKIDRISERAGHKCMATESVDGELSGCNAAILKRETMRPSSRVALMVLCETHRARMVKHHCCPGCGYFCTAGTFLECHPDFRVAHRFHKACVSQLNGMVFCPHCGEDASEAQEVTIPRGDGVTPPAGTAAPAPPPLSQDVPGRADTSQPSARMRGHGEPRRPPCDPLADTIDSSGPSLTLPNGGCLSAVGLPLGPGREALEKALVIQESERRKKLRFHPRQLYLSVKQGELQKVILMLLDNLDPNFQSDQQSKRTPLHAAAQKGSVEICHVLLQAGANINAVDKQQRTPLMEAVVNNHLEVARYMVQRGGCVYSKEEDGSTCLHHAAKIGNLEMVSLLLSTGQVDVNAQDSGGWTPIIWAAEHKHIEVIRMLLTRGADVTLTDNEENICLHWASFTGSAAIAEVLLNARCDLHAVNYHGDTPLHIAARESYHDCVLLFLSRGANPELRNKEGDTAWDLTPERSDVWFALQLNRKLRLGVGNRAIRTEKIICRDVARGYENVPIPCVNGVDGEPCPEDYKYISENCETSTMNIDRNITHLQHCTCVDDCSSSNCLCGQLSIRCWYDKDGRLLQEFNKIEPPLIFECNQACSCWRNCKNRVVQSGIKVRLQLYRTAKMGWGVRALQTIPQGTFICEYVGELISDAEADVREDDSYLFDLDNKDGEVYCIDARYYGNISRFINHLCDPNIIPVRVFMLHQDLRFPRIAFFSSRDIRTGEELGFDYGDRFWDIKSKYFTCQCGSEKCKHSAEAIALEQSRLARLDPHPELLPELGSLPPVNT

SEQ ID NO: 4664 - protein, 1233 aa, Homo sapiens
MRGLPRGRGLMRARGRGRAAPPGSRGRGRGGPHRGRGRPRSLLSLPRAQASWTPQLSTGLTSPPVPCLPSQGEAPAEMGALLLEKETRGATERVHGSLGDTPRSEETLPKATPDSLEPAGPSSPASVTVTVGDEGADTPVGATPLIGDESENLEGDGDLRGGRILLGHATKSFPSSPSKGGSCPSRAKMSMTGAGKSPPSVQSLAMRLLSMPGAQGAAAAGSEPPPATTSPEGQPKVHRARKTMSKPGNGQPPVPEKRPPEIQHFRMSDDVHSLGKVTSDLAKRRKLNSGGGLSEELGSARRSGEVTLTKGDPGSLEEWETVVGDDFSLYYDSYSVDERVDSDSKSEVEALTEQLSEEEEEEEEEEEEEEEEEEEEEEEEDEESGNQSDRSGSSGRRKAKKKWRKDSPWVKPSRKRRKREPPRAKEPRGVSNDTSSLETERGFEELPLCSCRMEAPKIDRISERAGHKCMATESVDGELSGCNAAILKRETMRPSSRVALMVLCETHRARMVKHHCCPGCGYFCTAGTFLECHPDFRVAHRFHKACVSQLNGMVFCPHCGEDASEAQEVTIPRGDGVTPPAGTAAPAPPPLSQDVPGRADTSQPSARMRGHGEPRRPPCDPLADTIDSSGPSLTLPNGGCLSAVGLPLGPGREALEKALVIQESERRKKLRFHPRQLYLSVKQGELQKVILMLLDNLDPNFQSDQQSKRTPLHAAAQKGSVEICHVLLQAGANINAVDKQQRTPLMEAVVNNHLEVARYMVQRGGCVYSKEEDGSTCLHHAAKIGNLEMVSLLLSTGQVDVNAQDSGGWTPIIWAAEHKHIEVIRMLLTRGADVTLTDNEENICLHWASFTGSAAIAEVLLNARCDLHAVNYHGDTPLHIAARESYHDCVLLFLSRGANPELRNKEGDTAWDLTPERSDVWFALQLNRKLRLGVGNRAIRTEKIICRDVARGYENVPIPCVNGVDGEPCPEDYKYISENCETSTMNIDRNITHLQHCTCVDDCSSSNCLCGQLSIRCWYDKDGRLLQEFNKIEPPLIFECNQACSCWRNCKNRVVQSGIKVRLQLYRTAKMGWGVRALQTIPQGTFICEYVGELISDAEADVREDDSYLFDLDNKDGEVYCIDARYYGNISRFINHLCDPNIIPVRVFMLHQDLRFPRIAFFSSRDIRTGEELGFDYGDRFWDIKSKYFTCQCGSEKCKHSAEAIALEQSRLARLDPHPELLPELGSLPPVNT

SEQ ID NO: 4665 - protein, 1267 aa, Homo sapiens
MRGLPRGRGLMRARGRGRAAPPGSRGRGRGGPHRGRGRPRSLLSLPRAQASWTPQLSTGLTSPPVPCLPSQGEAPAEMGALLLEKETRGATERVHGSLGDTPRSEETLPKATPDSLEPAGPSSPASVTVTVGDEGADTPVGATPLIGDESENLEGDGDLRGGRILLGHATKSFPSSPSKGGSCPSRAKMSMTGAGKSPPSVQSLAMRLLSMPGAQGAAAAGSEPPPATTSPEGQPKVHRARKTMSKPGNGQPPVPEKRPPEIQHFRMSDDVHSLGKVTSDLAKRRKLNSGGGLSEELGSARRSGEVTLTKGDPGSLEEWETVVGDDFSLYYDSYSVDERVDSDSKSEVEALTEQLSEEEEEEEEEEEEEEEEEEEEEEEEDEESGNQSDRSGSSGRRKAKKKWRKDSPWVKPSRKRRKREPPRAKEPRGVNGVGSSGPSEYMEVPLGSLELPSEGTLSPNHAGVSNDTSSLETERGFEELPLCSCRMEAPKIDRISERAGHKCMATESVDGELSGCNAAILKRETMRPSSRVALMVLCETHRARMVKHHCCPGCGYFCTAGTFLECHPDFRVAHRFHKACVSQLNGMVFCPHCGEDASEAQEVTIPRGDGVTPPAGTAAPAPPPLSQDVPGRADTSQPSARMRGHGEPRRPPCDPLADTIDSSGPSLTLPNGGCLSAVGLPLGPGREALEKALVIQESERRKKLRFHPRQLYLSVKQGELQKVILMLLDNLDPNFQSDQQSKRTPLHAAAQKGSVEICHVLLQAGANINAVDKQQRTPLMEAVVNNHLEVARYMVQRGGCVYSKEEDGSTCLHHAAKIGNLEMVSLLLSTGQVDVNAQDSGGWTPIIWAAEHKHIEVIRMLLTRGADVTLTDNEENICLHWASFTGSAAIAEVLLNARCDLHAVNYHGDTPLHIAARESYHDCVLLFLSRGANPELRNKEGDTAWDLTPERSDVWFALQLNRKLRLGVGNRAIRTEKIICRDVARGYENVPIPCVNGVDGEPCPEDYKYISENCETSTMNIDRNITHLQHCTCVDDCSSSNCLCGQLSIRCWYDKDGRLLQEFNKIEPPLIFECNQACSCWRNCKNRVVQSGIKVRLQLYRTAKMGWGVRALQTIPQGTFICEYVGELISDAEADVREDDSYLFDLDNKDGEVYCIDARYYGNISRFINHLCDPNIIPVRVFMLHQDLRFPRIAFFSSRDIRTGEELGFDYGDRFWDIKSKYFTCQCGSEKCKHSAEAIALEQSRLARLDPHPELLPELGSLPPVNT

SEQ ID NO: 4666 - protein, 298 aa, Homo sapiens
  SITE 1: note = misc_feature - Xaa can be any naturally occurring amino acid
XSKRTPLHAAAQKGSVEICHVLLQAGANINAVDKQQRTPLMEAVVNNHLEVARYMVQRGGCVYSKEEDGSTCLHHAAKIGNLEMVSLLLSTGQVDVNAQGQLPPPSLPSHPQDSGGWTPIIWAAEHKHIEVIRMLLTRGADVTLTDNEENICLHWASFTGSAAIAEVLLNARCDLHAVNYHGDTPLHIAARESYHDCVLLFLSRGANPELRNKEGDTAWDLTPERSDVWFALQLNRKLRLGVGNRAIRTEKIICRDVARGYENVPIPCVNGVDGEPCPEDYKYISENCETSTMNIDRN

SEQ ID NO: 4667 - protein, 81 aa, Homo sapiens
MQGGNSGVRKREEEGDGAGAVAAPPAIDFPAEGPDPEYDEMWSCCVSQAGLERLASSDSPASAFQNAGIIDNLMFQQKSRC

SEQ ID NO: 4668 - protein, 164 aa, Homo sapiens
MQGGNSGVRKREEEGDGAGAVAAPPAIDFPAEGPDPEYDESDVPAEIQVLKEPLQQPTFPFAVANQLLLVSLLEHLSHVHEPNPLRSRQVFKLLCQTFIKMGLLSSFTCSDEFSSLRLHHNRAITHLMRSAKERVRQDPCEDISRIQKIRDEKFHFSPSFPNQH

SEQ ID NO: 4669 - protein, 630 aa, Homo sapiens
MQGGNSGVRKREEEGDGAGAVAAPPAIDFPAEGPDPEYDESDVPAEIQVLKEPLQQPTFPFAVANQLLLVSLLEHLSHVHEPNPLRSRQVFKLLCQTFIKMGLLSSFTCSDEFSSLRLHHNRAITHLMRSAKERVRQDPCEDISRIQKIRSREVALEAQTSRYLNEFEELAILGKGGYGRVYKVRNKLDGQYYAIKKILIKGATKTVCMKVLREVKVLAGLQHPNIVGYHTAWIEHVHVIQPRADRAAIELPSLEVLSDQEEDREQCGVKNDESSSSSIIFAEPTPEKEKRFGESDTENQNNKSVKYTTNLVIRESGELESTLELQENGLAGLSASSIVEQQLPLRRNSHLEESFTSTEESSEENVNFLGQTEAQYHLMLHIQMQLCELSLWDWIVERNKRGREYVDESACPYVMANVATKIFQELVEGVFYIHNMGIVHRDLKPRNIFLHGPDQQVKIGDFGLACTDILQKNTDWTNRNGKRTPTHTSRVGTCLYASPEQLEGSEYDAKSDMYSLGVVLLELFQPFGTEMERAEVLTGLRTGQLPESLRKRCPVQAKYIQHLTRRNSSQRPSAIQLLQSELFQNSGNVNLTLQMKIIEQEKEIAELKKQLNLLSQDKGVRDDGKDGGVG

SEQ ID NO: 4670 - protein, 72 aa, Homo sapiens
  SITE 1: note = misc_feature - Xaa can be any naturally occurring amino acid
XLAGLTPLGVAAVASAGTGGICWCSQRGAEGWGPTPQRRPVNLTLQMKIIEQEKEIAELKKQLNLLSQDKGA

SEQ ID NO: 4671 - protein, 267 aa, Homo sapiens
MTLGRRLACLFLACVLPALLLGGTALASEIVGGRRARPHAWPFMVSLQLRGGHFCGATLIAPNFVMSAAHCVANVNVRAVRVVLGAHNLSRREPTRQVFAVQRIFENGYDPVNLLNDIVILQLNGSATINANVQVAQLPAQGRRLGNGVQCLAMGWGLLGRNRGIASVLQELNVTVVTSLCRRSNVCTLVRGRQAGVCFGDSGSPLVCNGLIHGIASFVRGGCASGLYPDAFAPVAQFVNWIDSIIQRSEDNPCPHPRDPDPASRTH

SEQ ID NO: 4672 - protein, 267 aa, Homo sapiens; identical to SEQ ID NO: 4671

SEQ ID NO: 4673 - protein, 152 aa, Homo sapiens [sequence omitted]

SEQ ID NO: 4674 - protein, 700 aa, Homo sapiens
MAGLTAAAPRPGVLLLLLSILHPSRPGGVPGAIPGGVPGGVFYPALGPGGKPLKPVPGGLAGAGLGAGLGAFPAVTFPGALVPGGVADAAAAYKAAKAGAGLGGVPGVGGLGVSAAPSVPGAVVPQPGAGVKPGKVPGVGLPGVYPGGVLPGARFPGVGVLPGVPTGAGVKPKAPGVGGAFAGIPGVGPFGGPQPGVPLGYPIKAPKLPGGYGLPYTTGKLPYGYGPGGVAGAAGKAGYPTGTGVGPQAAAAAAAKAAAKFGAGAAGVLPGVGGAGVPGVPGAIPGIGGIAGVGTPAAAAAAAAAAKAAKYGAAAGLVPGGPGFGPGVVGVPGAGVPGVGVPGAGIPVVPGAGIPGAAVPGVVSPEAAAKAAAKAAKYGARPGVGVGGIPTYGVGAGGFPGFGVGVGGIPGVAGVPGVGGVPGVGGVPGVGISPEAQAAAAAKAAKYGLVPGVGVAPGVGVAPGVGVAPGVGLAPGVGVAPGVGVAPGVGVAPGIGPGGVAAAAKSAAKVAAKAQLRAAAGLGAGIPGLGVGVGVPGLGVGAGVPGLGVGAGVPGFGAVPGALAAAKAAKYGAAVPGVLGGLGALGGVGIPGGVVGAGPAAAAAAAKAAAKAAQFGLVGAAGLGGLGVGGLGVPGVGGLGGIPPAAAAKAAKYGAAGLGGVLGGAGQFPLGGVAARPGFGLSPIFPGGACLGKACGRKRK

SEQ ID NO: 4675 - protein, 677 aa, Homo sapiens
MAGLTAAAPRPGVLLLLLSILHPSRPGGVPGAIPGGVPGGVFYPALGPGGKPLKPVPGGLAGAGLGAGLGAFPAVTFPGALVPGGVADAAAAYKAAKAGAGLGGVPGVGGLGVSAGAVVPQPGAGVKPGKVPGVGLPGVYPGGVLPGARFPGVGVLPGVPTGAGVKPKAPGVGGAFAGIPGVGPFGGPQPGVPLGYPIKAPKLPGGYGLPYTTGKLPYGYGPGGVAGAAGKAGYPTGTGVGPQAAAAAAAKAAAKFGAGAAGVLPGVGGAGVPGVPGAIPGIGGIAGVGTPAAAAAAAAAAKAAKYGAAAGLVPGGPGFGPGVVGVPGAGVPGVGVPGAGIPVVPGAGIPGAAVPGVVSPEAAAKAAAKAAKYGARPGVGVGGIPTYGVGAGGFPGFGVGVGGIPGVAGVPGVGGVPGVGGVPGVGISPEAQAAAAAKAAKYGLVPGVGVAPGVGVAPGVGVAPGVGLAPGVGVAPGVGVAPGVGVAPGIGPGGVAAAAKSAAKVAAKAQLRAAAGLGAGIPGLGVGVGVPGLGVGAGVPGLGVGAGVPGFGAVPGALAAAKAAKYGAAVPGVLGGLGALGGVGIPGGVVGAGPAAAAAAAKAAAKAAQFGLVGAAGLGGLGVGGLGVPGVGGLGGIPPAAAAKAAKYGVAARPGFGLSPIFPGGACLGKACGRKRK

SEQ ID NO: 4676 - protein, 714 aa, Homo sapiens
MAGLTAAAPRPGVLLLLLSILHPSRPGGVPGAIPGGVPGGVFYPALGPGGKPLKPVPGGLAGAGLGAGLGAFPAVTFPGALVPGGVADAAAAYKAAKAGAGLGGVPGVGGLGVSAGAVVPQPGAGVKPGKVPGVGLPGVYPGGVLPGARFPGVGVLPGVPTGAGVKPKAPGVGGAFAGIPGVGPFGGPQPGVPLGYPIKAPKLPGGYGLPYTTGKLPYGYGPGGVAGAAGKAGYPTGTGVGPQAAAAAAAKAAAKFGAGAAGVLPGVGGAGVPGVPGAIPGIGGIAGVGTPAAAAAAAAAAKAAKYGAAAGLVPGGPGFGPGVVGVPGAGVPGVGVPGAGIPVVPGAGIPGAAVPGVVSPEAAAKAAAKAAKYGARPGVGVGGIPTYGVGAGGFPGFGVGVGGIPGVAGVPGVGGVPGVGGVPGVGISPEAQAAAAAKAAKYGVGTPAAAAAKAAAKAAQFGLVPGVGVAPGVGVAPGVGVAPGVGLAPGVGVAPGVGVAPGVGVAPGIGPGGVAAAAKSAAKVAAKAQLRAAAGLGAGIPGLGVGVGVPGLGVGAGVPGLGVGAGVPGFGAVPGALAAAKAAKYGAAVPGVLGGLGALGGVGIPGGVVGAGPAAAAAAAKAAAKAAQFGLVGAAGLGGLGVGGLGVPGVGGLGGIPPAAAAKAAKYGAAGLGGVLGGAGQFPLGGVAARPGFGLSPIFPGGACLGKACGRKRK

SEQ ID NO: 4677 - protein, 617 aa, Homo sapiens
MAGLTAAAPRPGVLLLLLSILHPSRPGGVPGAIPGGVPGGVFYPALGPGGKPLKPVPGGLAGAGLGAGLGAFPAVTFPGALVPGGVADAAAAYKAAKAGAGLGGVPGVGGLGVSAGAVVPQPGAGVKPGKVPGVGLPGVYPGGVLPGVGPFGGPQPGVPLGYPIKAPKLPGGYGLPYTTGKLPYGYGPGGVAGAAGKAGYPTGTGVGPQAAAAAAAKAAAKFGAGAAGVLPGVGGAGVPGVPGAIPGIGGIAGVGTPAAAAAAAAAAKAAKYGAAAGLVPGGPGFGPGVVGVPGAGVPGVGVPGAGIPVVPGAGIPGAAVPGVVSPEAAAKAAAKAAKYGARPGVGVGGIPTYGVGAGGFPGFGVGVGAEAQAAAAAKAAKYGLVPGVGVAPGVGVAPGVGVAPGVGLAPGVGVAPGVGVAPGVGVAPGIGPGGVAAAAKSAAKVAAKAQLRAAAGLGAGIPGLGVGVGVPGLGVGAGVPGLGVGAGVPGFGAVPGALAAAKAAKYGAAVPGVLGGLGALGGVGIPGGVVGAGPAAAAAAAKAAAKAAQFGLVGAAGLGGLGVGGLGVPGVGGLGGIPPAAAAKAAKYGVAARPGFGLSPIFPGGACLGKACGRKRK

SEQ ID NO: 4678 - protein, 294 aa, Homo sapiens
MAGLTAAAPRPGVLLLLLSILHPSRPGGVPGAIPGGVPGGVFYPGAGLGALGGGALGPGGKPLKPGLGAFPAVTFPGALVPGGVADAAAAYKAAKAGAGLGGVPGVGGLGVSAGAVVPQPGAGVKPGKVPGVGLPGVYPGGVLPGARFPGVGVLPGVPTGAGVKPKAPGVGPFGGPQPGVPLGYPIKAPKLPGGYGLPYTTGKLPYGYGPGGVAGAAGKAGYPTGTGVGPQAAAAAAAKAAAKFGAGAAGVLPGVGGAGVPGVPGAIPGIGGIAGVGTPAAAAAAAAAAKAAKY

SEQ ID NO: 4679 - protein, 643 aa, Homo sapiens
MAGLTAAAPRPGVLLLLLSILHPSRPGGVPGAIPGGVPGGVFYPGAGLGALGGGALGPGGKPLKPGLGAFPAVTFPGALVPGGVADAAAAYKAAKAGAGLGGVPGVGGLGVSAGAVVPQPGAGVKPGKVPGVGLPGVYPGGVLPGARFPGVGVLPGVPTGAGVKPKAPGVGPFGGPQPGVPLGYPIKAPKLPGYGPGGVAGAAGKAGYPTGTGVGPQAAAAAAAKAAAKFGAGAAGVLPGVGGAGVPGVPGAIPGIGGIAGVGTPAAAAAAAAAAKAAKYGAAAGLVPGGPGFGPGVVGVPGAGVPGVGVPGAGIPVVPGAGIPGAAVPGVVSPEAAAKAAAKAAKYGARPGVGVGGIPTYGVGAGGFPGFGVGVGAEAQAAAAAKAAKYGLVPGVGVAPGVGVAPGVGVAPGVGLAPGVGVAPGVGVAPGVGVAPGIGPGGVAAAAKSAAKVAAKAQLRAAAGLGAGIPGLGVGVGVPGLGVGAGVPGLGVGAGVPGFGAVPGALAAAKAAKYGAAVPGVLGGLGALGGVGIPGGVVGAGPAAAAAAAKAAAKAAQFGLVGAAGLGGLGVGGLGVPGVGGLGGIPPAAAAKAAKYGAAGLGGVLGGAGQFPLGGVAARPGFGLSPIFPGGACLGKACGRKRK

SEQ ID NO: 4680 - protein, 168 aa, Homo sapiens
MAGLTAAAPRPGVLLLLLSILHPSRPGGVPGAIPGGVPGGVFYPGAGLGALGGGALGPGGKPLKPGVGPFGGPQPGVPLGYPIKAPKLPGYGPGGVAGAAGKAGYPTGTGVGPQAAAAAAAKAAAKFGAGAAGVLPGVGGAGVPGVPGAIPGIGGIAGVGTPAAAAAA

SEQ ID NO: 4681 - protein, 711 aa, Homo sapiens
MAGLTAAAPRPGVLLLLLSILHPSRPGGVPGAIPGGVPGGVFYPGAGLGALGGGALGPGGKPLKPVPGGLAGAGLGAGLGAFPAVTFPGALVPGGVADAAAAYKAAKAGAGLGGVPGVGGLGVSAAPSVPGAVVPQPGAGVKPGKVPGVGLPGVYPGGVLPGARFPGVGVLPGVPTGAGVKPKAPGVGGAFAGIPGVGPFGGPQPGVPLGYPIKAPKLPGGYGLPYTTGKLPYGYGPGGVAGAAGKAGYPTGTGVGPQAAAAAAAKAAAKFGAGAAGVLPGVGGAGVPGVPGAIPGIGGIAGVGTPAAAAAAAAAAKAAKYGAAAGLVPGGPGFGPGVVGVPGAGVPGVGVPGAGIPVVPGAGIPGAAVPGVVSPEAAAKAAAKAAKYGARPGVGVGGIPTYGVGAGGFPGFGVGVGGIPGVAGVPGVGGVPGVGGVPGVGISPEAQAAAAAKAAKYGVGTPAAAAAKAAAKAAQFGLVPGVGVAPGVGVAPGVGVAPGVGLAPGVGVAPGVGVAPGVGVAPGIGPGGVAAAAKSAAKVAAKAQLRAAAGLGAGIPGLGVGVGVPGLGVGAGVPGLGVGAGVPGFGAVPGALAAAKAAKYGAAVPGVLGGLGALGGVGIPGGVVGAGPAAAAAAAKAAAKAAQFGLVGAAGLGGLGVGGLGVPGVGGLGGIPPAAAAKAAKYGVAARPGFGLSPIFPGGACLGKACGRKRK

SEQ ID NO: 4682 - protein, 692 aa, Homo sapiens
MAGLTAAAPRPGVLLLLLSILHPSRPGGVPGAIPGGVPGGVFYPGAGLGALGGGALGPGGKPLKPVPGGLAGAGLGAGLGAFPAVTFPGALVPGGVADAAAAYKAAKAGAGLGGVPGVGGLGVSAAPSVPGAVVPQPGAGVKPGKVPGVGLPGVYPGGVLPGARFPGVGVLPGVPTGAGVKPKAPGVGGAFAGIPGVGPFGGPQPGVPLGYPIKAPKLPGGYGLPYTTGKLPYGYGPGGVAGAAGKAGYPTGTGVGPQAAAAAAAKAAAKFGAGAAGVLPGVGGAGVPGVPGAIPGIGGIAGVGTPAAAAAAAAAAKAAKYGAAAGLVPGGPGFGPGVVGVPGAGVPGVGVPGAGIPVVPGAGIPGAAVPGVVSPEAAAKAAAKAAKYGARPGVGVGGIPTYGVGAGGFPGFGVGVGGIPGVAGVPGVGGVPGVGGVPGVGISPEAQAAAAAKAAKYGLVPGVGVAPGVGVAPGVGVAPGVGLAPGVGVAPGVGVAPGVGVAPGIGPGGVAAAAKSAAKVAAKAQLRAAAGLGAGIPGLGVGVGVPGLGVGAGVPGLGVGAGVPGFGAVPGALAAAKAAKYGAAVPGVLGGLGALGGVGIPGGVVGAGPAAAAAAAKAAAKAAQFGLVGAAGLGGLGVGGLGVPGVGGLGGIPPAAAAKAAKYGVAARPGFGLSPIFPGGACLGKACGRKRK

SEQ ID NO: 4683 - protein, 176 aa, Homo sapiens
MAGLTAAAPRPGVLLLLLSILHPSRPGGVPGAIPGGVPGGVFYPGAGLGALGGGALGPGGKPLKPVPGGLAGAGLGAGLGAFPAVTFPGALVPGGVADAAAAYKAAKAGAGLGGVPGVGGLGVSAGAVVPQPGAGVKPGKVPGVGGAFAGIPGVGPFGGPQPGVPLGYPIKAPKLP

SEQ ID NO: 4684 - protein, 724 aa, Homo sapiens
MAGLTAAAPRPGVLLLLLSILHPSRPGGVPGAIPGGVPGGVFYPGAGLGALGGGALGPGGKPLKPVPGGLAGAGLGAGLGAFPAVTFPGALVPGGVADAAAAYKAAKAGAGLGGVPGVGGLGVSAGAVVPQPGAGVKPGKVPGVGLPGVYPGGVLPGARFPGVGVLPGVPTGAGVKPKAPGVGGAFAGIPGVGPFGGPQPGVPLGYPIKAPKLPGGYGLPYTTGKLPYGYGPGGVAGAAGKAGYPTGTGVGPQAAAAAAAKAAAKFGAGAAGVLPGVGGAGVPGVPGAIPGIGGIAGVGTPAAAAAAAAAAKAAKYGAAAGLVPGGPGFGPGVVGVPGAGVPGVGVPGAGIPVVPGAGIPGAAVPGVVSPEAAAKAAAKAAKYGARPGVGVGGIPTYGVGAGGFPGFGVGVGGIPGVAGVPGVGGVPGVGGVPGVGISPEAQAAAAAKAAKYGVGTPAAAAAKAAAKAAQFGLVPGVGVAPGVGVAPGVGVAPGVGLAPGVGVAPGVGVAPGVGVAPGIGPGGVAAAAKSAAKVAAKAQLRAAAGLGAGIPGLGVGVGVPGLGVGAGVPGLGVGAGVPGFGAVPGALAAAKAAKYGAAVPGVLGGLGALGGVGIPGGVVGAGPAAAAAAAKAAAKAAQFGLVGAAGLGGLGVGGLGVPGVGGLGGIPPAAAAKAAKYGAAGLGGVLGGAGQFPLGGVAARPGFGLSPIFPGGACLGKACGRKRK

SEQ ID NO: 4685 - protein, 757 aa, Homo sapiens
MAGLTAAAPRPGVLLLLLSILHPSRPGGVPGAIPGGVPGGVFYPGAGLGALGGGALGPGGKPLKPVPGGLAGAGLGAGLGAFPAVTFPGALVPGGVADAAAAYKAAKAGAGLGGVPGVGGLGVSAGAVVPQPGAGVKPGKVPGVGLPGVYPGGVLPGARFPGVGVLPGVPTGAGVKPKAPGVGGAFAGIPGVGPFGGPQPGVPLGYPIKAPKLPGGYGLPYTTGKLPYGYGPGGVAGAAGKAGYPTGTGVGPQAAAAAAAKAAAKFGAGAAGVLPGVGGAGVPGVPGAIPGIGGIAGVGTPAAAAAAAAAAKAAKYGAAAGLVPGGPGFGPGVVGVPGAGVPGVGVPGAGIPVVPGAGIPGAAVPGVVSPEAAAKAAAKAAKYGARPGVGVGGIPTYGVGAGGFPGFGVGVGGIPGVAGVPGVGGVPGVGGVPGVGISPEAQAAAAAKAAKYGVGTPAAAAAKAAAKAAQFGLVPGVGVAPGVGVAPGVGVAPGVGLAPGVGVAPGVGVAPGVGVAPGIGPGGVAAAAKSAAKVAAKAQLRAAAGLGAGIPGLGVGVGVPGLGVGAGVPGLGVGAGVPGFGAGADEGVRRSLSPELREGDPSSSQHLPSTPSSPRVPGALAAAKAAKYGAAVPGVLGGLGALGGVGIPGGVVGAGPAAAAAAAKAAAKAAQFGLVGAAGLGGLGVGGLGVPGVGGLGGIPPAAAAKAAKYGAAGLGGVLGGAGQFPLGGVAARPGFGLSPIFPGGACLGKACGRKRK

SEQ ID NO: 4686 - protein, 786 aa, Homo sapiens
MAGLTAAAPRPGVLLLLLSILHPSRPGGVPGAIPGGVPGGVFYPGAGLGALGGGALGPGGKPLKPVPGGLAGAGLGAGLGAFPAVTFPGALVPGGVADAAAAYKAAKAGAGLGGVPGVGGLGVSAGAVVPQPGAGVKPGKVPGVGLPGVYPGGVLPGARFPGVGVLPGVPTGAGVKPKAPGVGGAFAGIPGVGPFGGPQPGVPLGYPIKAPKLPGGYGLPYTTGKLPYGYGPGGVAGAAGKAGYPTGTGVGPQAAAAAAAKAAAKFGAGAAGVLPGVGGAGVPGVPGAIPGIGGIAGVGTPAAAAAAAAAAKAAKYGAAAGLVPGGPGFGPGVVGVPGAGVPGVGVPGAGIPVVPGAGIPGAAVPGVVSPEAAAKAAAKAAKYGARPGVGVGGIPTYGVGAGGFPGFGVGVGGIPGVAGVPGVGGVPGVGGVPGVGISPEAQAAAAAKAAKYGAAGAGVLGGLVPGAPGAVPGVPGTGGVPGVGTPAAAAAKAAAKAAQFGLVPGVGVAPGVGVAPGVGVAPGVGLAPGVGVAPGVGVAPGVGVAPGIGPGGVAAAAKSAAKVAAKAQLRAAAGLGAGIPGLGVGVGVPGLGVGAGVPGLGVGAGVPGFGAGADEGVRRSLSPELREGDPSSSQHLPSTPSSPRVPGALAAAKAAKYGAAVPGVLGGLGALGGVGIPGGVVGAGPAAAAAAAKAAAKAAQFGLVGAAGLGGLGVGGLGVPGVGGLGGIPPAAAAKAAKYGAAGLGGVLGGAGQFPLGGVAARPGFGLSPIFPGGACLGKACGRKRK

SEQ ID NO: 4687 - protein, 706 aa, Homo sapiens
MAGLTAAAPRPGVLLLLLSILHPSRPGGVPGAIPGGVPGGVFYPGAGLGALGGGALGPGGKPLKPVPGGLAGAGLGAGLGAFPAVTFPGALVPGGVADAAAAYKAAKAGAGLGGVPGVGGLGVSAGAVVPQPGAGVKPGKVPGVGLPGVYPGGVLPGARFPGVGVLPGVPTGAGVKPKAPGVGGAFAGIPGVGPFGGPQPGVPLGYPIKAPKLPGGYGLPYTTGKLPYGYGPGGVAGAAGKAGYPTGTGVGPQAAAAAAAKAAAKFGAGAAGVLPGVGGAGVPGVPGAIPGIGGIAGVGTPAAAAAAAAAAKAAKYGAAAGLVPGGPGFGPGVVGVPGAGVPGVGVPGAGIPVVPGAGIPGAAVPGVVSPEAAAKAAAKAAKYGARPGVGVGGIPTYGVGAGGFPGFGVGVGGIPGVAGVPGVGGVPGVGGVPGVGISPEAQAAAAAKAAKYGVGTPAAAAAKAAAKAAQFGLVPGVGVAPGVGVAPGVGVAPGVGLAPGVGVAPGVGVAPGVGVAPGIGPGGVAAAAKSAAKVAAKAQLRAAAGLGAGIPGLGVGVGVPGLGVGAGVPGLGVGAGVPGFGAVPGALAAAKAAKYGAAVPGVLGGLGALGGVGIPGGVVGAGPAAAAAAAKAAAKAAQFGLVGAAGLGGLGVGGLGVPGVGGLGGIPPAAAAKAAKYGVAARPGFGLSPIFPGGACLGKACGRKRK

SEQ ID NO: 4688 - protein, 730 aa, Homo sapiens
MAGLTAAAPRPGVLLLLLSILHPSRPGGVPGAIPGGVPGGVFYPGAGLGALGGGALGPGGKPLKPVPGGLAGAGLGAGLGAFPAVTFPGALVPGGVADAAAAYKAAKAGAGLGGVPGVGGLGVSAGAVVPQPGAGVKPGKVPGVGLPGVYPGGVLPGARFPGVGVLPGVPTGAGVKPKAPGVGGAFAGIPGVGPFGGPQPGVPLGYPIKAPKLPGGYGLPYTTGKLPYGYGPGGVAGAAGKAGYPTGTGVGPQAAAAAAAKAAAKFGAGAAGVLPGVGGAGVPGVPGAIPGIGGIAGVGTPAAAAAAAAAAKAAKYGAAAGLVPGGPGFGPGVVGVPGAGVPGVGVPGAGIPVVPGAGIPGAAVPGVVSPEAAAKAAAKAAKYGARPGVGVGGIPTYGVGAGGFPGFGVGVGGIPGVAGVPGVGGVPGVGGVPGVGISPEAQAAAAAKAAKYGVGTPAAAAAKAAAKAAQFALLNLAGLVPGVGVAPGVGVAPGVGVAPGVGLAPGVGVAPGVGVAPGVGVAPGIGPGGVAAAAKSAAKVAAKAQLRAAAGLGAGIPGLGVGVGVPGLGVGAGVPGLGVGAGVPGFGAVPGALAAAKAAKYGAAVPGVLGGLGALGGVGIPGGVVGAGPAAAAAAAKAAAKAAQFGLVGAAGLGGLGVGGLGVPGVGGLGGIPPAAAAKAAKYGAAGLGGVLGGAGQFPLGGVAARPGFGLSPIFPGGACLGKACGRKRK

SEQ ID NO: 4689 - protein, 705 aa, Homo sapiens
MAGLTAAAPRPGVLLLLLSILHPSRPGGVPGAIPGGVPGGVFYPGAGLGALGGGALGPGGKPLKPVPGGLAGAGLGAGLGAFPAVTFPGALVPGGVADAAAAYKAAKAGAGLGGVPGVGGLGVSAGAVVPQPGAGVKPGKVPGVGLPGVYPGGVLPGARFPGVGVLPGVPTGAGVKPKAPGVGGAFAGIPGVGPFGGPQPGVPLGYPIKAPKLPGGYGLPYTTGKLPYGYGPGGVAGAAGKAGYPTGTGVGPQAAAAAAAKAAAKFGAGAAGVLPGVGGAGVPGVPGAIPGIGGIAGVGTPAAAAAAAAAAKAAKYGAAAGLVPGGPGFGPGVVGVPGAGVPGVGVPGAGIPVVPGAGIPGAAVPGVVSPEAAAKAAAKAAKYGARPGVGVGGIPTYGVGAGGFPGFGVGVGGIPGVAGVPGVGGVPGVGGVPGVGISPEAQAAAAAKAAKYGLVPGVGVAPGVGVAPGVGVAPGVGLAPGVGVAPGVGVAPGVGVAPGIGPGGVAAAAKSAAKVAAKAQLRAAAGLGAGIPGLGVGVGVPGLGVGAGVPGLGVGAGVPGFGAVPGALAAAKAAKYGAAVPGVLGGLGALGGVGIPGGVVGAGPAAAAAAAKAAAKAAQFGLVGAAGLGGLGVGGLGVPGVGGLGGIPPAAAAKAAKYGAAGLGGVLGGAGQFPLGGVAARPGFGLSPIFPGGACLGKACGRKRK

SEQ ID NO: 4690 - protein, 658 aa, Homo sapiens
MAGLTAAAPRPGVLLLLLSILHPSRPGGVPGAIPGGVPGGVFYPGAGLGALGGGALGPGGKPLKPVPGGLAGAGLGAGLGAFPAVTFPGALVPGGVADAAAAYKAAKAGAGLGGVPGVGGLGVSAGAVVPQPGAGVKPGKVPGVGLPGVYPGGVLPGARFPGVGVLPGVPTGAGVKPKAPGVGGAFAGIPGVGPFGGPQPGVPLGYPIKAPKLPGYGPGGVAGAAGKAGYPTGTGVGPQAAAAAAAKAAAKFGAGAAGVLPGVGGAGVPGVPGAIPGIGGIAGVGTPAAAAAAAAAAKAAKYGAAAGLVPGGPGFGPGVVGVPGAGVPGVGVPGAGIPVVPGAGIPGAAVPGVVSPEAAAKAAAKAAKYGARPGVGVGGIPTYGVGAGGFPGFGVGVGGIPGVAGVPGVGGVPGVGGVPGVGISPEAQAAAAAKAAKYGLVPGVGVAPGVGVAPGVGVAPGVGLAPGVGVAPGVGVAPGVGVAPGIGPGGVAGAAAGLGAGIPGLGVGVGVPGLGVGAGVPGLGVGAGVPGFGAVPGALAAAKAAKYGAAVPGVLGGLGALGGVGIPGGVVGAGPAAAAAAAKAAAKAAQFGLVGAAGLGGLGVGGLGVPGVGGLGGIPPAAAAKAAKYGVAARPGFGLSPIFPGGACLGKACGRKRK

SEQ ID NO: 4691 - protein, 214 aa, Homo sapiens
MAGLTAAAPRPGVLLLLLSILHPSRPGGVPGAIPGGVPGGVFYPGAGLGALGGGALGPGGKPLKPVPGGLAGAGLGAGLGAFPAVTFPGALVPGGVADAAAAYKAAKAGAGLGGVPGVGGLGVSAGAVVPQPGAGVKPGKVPGVGLPGVYPGGVLPGVGPFGGPQPGVPLGYPIKAPKLPGGYGLPYTTGKLPYGYGPGGVAGAAGKAGYPTGT

SEQ ID NO: 4692 - protein, 167 aa, Homo sapiens [sequence omitted]

SEQ ID NO: 4693 - protein, 570 aa, Homo sapiens
MAGLTAAAPRPGVLLLLLSILHPSRPGGVPGAIPGGVPGGVFYPGAGLGALGGGALGPGGKPLKPVPGGLAGAGLGAGVGGAFAGIPGVGPFGGPQPGVPLGYPIKAPKLPGYGPGGVAGAAGKAGYPTGTGVGPQAAAAAAAKAAAKFGAGAAGVLPGVGGAGVPGVPGAIPGIGGIAGVGTPAAAAAAAAAAKAAKYGAAAGLVPGGPGFGPGVVGVPGAGVPGVGVPGAGIPVVPGAGIPGAAVPGVVSPEAAAKAAAKAAKYGARPGVGVGGIPTYGVGAGGFPGFGVGVGGIPGVAGVPGVGGVPGVGGVPGVGISPEAQAAAAAKAAKYGLVPGVGVAPGVGVAPGVGVAPGVGLAPGVGVAPGVGVAPGVGVAPGIGPGGVAAAAKSAAKVAAKAQLRAAAGLGAGIPGLGVGVGVPGLGVGAGVPGLGVGAGVPGFGAVPGALAAAKAAKYGAAVPGVLGGLGALGGVGIPGGVVGAGPAAAAAAAKAAAKAAQFGLVGAAGLGGLGVGGLGVPGVGGLGGIPPAAAAKAAKYGVAARPGFGLSPIFPGGACLGKACGRKRK

SEQ ID NO: 4694 - protein, 68 aa, Homo sapiens
MAGLTAAAPRPGVLLLLLSILHPSRPGGVPGAIPGGVPGGVFYPGNVHETSTHPGHADDADVHNRCTF

SEQ ID NO: 4695 - protein, 60 aa, Homo sapiens
VTFPGALVPGGVADAAAAYKAAKAGAGLGGVPGVGGLGVSAGAVVPQPGAGVKPGKVPAL

SEQ ID NO: 4696 - protein, 47 aa, Homo sapiens
DEEELLTSTGFEYQQVAFQPSILTEPPTEDHLLQNTLWPEVQKLASF

SEQ ID NO: 4697 - protein, 57 aa, Homo sapiens
MCLQTLNFGNGFALALCLSFLPNTDVPILACGNDDCRIHIFAQQNDQFQKVLSLCGH

SEQ ID NO: 4698 - protein, 120 aa, Homo sapiens
MVAPVLETSHVFCCPNRVRGVLNWSSGPRGLLAFGTSCSVVLYDPLKRVVVTNLNGHTARVNCIQWICKQDGSPSTELVSGGSDNQVIHWEIEDNQAMKDLFMRCMLFTRGGHQILHYVH

SEQ ID NO: 4699 - protein, 101 aa, Homo sapiens
MVAPVLETSHVFCCPNRVRGVLNWSSGPRGLLAFGTSCSVVLYDPLKRVVVTNLNGHTARVNCIQWICKQDGSPSTELVSGGSDNQVIHWEIEDNQIWARL

SEQ ID NO: 4700 - protein, 756 aa, Homo sapiens
MVAPVLETSHVFCCPNRVRGVLNWSSGPRGLLAFGTSCSVVLYDPLKRVVVTNLNGHTARVNCIQWICKQDGSPSTELVSGGSDNQVIHWEIEDNQLLKAVHLQGHEGPVYAVHAVYQRRTSDPALCTLIVSAAADSAVRLWSKKGPEGRDLFLASCSQDCLIRIWKLYIKSTSLETQDDDNIRLKENTFTIENESVKIAFAVTLETVLAGHENWVNAVHWQPVFYKDGVLQQPVRLLSASMDKTMILWAPDEESGVWLEQVRVGEVGGNTLGFYDCQFNEDGSMIIAHAFHGALHLWKQNTVNPREWTPEIVISGHFDGVQDLVWDPEGEFIITVGTDQTTRLFAPWKRKDQSQVTWHEIARPQIHGYDLKCLAMINRFQFVSGADEKVLRVFSAPRNFVENFCAITGQSLNHVLCNQDSDLPEGATVPALGLSNKAVFQGDIASQPSDEEELLTSTGFEYQQVAFQPSILTEPPTEDHLLQNTLWPEVQKLYGHGYEIFCVTCNSSKTLLASACKAAKKEHAAIILWNTTSWKQVQNLVFHSLTVTQMAFSPNEKFLLAVSRDRTWSLWKKQDTISPEFEPVFSLFAFTNKITSVHSRIIWSCDWSPDSKYFFTGSRDKKVVVWGECDSTDDCIEHNIGPCSSVLDVGGAVTAVSVCPVLHPSQRYVVAVGLECGKICLYTWKKTDQVPEINDWTHCVETSQSQSHTLAIRKLCWKNCSGKTEQKEAEGAEWLHFASCGEDHTVKIHRVNKCAL

SEQ ID NO: 4701 - protein, 826 aa, Homo sapiens
MVAPVLETSHVFCCPNRVRGVLNWSSGPRGLLAFGTSCSVVLYDPLKRVVVTNLNGHTARVNCIQWICKQDGSPSTELVSGGSDNQVIHWEIEDNQLLKAVHLQGHEGPVYAVHAVYQRRTSDPALCTLIVSAAADSAVRLWSKKGPEVMCLQTLNFGNGFALALCLSFLPNTDVPILACGNDDCRIHIFAQQNDQFQKVLSLCGHEDWIRGVEWAAFGRDLFLASCSQDCLIRIWKLYIKSTSLETQDDDNIRLKENTFTIENESVKIAFAVTLETVLAGHENWVNAVHWQPVFYKDGVLQQPVRLLSASMDKTMILWAPDEESGVWLEQVRVGEVGGNTLGFYDCQFNEDGSMIIAHAFHGALHLWKQNTVNPREWTPEIVISGHFDGVQDLVWDPEGEFIITVGTDQTTRLFAPWKRKDQSQVTWHEIARPQIHGYDLKCLAMINRFQFVSGADEKVLRVFSAPRNFVENFCAITGQSLNHVLCNQDSDLPEGATVPALGLSNKAVFQGDIASQPSDEEELLTSTGFEYQQVAFQPSILTEPPTEDHLLQNTLWPEVQKLYGHGYEIFCVTCNSSKTLLASACKAAKKEHAAIILWNTTSWKQVQNLVFHSLTVTQMAFSPNEKFLLAVSRDRTWSLWKKQDTISPEFEPVFSLFAFTNKITSVHSRIIWSCDWSPDSKYFFTGSRDKKVVVWGECDSTDDCIEHNIGPCSSVLDVGGAVTAVSVCPVLHPSQRYVVAVGLECGKICLYTWKKTDQVPEINDWTHCVETSQSQSHTLAIRKLCWKNCSGKTEQKEAEGAEWLHFASCGEDHTVKIHRVNKCAL

SEQ ID NO: 4702 - protein, 705 aa, Homo sapiens
MVAPVLETSHVFCCPNRVRGVLNWSSGPRGLLAFGTSCSVVLYDPLKRVVVTNLNGHTARVNCIQWICKQDGSPSTELVSGGSDNQVIHWEIEDNQLLKAVHLQGHEGPVYAVHAVYQRRTSDPALCTLIVSAAADSAVRLWSKKGPEVMCLQTLNFGNGFALALCLSFLPNTDVPILACGNDDCRIHIFAQQNDQFQKVLSLCGHEDWIRGVEWAAFGRDLFLASCSQDCLIRIWKLYIKSTSLETQDDDNIRLKENTFTIENESVKIAFAVTLETVLAGHENWVNAVHWQPVFYKDGVLQQPVRLLSASMDKTMILWAPDEESGVWLEQVRVGEVGGNTLGFYDCQFNEDGSMIIAHAFHGALHLWKQNTVNPREWTPEIVISGHFDGVQDLVWDPEGEFIITVGTDQTTRLFAPWKRKDQSQVTWHEIARPQIHGYDLKCLAMINRFQFVSGADEKVLRVFSAPRNFVENFCAITGQSLNHVLCNQDSDLPEGATVPALGLSNKAVFQGDIASQPSDEEELLTSTGFEYQQVAFQPSILTEPPTEDHLLQNTLWPEVQKLYGHGYEIFCVTCNSSKTLLASACKAAKKEHAAIILWNTTSWKQVQNLVFHSLTVTQMAFSPNEKFLLAVSRDRTWSLWKKQDTISPEFVELFGLVIGVLTASISSLGVETKRWLSGVSATPLMTVLSTTLAPAPQSWTWVGL

SEQ ID NO: 4703 - protein, 891 aa, Homo sapiens
MVAPVLETSHVFCCPNRVRGVLNWSSGPRGLLAFGTSCSVVLYDPLKRVVVTNLNGHTARVNCIQWICKQDGSPSTELVSGGSDNQVIHWEIEDNQLLKAVHLQGHEGPVYAVHAVYQRRTSDPALCTLIVSAAADSAVRLWSKKGPEVMCLQTLNFGNGFALALCLSFLPNTDVTWKTGQVERGRAWKPPASLALCSRSCDSMVSCYASILCKALWKEKLHTFWHHNRISFLPSAFRPIPILACGNDDCRIHIFAQQNDQFQKVLSLCGHEDWIRGVEWAAFGRDLFLASCSQDCLIRIWKLYIKSTSLETQDDDNIRLKENTFTIENESVKIAFAVTLETVLAGHENWVNAVHWQPVFYKDGVLQQPVRLLSASMDKTMILWAPDEESGVWLEQVRVGEVGGNTLGFYDCQFNEDGSMIIAHAFHGALHLWKQNTVNPREWTPEIVISGHFDGVQDLVWDPEGEFIITVGTDQTTRLFAPWKRKDQSQVTWHEIARPQIHGYDLKCLAMINRFQFVSGADEKVLRVFSAPRNFVENFCAITGQSLNHVLCNQDSDLPEGATVPALGLSNKAVFQGDIASQPSDEEELLTSTGFEYQQVAFQPSILTEPPTEDHLLQNTLWPEVQKLYGHGYEIFCVTCNSSKTLLASACKAAKKEHAAIILWNTTSWKQVQNLVFHSLTVTQMAFSPNEKFLLAVSRDRTWSLWKKQDTISPEFEPVFSLFAFTNKITSVHSRIIWSCDWSPDSKYFFTGSRDKKVVVWGECDSTDDCIEHNIGPCSSVLDVGGAVTAVSVCPVLHPSQRYVVAVGLECGKICLYTWKKTDQVPEINDWTHCVETSQSQSHTLAIRKLCWKNCSGKTEQKEAEGAEWLHFASCGEDHTVKIHRVNKCAL

SEQ ID NO: 4704 - protein, 800 aa, Homo sapiens
MVAPVLETSHVFCCPNRVRGVLNWSSGPRGLLAFGTSCSVVLYDPLKRVVVTNLNGHTARVNCIQWICKQDGSPSTELVSGGSDNQVIHWEIEDNQLLKAVHLQGHEGPVYAVHAVYQRRTSDPALCTLIVSAAADSAVRLWSKKGPEVPILACGNDDCRIHIFAQQNDQFQKVLSLCGHEDWIRGVEWAAFGRDLFLASCSQDCLIRIWKLYIKSTSLETQDDDNIRLKENTFTIENESVKIAFAVTLETVLAGHENWVNAVHWQPVFYKDGVLQQPVRLLSASMDKTMILWAPDEESGVWLEQVRVGEVGGNTLGFYDCQFNEDGSMIIAHAFHGALHLWKQNTVNPREWTPEIVISGHFDGVQDLVWDPEGEFIITVGTDQTTRLFAPWKRKDQSQVTWHEIARPQIHGYDLKCLAMINRFQFVSGADEKVLRVFSAPRNFVENFCAITGQSLNHVLCNQDSDLPEGATVPALGLSNKAVFQGDIASQPSDEEELLTSTGFEYQQVAFQPSILTEPPTEDHLLQNTLWPEVQKLYGHGYEIFCVTCNSSKTLLASACKAAKKEHAAIILWNTTSWKQVQNLVFHSLTVTQMAFSPNEKFLLAVSRDRTWSLWKKQDTISPEFEPVFSLFAFTNKITSVHSRIIWSCDWSPDSKYFFTGSRDKKVVVWGECDSTDDCIEHNIGPCSSVLDVGGAVTAVSVCPVLHPSQRYVVAVGLECGKICLYTWKKTDQVPEINDWTHCVETSQSQSHTLAIRKLCWKNCSGKTEQKEAEGAEWLHFASCGEDHTVKIHRVNKCAL

SEQ ID NO: 4705 - protein, 756 aa, Homo sapiens
MVAPVLETSHVFCCPNRVRGVLNWSSGPRGLLAFGTSCSVVLYDPLKRVVVTNLNGHTARVNCIQWICKQDGSPSTELVSGGSDNQVIHWEIEDNQLLKAVHLQGHEGPVYAVHAVYQRRTSDPALCTLIVSAAADSAVRLWSKKGPEVPILACGNDDCRIHIFAQQNDQFQKVLSLCGHEDWIRGVEWAAFGRDLFLASCSQDCLIRIWKLYIKSTSLETQDDDNIRLKENTFTIENESVKIAFAVTLETVLAGHENWVNAVHWQPVFYKDGVLQQPVRLLSASMDKTMILWAPDEESGVWLEQREWTPEIVISGHFDGVQDLVWDPEGEFIITVGTDQTTRLFAPWKRKDQSQVTWHEIARPQIHGYDLKCLAMINRFQFVSGADEKVLRVFSAPRNFVENFCAITGQSLNHVLCNQDSDLPEGATVPALGLSNKAVFQGDIASQPSDEEELLTSTGFEYQQVAFQPSILTEPPTEDHLLQNTLWPEVQKLYGHGYEIFCVTCNSSKTLLASACKAAKKEHAAIILWNTTSWKQVQNLVFHSLTVTQMAFSPNEKFLLAVSRDRTWSLWKKQDTISPEFEPVFSLFAFTNKITSVHSRIIWSCDWSPDSKYFFTGSRDKKVVVWGECDSTDDCIEHNIGPCSSVLDVGGAVTAVSVCPVLHPSQRYVVAVGLECGKICLYTWKKTDQVPEINDWTHCVETSQSQSHTLAIRKLCWKNCSGKTEQKEAEGAEWLHFASCGEDHTVKIHRVNKCAL

SEQ ID NO: 4706 - protein, 821 aa, Homo sapiens
MVAPVLETSHVFCCPNRVRGVLNWSSGPRGLLAFGTSCSVVLYDPLKRVVVTNLNGHTARVNCIQWICKQDGSPSTELVSGGSDNQVIHWEIEDNQLLKAVHLQGHEGPVYAVHAVYQRRTSDPALCTLIVSAAADSAVRLWSKKGPEVTWKTGQVERGRAWKPPASLALCSRSCDSMVSCYASILCKALWKEKLHTFWHHNRISFLPSAFRPIPILACGNDDCRIHIFAQQNDQFQKVLSLCGHEDWIRGVEWAAFGRDLFLASCSQDCLIRIWKLYIKSTSLETQDDDNIRLKENTFTIENESVKIAFAVTLETVLAGHENWVNAVHWQPVFYKDGVLQQPVRLLSASMDKTMILWAPDEESGVWLEQREWTPEIVISGHFDGVQDLVWDPEGEFIITVGTDQTTRLFAPWKRKDQSQVTWHEIARPQIHGYDLKCLAMINRFQFVSGADEKVLRVFSAPRNFVENFCAITGQSLNHVLCNQDSDLPEGATVPALGLSNKAVFQGDIASQPSDEEELLTSTGFEYQQVAFQPSILTEPPTEDHLLQNTLWPEVQKLYGHGYEIFCVTCNSSKTLLASACKAAKKEHAAIILWNTTSWKQVQNLVFHSLTVTQMAFSPNEKFLLAVSRDRTWSLWKKQDTISPEFEPVFSLFAFTNKITSVHSRIIWSCDWSPDSKYFFTGSRDKKVVVWGECDSTDDCIEHNIGPCSSVLDVGGAVTAVSVCPVLHPSQRYVVAVGLECGKICLYTWKKTDQVPEINDWTHCVETSQSQSHTLAIRKLCWKNCSGKTEQKEAEGAEWLHFASCGEDHTVKIHRVNKCAL

SEQ ID NO: 4707 - protein, 51 aa, Homo sapiens
MVAPVLETSHVFCCPNRVRGVLNWSSGPRGLLAFGTSCSVVLYDPLPLLLN

SEQ ID NO: 4708 - protein, 51 aa, Homo sapiens; identical to SEQ ID NO: 4707

SEQ ID NO: 4709 - protein, 150 aa, Homo sapiens
MTRWSSYLLGWTTFLLYSYESSGDYPRCIFPFIYRGKAYNSCISQGSFLGSLWCSVTSVFDEKQQWKFCETNEYGGNSLRKPCIFPSIYRNNVVSDCMEDESNKLWCPTTENMDKDGKWSFCADTRISALVPGFPCHFPFNYKNKNYFNC

SEQ ID NO: 4710 - protein, 75 aa, Homo sapiens
MTRWSSYLLGWTTFLLYSYESSGGISALVPGFPCHFPFNYKNKNYFNCTNEGSKENLVWCATSYNYDQDHTWVYC

SEQ ID NO: 4711 - protein, 223 aa, Homo sapiens [sequence omitted]

SEQ ID NO: 4712 - protein, 220 aa, Homo sapiens
MVQLPVGWTTFLLYSYESSGGMHEECVFPFTYKGSVYFTCTHIHSLSPWCATRAVYNGQWKYCQSEDYPRCIFPFIYRGKAYNSCISQGSFLGSLWCSVTSVFDEKQQWKFCETNEYGGNSLRKPCIFPSIYRNNVVSDCMEDESNKLWCPTTENMDKDGKWSFCADTRISALVPGFPCHFPFNYKNKNYFNCTNEGSKENLVWCATSYNYDQDHTWVYC

SEQ ID NO: 4713 - protein, 76 aa, Homo sapiens
SNKLWCPTTENMDKDGKWSFCADTRISALVPGFPCHFPFNYKNKNYFNCTNEGSKENLVWCATSYNYDQDHTWVYC

SEQ ID NO: 4714 - protein, 154 aa, Homo sapiens
  SITE 1: note = misc_feature - Xaa can be any naturally occurring amino acid
XYPRCIFPFIYRGKAYNSCISQGSFLGSLWCSVTSVFDEKQQWKFCETNEYGGNSLRKPCIFPSIYRNNVVSDCMEDESNKLWCPTTENMDKDGKWSFCADTRISALVPGFPCHFPFNYKNKNYFNCTNEGSKENLVWCATSYNYDQDHTWVYC

SEQ ID NO: 4715 - protein, 178 aa, Homo sapiens
FIGIFLIDGVTGRIIHSSVQKKAKGPVHIVHSENWVVYQYWNTKARRNEFTVLELYEGTEQYNATAFSSLDRPQLPQVLQQSYIFPSSISAMEATITERGITSRHLLSFAGSPPPRDPNRTKQMYRYTQSDSSTITRQFLECEVSTQLPRVWSPLVWLWPMVWTFTKLESTHPSSLTF

SEQ ID NO: 4716 - protein, 75 aa, Homo sapiens
MAAEWASRFWLWATLLIPAAAVYEDQVGKFDWRQQYVGKVKFASLEFSPGSKKLVVATEKNVIAALNSRTGEICE

SEQ ID NO: 4717 - protein, 992 aa, Homo sapiens
MAAEWASRFWLWATLLIPAAAVYEDQVGKFDWRQQYVGKVKFASLEFSPGSKKLVVATEKNVIAALNSRTGEILWRHVDKGTAEGAVDAMLLHGQDVITVSNGGRIMRSWETNIGGLNWEITLDSGSFQALGLVGLQESVRYIAVLKKTTLALHHLSSGHLKWVEHLPESDSIHYQMVYSYGSGVVWALGVVPFSHVNIVKFNVEDGEIVQQVRVSTPWLQHLSGACGVVDEAVLVCPDPSSRSLQTLALETEWELRQIPLQSLDLEFGSGFQPRVLPTQPNPVDASRAQFFLHLSPSHYALLQYHYGTLSLLKNFPQTALVSFATTGEKTVAAVMACRNEVKSSSSEDGSMGSFSEKSSSKDSLACFNQTYTINLYLVETGRRLLDTTITFSLEQSGTRPERLYIQVFLKKDDSVGYRALVQTEDHLLLFLQQLAGKVVLWSREESLAEVVCLEMVDLPLTGAQAELEGEFGKKADGLLGMFLKRLSSQLILLQAWTSHLWKMFYDARKPRSQIKNEINIDTLARDEFNLQKMMVMVTASGKLFGIESSSGTILWKQYLPNVKPDSSFKLMVQRTTAHFPHPPQCTLLVKDKESGMSSLYVFNPIFGKWSQVAPPVLKRPILQSLLLPVMDQDYAKVLLLIDDEYKVTAFPATRNVLRQLHELAPSIFFYLVDAEQGRLCGYRLRKDLTTELSWELTIPPEVQRIVKVKGKRSSEHVHSQGRVMGDRSVLYKSLNPNLLAVVTESTDAHHERTFIGIFLIDGVTGRIIHSSVQKKAKGPVHIVHSENWVVYQYWNTKARRNEFTVLELYEGTEQYNATAFSSLDRPQLPQVLQQSYIFPSSISAMEATITERGITSRHLLIGLPSGAILSLPKALLDPRRPEIPTEQSREENLIPYSPDVQIHAERFINYNQTVSRMRGIYTAPSGLESTCLVVAYGLDIYQTRVYPSKQFDVLKDDYDYVLISSVLFGLVFATMITKRLAQVKLLNRAWR

SEQ ID NO: 4718 - protein, 993 aa, Homo sapiens
MAAEWASRFWLWATLLIPAAAVYEDQVGKFDWRQQYVGKVKFASLEFSPGSKKLVVATEKNVIAALNSRTGEILWRHVDKGTAEGAVDAMLLHGQDVITVSNGGRIMRSWETNIGGLNWEITLDSGSFQALGLVGLQESVRYIAVLKKTTLALHHLSSGHLKWVEHLPESDSIHYQMVYSYGSGVVWALGVVPFSHVNIVKFNVEDGEIVQQVRVSTPWLQHLSGACGVVDEAVLVCPDPSSRSLQTLALETEWELRQIPLQSLDLEFGSGFQPRVLPTQPNPVDASRAQFFLHLSPSHYALLQYHYGTLSLLKNFPQTALVSFATTGEKTVAAVMACRNEVQKSSSSEDGSMGSFSEKSSSKDSLACFNQTYTINLYLVETGRRLLDTTITFSLEQSGTRPERLYIQVFLKKDDSVGYRALVQTEDHLLLFLQQLAGKVVLWSREESLAEVVCLEMVDLPLTGAQAELEGEFGKKADGLLGMFLKRLSSQLILLQAWTSHLWKMFYDARKPRSQIKNEINIDTLARDEFNLQKMMVMVTASGKLFGIESSSGTILWKQYLPNVKPDSSFKLMVQRTTAHFPHPPQCTLLVKDKESGMSSLYVFNPIFGKWSQVAPPVLKRPILQSLLLPVMDQDYAKVLLLIDDEYKVTAFPATRNVLRQLHELAPSIFFYLVDAEQGRLCGYRLRKDLTTELSWELTIPPEVQRIVKVKGKRSSEHVHSQGRVMGDRSVLYKSLNPNLLAVVTESTDAHHERTFIGIFLIDGVTGRIIHSSVQKKAKGPVHIVHSENWVVYQYWNTKARRNEFTVLELYEGTEQYNATAFSSLDRPQLPQVLQQSYIFPSSISAMEATITERGITSRHLLIGLPSGAILSLPKALLDPRRPEIPTEQSREENLIPYSPDVQIHAERFINYNQTVSRMRGIYTAPSGLESTCLVVAYGLDIYQTRVYPSKQFDVLKDDYDYVLISSVLFGLVFATMITKRLAQVKLLNRAWR

SEQ ID NO: 4719 - protein, 971 aa, Homo sapiens
MAAEWASRFWLWATLLIPAAAVYEDQVGKFDWRQQYVGKVKFASLEFSPGSKKLVVATEKNVIAALNSRTGEIYVITVSNGGRIMRSWETNIGGLNWEITLDSGSFQALGLVGLQESVRYIAVLKKTTLALHHLSSGHLKWVEHLPESDSIHYQMVYSYGSGVVWALGVVPFSHVNIVKFNVEDGEIVQQVRVSTPWLQHLSGACGVVDEAVLVCPDPSSRSLQTLALETEWELRQIPLQSLDLEFGSGFQPRVLPTQPNPVDASRAQFFLHLSPSHYALLQYHYGTLSLLKNFPQTALVSFATTGEKTVAAVMACRNEVQKSSSSEDGSMGSFSEKSSSKDSLACFNQTYTINLYLVETGRRLLDTTITFSLEQSGTRPERLYIQVFLKKDDSVGYRALVQTEDHLLLFLQQLAGKVVLWSREESLAEVVCLEMVDLPLTGAQAELEGEFGKKADGLLGMFLKRLSSQLILLQAWTSHLWKMFYDARKPRSQIKNEINIDTLARDEFNLQKMMVMVTASGKLFGIESSSGTILWKQYLPNVKPDSSFKLMVQRTTAHFPHPPQCTLLVKDKESGMSSLYVFNPIFGKWSQVAPPVLKRPILQSLLLPVMDQDYAKVLLLIDDEYKVTAFPATRNVLRQLHELAPSIFFYLVDAEQGRLCGYRLRKDLTTELSWELTIPPEVQRIVKVKGKRSSEHVHSQGRVMGDRSVLYKSLNPNLLAVVTESTDAHHERTFIGIFLIDGVTGRIIHSSVQKKAKGPVHIVHSENWVVYQYWNTKARRNEFTVLELYEGTEQYNATAFSSLDRPQLPQVLQQSYIFPSSISAMEATITERGITSRHLLIGLPSGAILSLPKALLDPRRPEIPTEQSREENLIPYSPDVQIHAERFINYNQTVSRMRGIYTAPSGLESTCLVVAYGLDIYQTRVYPSKQFDVLKDDYDYVLISSVLFGLVFATMITKRLAQVKLLNRAWR

SEQ ID NO: 4720 - protein, 86 aa, Homo sapiens
  SITE 1: note = misc_feature - Xaa can be any naturally occurring amino acid
XNATAFSSLDRPQLPQVLQQSYIFPSSISAMEATITERGITSRHLLIGLPSGAILSLPKALLDPRRPEIPTEQSRCTDTRRAIHQL

SEQ ID NO: 4721 - protein, 191 aa, Homo sapiens
  SITE 1: note = misc_feature - Xaa can be any naturally occurring amino acid
XSSKDSLACFNQTYTINLYLVETGRRLLDTTITFSLEQSGTRPERLYIQVFLKKDDSVGYRALVQTEDHLLLFLQQLAGKVVLWSREESLAEVVCLEMVDLPLTGAQAELEGEFGKKAAIQDGLLGMFLKRLSSQLILLQAWTSHLWKMFYDARKPRSQIKNEINIDTLARDEFNLQKMMVMVTASGKVSG

SEQ ID NO: 4722 - protein, 43 aa, Homo sapiens
MAAASAGATRLLLLLLMAHSFEIDDSANFRKRGSLLWNQQDGT

SEQ ID NO: 4723 - protein, 254 aa, Homo sapiens
MAAASAGATRLLLLLLMAVAAPSRARGSGCRAGTGARGAGAEGREGEACGTVGLLLEHSFEIDDSANFRKRGSLLWNQQDGTLSLSQRQLSEEERGRLRDVAALNGLYRVRIPRRPGALDGLEAGGYVSSFVPACSLVESHLSDQLTLHVDVAGNVVGVSVVTHPGGCRGHEVEDVDLELFNTSVQLQPPTTAPGPETAAFIERLEMEQAQKAKNPQEQKSFFAKYWHIILGGAVLLTALRPAAPGPAPPPQEA

SEQ ID NO: 4724 - protein, 262 aa, Homo sapiens
MAAASAGATRLLLLLLMAVAAPSRARGSGCRAGTGARGAGAEGREGEACGTVGLLLEHSFEIDDSANFRKRGSLLWNQQDGTLSLSQRQLSEEERGRLRDVAALNGLYRVRIPRRPGALDGLEAGGYVSSFVPACSLVESHLSDQLTLHVDVAGNVVGVSVVTHPGGCRGHEVEDVDLELFNTSVQLQPPTTAPGPETAAFIERLEMEQAQKAKNPQEQKSFFAKYWMYIIPVVLFLMMSGAPDTGGQGGGGGGGGGGGSGR

SEQ ID NO: 4725 - protein, 371 aa, Homo sapiens
MAAASAGATRLLLLLLMAVAAPSRARGSGCRAGTGARGAGAEGREGEACGTVGLLLEHSFEIDDSANFRKRGSLLWNQQDGTLSLSQRQLSEEERGRLRDVAALNGLYRVRIPRRPGALDGLEAGGYVSSFVPACSLVESHLSDQLTLHVDVAGNVVGVSVVTHPGGCRGHEVEDVDLELFNTSVQLQPPTTAPGPETAAFIERLEMEQAQKAKNPQEQKSFFAKYWMYIIPVVLFLMMSGAPDTGGQGGGGGGGGGGGSGRPLSSAFCWQRSSWTGAFGTAAGVSCARLPHGPMQPQGLPPCPWSRARDPGHYASSDLASPYPEPMQSGNMPPSLQPLCLCSRWSHPPVPGWARWSCPGSCSAPLTLTLD

SEQ ID NO: 4726 - protein, 42 aa, Homo sapiens
MAAASAGATRLLLLLLMAVAAPSRARGSGCRAGTGARGVSAL

SEQ ID NO: 4727 - protein, 42 aa, Homo sapiens; identical to SEQ ID NO: 4726

SEQ ID NO: 4728 - protein, 89 aa, Homo sapiens [sequence omitted]

SEQ ID NO: 4729 - protein, 94 aa, Homo sapiens
MGEVEISALAYVKMCLHAARYPHAAVNGLFLAPAPRSGECLCLTDCVPLFHSHLALSVMLEVALNQVDVWGAQAGLVVAGYYHANAAVNDQSNI

SEQ ID NO: 4730 - protein, 208 aa, Homo sapiens
MGEVEISALAYVKMCLHAARYPHAAVNGLFLAPAPRSGECLCLTDCVPLFHSHLALSVMLEVALNQVDVWGAQAGLVVAGYYHANAAVNDQSPGPLALKIAGRIAEFFPDAVLIMLDNQKLVPQPRVPPVIVLENQGLRWVPKDKNLVMWRDWEESRQMVGALLEDRAHQHLVDFDCHLDDIRQDWTNQRLNTQITQWVGPTNGNGNA

SEQ ID NO: 4731 - protein, 208 aa, Homo sapiens; identical to SEQ ID NO: 4730

SEQ ID NO: 4732 - protein, 134 aa, Homo sapiens
MGFAHSWLLTPLIFPLHSPGPLALKIAGRIAEFFPDAVLIMLDNQKLVPQPRVPPVIVLENQGLRWVPKDKNLVMWRDWEESRQMVGALLEDRAHQHLVDFDCHLDDIRQDWTNQRLNTQITQWVGPTNGNGNA

SEQ ID NO: 4733 - protein, 76 aa, Homo sapiens
LMSTATFLTSKDEGLKATTTDVRKNDSIISNVTVTSVTLPNAVSTLQSSKPKTETQSSIKTTEIPGEHSAQGKTKN

SEQ ID NO: 4734 - protein, 248 aa, Homo sapiens
MELLQVTILFLLPSICSSNSTGVLEAANNSLVVTTTKPSITTPNTESLQKNVVTPTTGTTPKGTITNELLKMSLMSTATFLTSKDEGLKATTTDVRKNDSIISNVTVTSVTLPNAVSTLQSSKPKSSVLQPDASPSKTGTLTSIPVTIPENTSQSQVIGTEGGKNASTSATSRSYSSIILPVVIALIVITLSVFVLVGLYRMCWKADPGTPENGNDQPQSDKESVKLLTVKTISHESGEHSAQGKTKN

SEQ ID NO: 4735 - protein, 165 aa, Homo sapiens
MELLQVTILFLLPSICSSNSTGVLEAANNSLVVTTTKPSITTPNTESLQKNVVTPTTGTTPKGTITNELLKMSLMSTATFLTSKDEGLKATTTDVRKNDSIISNVTVTSVTLPNAVSTLQSSKPKTETQSSIKTTEIPGIILPVVIALIVITLSVFVLVGLYRMC

SEQ ID NO: 4736 - protein, 261 aa, Homo sapiens
MELLQVTILFLLPSICSSNSTGVLEAANNSLVVTTTKPSITTPNTESLQKNVVTPTTGTTPKGTITNELLKMSLMSTATFLTSKDEGLKATTTDVRKNDSIISNVTVTSVTLPNAVSTLQSSKPKTETQSSIKTTEIPGSVLQPDASPSKTGTLTSIPVTIPENTSQSQVIGTEGGKNASTSATSRSYSSIILPVVIALIVITLSVFVLVGLYRMCWKADPGTPENGNDQPQSDKESVKLLTVKTISHESGEHSAQGKTKN

SEQ ID NO: 4737 - protein, 178 aa, Homo sapiens
MELLQVTILFLLPSICSSNSTGVLEAANNSLVVTTTKPSITTPNTESLQKNVVTPTTGTTPKGTITNELLKMSLMSTATFLTSKDEGLKATTTDVRKNDSIISNVTVTSVTLPNAVSTLQSSKPKTETQSSIKTTEIPGTPENGNDQPQSDKESVKLLTVKTISHESGEHSAQGKTKN

SEQ ID NO: 4738 - protein, 34 aa, Homo sapiens
MGGPRAWALLCLGLLLPGGGAAWSIGAAPFSGRR

SEQ ID NO: 4739 - protein, 175 aa, Homo sapiens
MGGPRAWALLCLGLLLPGGGAAWSIGAAPFSGRRNWCSYVVTRTISCHVQNGTYLQRVLQNCPWPMSCPGSSYRTVVRPTYKVMYKIVTAREWRCCPGHSGVSCEEGCLNCSKVSELTERLKVLEAKMTMLTVIEQPVPPTPATPEDPAPLWGPPPAQGSPGDGGLQDQVGAWGL

SEQ ID NO: 4740 - protein, 443 aa, Homo sapiens
MGGPRAWALLCLGLLLPGGGAAWSIGAAPFSGRRNWCSYVVTRTISCHVQNGTYLQRVLQNCPWPMSCPGSSYRTVVRPTYKVMYKIVTAREWRCCPGHSGVSCEEVAASSASLEPMWSGSTMRRMALRPTAFSGCLNCSKVSELTERLKVLEAKMTMLTVIEQPVPPTPATPEDPAPLWGPPPAQGSPGDGGLQDQVGAWGLPGPTGPKGDAGSRGPMGMRGPPGPQGPPGSPGRAGAVGTPGERGPPGPPGPPGPPGPPAPVGPPHARISQHGDPLLSNTFTETNNHWPQGPTGPPGPPGPMGPPGPPGPTGVPGSPGHIGPPGPTGPKGISGHPGEKGERGLRGEPGPQGSAGQRGEPGPKGDPGEKSHWGEGLHQLREALKILAERVLILETMIGLYEPELGSGAGPAGTGTPSLLRGKRGGHATNYRIVAPRSRDERG

SEQ ID NO: 4741 - protein, 422 aa, Homo sapiens
MGGPRAWALLCLGLLLPGGGAAWSIGAAPFSGRRNWCSYVVTRTISCHVQNGTYLQRVLQNCPWPMSCPGSSYRTVVRPTYKVMYKIVTAREWRCCPGHSGVSCEEVAASSASLEPMWSGSTMRRMALRPTAFSGCLNCSKVSELTERLKVLEAKMTMLTVIEQPVPPTPATPEDPAPLWGPPPAQGSPGDGGLQDQVGAWGLPGPTGPKGDAGSRGPMGMRGPPGPQGPPGSPGRAGAVGTPGERGPPGPPGPPGPPGPPAPVGPPHARISQHGDPLLSNTFTETNNHWPQGPTGPPGPPGPMGPPGPPGPTGVPGSPGHIGLRGEPGPQGSAGQRGEPGPKGDPGEKSHWGEGLHQLREALKILAERVLILETMIGLYEPELGSGAGPAGTGTPSLLRGKRGGHATNYRIVAPRSRDERG

SEQ ID NO: 4742 - protein, 445 aa, Homo sapiens
MGGPRAWALLCLGLLLPGGGAAWSIGAAPFSGRRNWCSYVVTRTISCHVQNGTYLQRVLQNCPWPMSCPGSSYRTVVRPTYKVMYKIVTAREWRCCPGHSGVSCEEVAASSASLEPMWSGSTMRRMALRPTAFSGCLNCSKVSELTERLKVLEAKMTMLTVIEQPVPPTPATPEDPAPLWGPPPAQGSPGDGGLQDQVGAWGLPGPTGPKGDAGSRGPMGMRGPPGPQGPPGSPGRAGAVGTPGERGPPGPPGPPGPPGPPAPVGPPHARISQHGDPLLSNTFTETNNHWPQGPTGPPGPPGPMGPPGPPGPTGVPGSPGHIGPPGPTGPKGISGHPGEKGERGLRGEPGPQGSAGQRGEPGPKGDPGEKSHWAPSLQSFLQQQAQLELLARRVTLLEAIIWPEPELGSGAGPAGTGTPSLLRGKRGGHATNYRIVAPRSRDERG

SEQ ID NO: 4743 - protein, 212 aa, Homo sapiens
MGGPRAWALLCLGLLLPGGGAAWSIGAAPFSGRRNWCSYVVTRTISCHVQNGTYLQRVLQNCPWPMSCPGSSYRTVVRPTYKVMYKIVTAREWRCCPGHSGVSCEEVAASSASLEPMWSGSTMRRMALRPTAFSGCLNCSKVSELTERLKVLEAKMTMLTVIEQPVPPTPATPEDPAPLWGPPPAQGSPGDGGLQGDPLLSNTFTETNNHWP

SEQ ID NO: 4744 - protein, 236 aa, Homo sapiens
  SITE 1: note = misc_feature - Xaa can be any naturally occurring amino acid
XMTMLTVIEQPVPPTPATPEDPAPLWGPPPAQGSPGDGGLQGLPGAIESVRVPLLPRNDQVGAWGLPGPTGPKGDAGSRGPMGMRGPPGPQGPPGSPGRAGAVGTPGERGPPGPPGPPGPPGPPAPVGPPHARISQHGDPLLSNTFTETNNHWPQGPTGPPGPPGPMGPPGPPGPTGVPGSPGHIGPPGPTGPKGISGHPGEKGERGLRGEPGPQGSAGQRGEPGPKGDPGEKSHW

SEQ ID NO: 4745 - protein, 1016 aa, Homo sapiens
MAPRTLWSCYLCCLLTAAAGAASYPPRGFSLYTGSSGALSPGGPQAQIAPRPASRHRNWCAYVVTRTVSCVLEDGVETYVKYQPCAWGQPQCPQSIMYRRFLRPRYRVAYKTVTDMEWRCCQGYGGDDCAESPAPALGPASSTPRPLARPARPNLSGSSAGSPLSGLGGEGPGESEKVQQLEEQVQSLTKELQGLRGVLQGLSGRLAEDVQRAVETAFNGRQQPADAAARPGVHETLNEIQHQLQLLDTRVSTHDQELGHLNNHHGGSSSSGGSRAPAPASAPPGPSEELLRQLEQRLQESCSVCLAGLDGFRRQQQEDRERLRAMEKLLASVEERQRHLAGLAVGRRPPQECCSPELGRRLAELERRLDVVAGSVTVLSGRRGTELGGAAGQGGHPPGYTSLASRLSRLEDRFNSTLGPSEEQEESWPGAPGGLSHWLPAARGRLEQLGGLLANVSGELGGRLDLLEEQVAGAMQACGQLCSGAPGEQDSQVSEILSALERRVLDSEGQLRLVGSGLHTVEAAGEARQATLEGLQEVVGRLQDRVDAQDETAAEFTLRLNLTAARLGQLEGLLQAHGDEGCGACGGVQEELGRLRDGVERCSCPLLPPRGPGAGPGVGGPSRGPLDGFSVFGGSSGSALQALQGELSEVILSFSSLNDSLNELQTTVEGQGADLADLGATKDRIISEINRLQQEATEHATESEERFRGLEEGQAQAGQCPSLEGRLGRLEGVCERLDTVAGGLQGLREGLSRHVAGLWAGLRETNTTSQMQAALLEKLVGGQAGLGRRLGALNSSLQLLEDRLHQLSLKDLTGPAGEAGPPGPPGLQGPPGPAGPPGSPGKDGQEGPIGPPGPQGEQGVEGAPAAPVPQVAFSAALSLPRSEPGTVPFDRVLLNDGGYYDPETGVFTAPLAGRYLLSAVLTGHRHEKVEAVLSRSNQGVARVDSGGYEPEGLENKPVAESQPSPGTLGVFSLILPLQAGDTVCVDLVMGQLAHSEEPLTIFSGALLYGDPELEHA

SEQ ID NO: 4746 - protein, 347 aa, Homo sapiens
  SITE 1: note = misc_feature - Xaa can be any naturally occurring amino acid
XADLGATKDRIISEINRLQQEATEHATESEERFRGLEEGQAQAGQCPSLEGRLGRLEGVCERLDTVAGGLQGLREGLSRHVAGLWAGLRETNTTSQMQAALLEKLVGGQAGLGRRLGALNSSLQLLEDRLHQLSLKDLTGEGTKGPAGEAGPPGPPGLQGPPGPAGPPGSPGKDGQEGPIGPPGPQGEQGVEGAPAAPVPQVAFSAALSLPRSEPGTVPFDRVLLNDGGYYDPETGVFTAPLAGRYLLSAVLTGHRHEKVEAVLSRSNQGVARVDSGGYEPEGLENKPVAESQPSPGTLGVFSLILPLQAGDTVCVDLVMGQLAHSEEPLTIFSGALLYGDPELEHA

SEQ ID NO: 4747 - protein, 1053 aa, Homo sapiens
MWQPRRPWPRVPWRWALALLALVGAGLCHAGPQPGYPARPSARNKNWCAYIVNKNVSCSVLEGSESFIQAQYNCAWNQMPCPSALVYRVNFRPRYVTRYKTVTQLEWRCCPGFRGGDCQEGPKDPVKTLRPTPARPRNSLKKATDNEPSQFSEPRKTLSPTGTAQPSWGVDPKEGPQELQEKKIQVLEEKVLRLTRTVLDLQSSLAGVSENLKHATQDDASRTRAPGLSSQHPKPDTTVSGDTETGQSPGVFNTKESGMKDIKSELAEVKDTLKNKSDKLEELDGKVKGYEGQLRQLQEAAQGPTVTMTTNELYQAYVDSKIDALREELMEGMDRKLADLKNSCEYKLTGLQQQCDDYGSSYLGVIELIGEKETSLRKEINNLRARLQEPSAQANCCDSEKNGDIGQQIKTLDQKIERVAEATRMLNGRLDNEFDRLIVPEPDVDFDAKWNELDARINVTEKNAEEHCFYIEETLRGAINGEVGDLKQLVDQKIQSLEDRLGSVLLQMTNNTGAELSPPGAAALPGVSGSGDERVMMELNHLKDKVQVVEDICLLNIQGKPHGMEGALPNREDRAVRDSLHLLKSLNDTMHRKFQETEQTIQKLQQDFSFLYSQLNHTENDVTHLQKEMSNCRAGENAGMGRFTKVGEQERTVDTLPSPQHPVAHCCSQLEERWQRLQSQVISELDACKECTQGVQREVSMVEGRVSHMEKTCSKLDSISGNLQRIKEGLNKHVSSLWNCVRQMNGTLRSHSRDISGLKNSVQQFYSHVFQISTDLQDLVKFQPSAKAPSPPPPAEAPKEPLQPEPAPPRPSGPATAEDPGRRPVLPQRPPEERPPQPPGSTGVIAETGQAGPPAGAGVSGRGLPRGVDGQTGSGTVPGAEGFAGAPGYPKSPPVASPGAPVPSLVSFSAGLTQKPFPSDGGVVLFNKVLVNDGDVYNPSTGVFTAPYDGRYLITATLTPERDAYVEAVLSVSNASVAQLHTAGYRREFLEYHRPPGALHTCGGPGAFHLIVHLKAGDAVNVVVTGGKLAHTDFDEMYSTFSGVFLYPFLSHL

SEQ ID NO: 4748 - protein, 766 aa, Homo sapiens
MGRRRLLVWLCAVAALLSGAQARGTPLLARPAPPGASRYSLYTTGWRPRLRPGPHKALCAYVVHRNVTCILQEGAESYVKAEYRQCRWGPKCPGTVTYRTVLRPKYKVGYKTVTDLAWRCCPGFTGKRCPEHLTDHGAASPQLEPEPQIPSGQLDPGPRPPSYSRAAPSPHGRKGPGLFGERLERLEGDVQRLAQTYGTLSGLVASHEDPNRMTGGPRAPAVPVGFGVIPEGLVGPGDRARGPLTPPLDEILSKVTEVSNTLQTKVQLLDKVHGLALGHEAHLQRLREAPPSPLTSLALLEEYVDRRLHRLWGSLLDGFEQKLQGVQSECDLRVQEVRRQCEEGQAASRRLHQSLDGRELALRQELSQLGSQLQGLSVSGRGSCCGQLALINARMDGLERALQAVTETQRGPGAPAGDELTRLSAAMLEGGVDGLLEGLETLNGTEGGARGCCLRLDMGGWGVGGFGTMLEERVQSLEERLATLAGELSHDSASPGRSARPLVQTELAVLEQRLVSLETSCTPSTTSAILDSLVAEVKAWQSRSEALLRQVASHAALLQQLNGTVAEVQGQLAEGTGSSLQGEITLLKVNLNSVSKSLTGLSDSVSQYSDAFLAANTSLDERERKVEAEVQAIQEQVSSQGSRLQAGHRQVLNLRGELEQLKAGVAKVASGLSRCQDTAQKLQHTVGHFDQRVAQVEGACRRLGLLAAGLDSLPTEPLRPREGLWSHVDQLNRTLAQHTQDIARLRDDLLDCQAQLAEQVRPGQAN

SEQ ID NO: 4749 - protein, 1142 aa, Homo sapiens
MLVLRCRLGTSFPKLDNLVPKGKMKILLVFLGLLGNSVAMPMHMPRMPGFSSKSEEMMRYNQFNFMNGPHMAHLGPFFGNGLPQQFPQYQMPMWPQPPPNTWHPRKSSAPKRHNKTDQTQETQKPNQTQSKKPPQKRPLKQPSHNQPQPEEEAQPPQAFPPFGNGLFPYQQPPWQIPQRLPPPGYGRPPISNEEGGNPYFGYFGYHGFGGRPPYYSEEMFEQDFEKPKEEDPPKAESPGTEPTANSTVTETNSTQPNPKGSQGGNDTSPTGNSTPGLNTGNNPPAQNGIGPLPAVNASGQGGPGSQIPWRPSQPNIRENHPYPNIRNFPSGRQWYFTGTVMGHRQNRPFYRNQQVQRGPRWNFFAWERKQVARPGNPVYHKAYPPTSRGNYPNYAGNPANLRRKPQGPNKHPVGTTVAPLGPKPGPVVRNEKIQNPKEKPLGPKEQIIVPTKNPTSPWRNSQQYEVNKSNYKLPHSEGYMPVPNFNSVDQHENSYYPRGDSRKVPNSDGQTQSQNLPKGIVLGSRRMPYESETNQSELKHSSYQPAVYPEEIPSPAKEHFPAGRNTWDHQEISPPFKEDPGRQEEHLPHPSHGSRGSVFYPEYNPYDPRENSPYLRGNTWDERDDSPNTMGQKESPLYPINTPDQKEIVPYNEEDPVDPTGDEVFPGQNRWGEELSFKGGPTVRHYEGEQYTSNQPKEYLPYSLDNPSKPREDFYYSEFYPWSPDENFPSYNTASTMPPPIESRGYYVNNAAGPEESTLFPSRNSWDHRIQAQGQRERRPYFNRNIWDQATHLQKAPARPPDQKGNQPYYSNTPAGLQKNPIWHEGENLNYGMQITRMNSPEREHSSFPNFIPPSYPSGQKEAHLFHLSQRGSCCAGSSTGPKDNPLALQDYTPSYGLAPGENQDTSPLYTDGSHTKQTRDIISPTSILPGQRNSSEKRESQNPFRDDVSTLRRNTPCSIKNQLGQKEIMPFPEASSLQSKNTPCLKNDLGGDGNNILEQVFEDNQLNERTVDLTPEQLVIGTPDEGSNPEGIQSQVQENESERQQQRPSNILHLPCFGSKLAKHHSSTTGTPSSDGRQSPFDGDSITPTENPNTLVELATEEQFKSINVDPLDADEHSPFEFLQRGTNVQDQVQDCLLLQA

SEQ ID NO: 4750 - protein, 297 aa, Homo sapiens
MRALRAGLTLASGAGLGAVVEGWRRRREDARAAPGLLGRLPVLPVAAAAELPPVPGGPRGPGELAKYGLPGLAQLKSRESYVLCYDPRTRGALWVVEQLRPERLRGDGDRRECDFREDDSVHAYHRATNADYRGSGFDRGHLAAAANHRWSQKAMDDTFYLSNVAPQVPHLNQNAWNNLEKYSRSLTRSYQNVYVCTGPLFLPRTEADGKSYVKYQVIGKNHVAVPTHFFKVLILEAAGGQIELRTYVMPNAPVDEAIPLERFLVPIESIERASGLLFVPNILARAGSLKAITAGSK

SEQ ID NO: 4751 - protein, 347 aa, Homo sapiens
MRACISLVLAVLCGLAWADLYSAPTSCQGRCYEAFDKHHQCHCNARCQEFGNCCKDFESLCSDHEVSHSSDAITKEEIQSISEKIYRADTNKAQKEDIVLNSQNCISPSETRNQVDRCPKPLFTYVNEKLFSKPTYAAFINLLNNYQRATGHGEHFSAQELAEQDAFLREIMKTAVMKELYSFLHHQNRYGSEQEFVDDLKNMWFGLYSRGNEEGDSSGFEHVFSGEVKKGKVTGFHNWIRFYLEEKEGLVDYYSHIYDGPWDSYPDVLAMQFNWDGYYKEVGSAFIGSSPEFEFALYSLCFIARPGKVCQLSLGGYPLAVRTYTWDKSTYGNGKKYIATAYIVSST

SEQ ID NO: 4752 - protein, 369 aa, Homo sapiens
MRACISLVLAVLCGLAWAEDHKESEPLPQLEEETEEALASNLYSAPTSCQGRCYEAFDKHHQCHCNARCQEFGNCCKDFESLCSDHEVSHSSDAITKEEIQSISEKIYRADTNKAQKEDIVLNSQNCISPSETRNQVDRCPKPLFTYVNEKLFSKPTYAAFINLLNNYQRATGHGEHFSAQELAEQDAFLREIMKTAVMKELYSFLHHQNRYGSEQEFVDDLKNMWFGLYSRGNEEGDSSGFEHVFSGEVKKGKVTGFHNWIRFYLEEKEGLVDYYSHIYDGPWDSYPDVLAMQFNWDGYYKEVGSAFIGSSPEFEFALYSLCFIARPGKVCQLSLGGYPLAVRTYTWDKSTYGNGKKYIATAYIVSST

SEQ ID NO: 4753 - protein, 410 aa, Homo sapiens
MRACISLVLAVLCGLAWAGKIESCASRCNEKFNRDAACQCDRRCLWHGNCCEDYEHLCTEDHKESEPLPQLEEETEEALASNLYSAPTSCQGRCYEAFDKHHQCHCNARCQEFGNCCKDFESLCSDHEVSHSSDAITKEEIQSISEKIYRADTNKAQKEDIVLNSQNCISPSETRNQVDRCPKPLFTYVNEKLFSKPTYAAFINLLNNYQRATGHGEHFSAQELAEQDAFLREIMKTAVMKELYSFLHHQNRYGSEQEFVDDLKNMWFGLYSRGNEEGDSSGFEHVFSGEVKKGKVTGFHNWIRFYLEEKEGLVDYYSHIYDGPWDSYPDVLAMQFNWDGYYKEVGSAFIGSSPEFEFALYSLCFIARPGKVCQLSLGGYPLAVRTYTWDKSTYGNGKKYIATAYIVSST

SEQ ID NO: 4754 - protein, 76 aa, Homo sapiens
MGAAISQGALIAIVCNGLVGFLLLLLWVILCWACHSRSADVDSLSESSPNSSPGPCPEKAPPPQKPSHEGSYLLQP

SEQ ID NO: 4755 - protein, 363 aa, Homo sapiens
MAIGAVSLAVAKACAMLLNKPLYLNIALLKHNQEQPTTLSMPLLMVSLVSCGKSSSGKLNLMKEVICIPHPELTTKQGVEMLMEMQKHINKIIEMPSPPKAETKKGHDGSKRGQQQITGKMSHLGCLTINCDSIEQPLLLIQEICANLGLELGTNLHLAINCAGHELMDYNKGKYEVIMGTYKNAAEMVDLYVDLINKYPSIIALIDPFRKEDSEQWDSIYHALGSRCYIIAGTASKSISKLLEQGNISIPKSNGLIIKHTNQTTMSDLVEITNLIDSKKHITVFGSTEGESSDDSLVDLAVGLGVRFIKLGGLSRGERVTKYNRLLTIEEELVQNGTLATSSSSCDARIGGQEQETMTLVKV

SEQ ID NO: 4756 - protein, 625 aa, Homo sapiens
MEEEGGGRSCGTTRELQKLKQQAMEYYRENDVPRRLEELLNSTFYLQPADVYGHLANCFSKLAKPPTICKIVGKDVLDGLGLPTLQVDIFCTIQNFPKNVCSVVISTHFEVHENALPELAKAEEAERASAVSTAVQWVNSTITHELQGMAPSDQAEVDHLLRIFFASKVQEDKGRKELEKSLEYSTVPTPLPPVPPPPPPPPPTKKKGQKPGRKDTITEKPIAPAEPVEPVLSGSMAIGAVSLAVAKACAMLLNKPLYLNIALLKHNQEQPTTLSMPLLMVSLVSCGKSSSGKLNLMKEVICIPHPELTTKQGVEMLMEMQKHINKIIEMPSPPKAETKKGHDGSKRGQQQITGKMSHLGCLTINCDSIEQPLLLIQEICANLGLELGTNLHLAINCAGHELMDYNKGKYEVIMGTYKNAAEMVDLYVDLINKYPSIIALIDPFRKEDSEQWDSIYHALGSRCYIIAGTASKSISKLLEQGNISIPKSNGLIIKHTNQTTMSDLVEITNLIDSKKHITVFGSTEGESSDDSLVDLAVGLGVRFIKLGGLSRGERVTKYNRLLTIEEELVQNGTLGFKEEHTFFYFNEEAEKAAEALEAAAAREPLVPTFPTQGVEESAETGASSG

SEQ ID NO: 4757 - protein, 628 aa, Homo sapiens [sequence omitted]

SEQ ID NO: 4758 - protein, 308 aa, Homo sapiens
MEEEGGGRSCGTTRELQKLKQQAMEYYRENDVPRRLEELLNSTFYLQPADVYGHLPSPPKAETKKGHDGSKRGQQQITGKMSHLGCLTINCDSIEQPLLLIQEICANLGLELGTNLHLAINCAGHELMDYDSEQWDSIYHALGSRCYIIAGTASKSISKLLEQGNISIPKSNGLIIKHTNQTTMSDLVEITNLIDSKKHITVFGSTEGESSDDSLVDLAVGLGVRFIKLGGLSRGERVTKYNRLLTIEEELVQNGTLGFKEEHTFFYFNEEAEKAAEALEAAAAREPLVPTFPTQGVEESAETGASSG

SEQ ID NO: 4759 - protein, 138 aa, Homo sapiens
  SITE 1: note = misc_feature - Xaa can be any naturally occurring amino acid
XGRSCGTTRELQKLKQQAMEYYRENDVPRRLEELLNSTFYLQPADVYGHLANCFSKLAKPPTICKIVGKDVLDGLGLPTLQVDIFCTIQNFPKNVCSVVISTHFEVHENALPELAKAEEAERASAVSTAVQWVNSTIT

SEQ ID NO: 4760 - protein, 440 aa, Homo sapiens
MAVKLGTLLLALALGLAQPASARRKLLVFLLDGFRSDYISDEALESLPGFKEIVSRGVKVDYLTPDFPSLSYPNYYTLMTGRHCEVHQMIGNYMWDPTTNKSFDIGVNKDSLMPLWWNGSEPLWVTLTKAKRKVYMYYWPGCEVEILGVRPTYCLEYKNVPTDINFANAVSDALDSFKSGRADLAAIYHERIDVEGHHYGPASPQRKDALKAVDTVLKYMTKWIQERGLQDRLNVIIFSDHGMTDIFWMDKVIELNKYISLNDLQQVKDRGPVVSLWPAPGKHSEIYNKLSTVEHMTVYEKEAIPSRFYYKKGKFVSPLTLVADEGWFITENREMLPFWMNSTGRREGWQRGWHGYDNELMDMRGIFLAFGPDFKSNFRAAPIRSVDVYNVMCNVVGITPLPNNGSWSRVMCMLKGRASTAPPVWPSHCALALILLFLLA

SEQ ID NO: 4761 - protein, 194 aa, Homo sapiens
MIGNYMWDPTTNKSFDIGVNKDSLMPLWWNGSEPLWVTLTKAKRKVYMYYWPGCEVEILGVRPTYCLEYKNVPTDINFANAVSDALDSFKSGRADLAAIYHERIDVEGHHYGPASPQRKDALKAVDTVLKYMTKWIQERGLQDRLNVIIFSDHGMTDIFWMDKVIELNKYISLNDLQQVKDRGPVVSLWPAPGK

SEQ ID NO: 4762 - protein, 159 aa, Homo sapiens
LKDAHPKLHVYKKEAFPEAFHYANNPRVTPLLMYSDLGYVIHGRINVQFNNGEHGFDNKDMDMKTIFRAVGPSFRAGLEVEPFESVHVYELMCRLLGIVPEANDGHLATLLPMLHTESALPPDGRPTLLPKGRSALPPSSRPLLVMGLLGTVILLSEVA

SEQ ID NO: 4763 - protein, 458 aa, Homo sapiens
MRGPAVLLTVALATLLAPGAGAPVQSQGSQNKLLLVSFDGFRWNYDQDVDTPNLDAMARDGVKARYMTPAFVTMTSPCHFTLVTGKYIENHGVVHNMYYNTTSKVKLPYHATLGIQRWWDNGSVPIWITAQRQGLRAGSFFYPGGNVTYQGVAVTRSRKEGIAHNYKNETEWRANIDTVMAWFTEEDLDLVTLYFGEPDSTGHRYGPESPERREMVRQVDRTVGYLRESIARNHLTDRLNLIITSDHGMTTVDKRAGDLVEFHKFPNFTFRDIEFELLDYGPNGMLLPKEGRLEKVYDALKDAHPKLHVYKKEAFPEAFHYANNPRVTPLLMYSDLGYVIHGRINVQFNNGEHGFDNKDMDMKTIFRAVGPSFRAGLEVEPFESVHVYELMCRLLGIVPEANDGHLATLLPMLHTESALPPDGRPTLLPKGRSALPPSSRPLLVMGLLGTVILLSEVA

SEQ ID NO: 4764 - protein, 91 aa, Homo sapiens
MATSWGTVFFMLVVSCVCSAVSHRNQQTWFEGIFLSSMCPINVSASTLYGIMFDAGSTGTRIHVYTFVQKMPGHLWSLGKGGGVRCPPEKW

SEQ ID NO: 4765 - protein, 211 aa, Homo sapiens
MATSWGTVFFMLVVSCVCSAVSHRNQQTWFEGIFLSSMCPINVSASTLYGIMFDAGSTGTRIHVYTFVQKMPGQLPILEGEVFDSVKPGLSAFVDQPKQGAETVQGLLEVAKDSIPRSHWKKTPVVLKATAGLRLLPEHKAKALLFEVKEIFRKSPFLVPKGSVSIMDGSDEGILAWVTVNFLTGQLHGHRQETVGTLDLGGASTQITFLP

SEQ ID NO: 4766 - protein, 428 aa, Homo sapiens
MATSWGTVFFMLVVSCVCSAVSHRNQQTWFEGIFLSSMCPINVSASTLYGIMFDAGSTGTRIHVYTFVQKMPGQLPILEGEVFDSVKPGLSAFVDQPKQGAETVQGLLEVAKDSIPRSHWKKTPVVLKATAGLRLLPEHKAKALLFEVKEIFRKSPFLVPKGSVSIMDGSDEGILAWVTVNFLTGQLHGHRQETVGTLDLGGASTQITFLPQFEKTLEQTPRGYLTSFEMFNSTYKLYTHSYLGFGLKAARLATLGALETEGTDGHTFRSACLPRWLEAEWIFGGVKYQYGGNQEGEVGFEPCYAEVLRVVRGKLHQPEEVQRGSFYAFSYYYDRAVDTDMIDYEKGGILKVEDFERKAREVCDNLENFTSGSPFLCMDLSYITALLKDGFGFADSTVLQLTKKVNNIETGWALGATFHLLQSLGISH

SEQ ID NO: 4767 - protein, 407 aa, Homo sapiens
MATSWGTVFFMLVVSCVCSAVSHRNQQTWFEGIFLSSMCPINVSASTLYGIMFDAGSTGTRIHVYTFVQKMPGQLPILEGEVFDSVKPGLSAFVDQPKQGAETVQGLLEVAKDSIPRSHWKKTPVVLKATAGLRLLPEHKAKALLFEVKEIFRKSPFLVPKGSVSIMDGSDEGILAWVTVNFLTGQLHGHRQETVGTLDLGGASTQITFLPQFEKTLEQTPRGYLTSFEMFNSTYKLYTHSYLGFGLKAARLATLGALETEGTDGHTFRSACLPRWLEAEWIFGGVKYQYGGNQEGEVGFEPCYAEVLRVVRGKLHQPEEVQRGSFYAFSYYYDRAVDTDMIDYEKGGILKVEDFERKAREVCDNLENFTSGSPFLCMDLSYITALLKDGFGFADSTVLQHIISWVN

SEQ ID NO: 4768 - protein, 80 aa, Homo sapiens
  SITE 1: note = misc_feature - Xaa can be any naturally occurring amino acid
XYAFSYYYDRAVDTDMIDYEKGGILKVEDFERKAREVCDNLENFTSGSPFLCMDLSYITALLKDGFGFADSTVLQAAVLR

SEQ ID NO: 4769 - protein, 223 aa, Homo sapiens
LGASGVSGLTALILLLVEATSVLLPTDIKFGIVFDAGSSHTSLFLYQWLANKENGTGVVSQALACQVEGPGISSYTSNAAQAGESLQGCLEEALVLIPEAQHRKTPTFLGATAGMRLLSSHPGPGPVSRGLLGCRAPGRAGRRCLWLDHCQLRLGDAGQVLLHWRMDPASGGDAGGCPGHGRGLHPDHVRAWGPHLGQEHPGRFSPLRLRLQRLHSQLPVLWT

SEQ ID NO: 4770 - protein, 458 aa, Homo sapiens
MGLSRKEQVFLALLGASGVSGLTALILLLVEATSVLLPTDIKFGIVFDAGSSHTSLFLYQWLANKENGTGVVSQALACQVEGPGISSYTSNAAQAGESLQGCLEEALVLIPEAQHRKTPTFLGATAGMRLLSRKNSSQARDIFAAVTQVLGRSPVDFWGAELLAGQAEGAFGWITVNYGLGTLVKYSFTGEWIQPPEEMLVGALDMGGASTQITFVPGGPILDKSTQADFRLYGSDYSVYTHSYLCFGRDQMLSRLLVGLVQSRPAALLRHPCYLSGYQTTLALGPLYESPCVHATPPLSLPQNLTVEGTGNPGACVSAIRELFNFSSCQGQEDCAFDGVYQPPLRGQFYVEASYPGQDRWLRDYCASGLYILTLLHEGYGFSEETWPSLEFRKQAGGVDIGWTLGYMLNLTGMIPADAPAQWRAESYGVWVAKVVFMVLALVAVVGAALVQLFWLQD

SEQ ID NO: 4771 - protein, 495 aa, Homo sapiens
MGLSRKEQVFLALLGASGVSGLTALILLLVEATSVLLPTDIKFGIVFDAGSSHTSLFLYQWLANKENGTGVVSQALACQVEGPGISSYTSNAAQAGESLQGCLEEALVLIPEAQHRKTPTFLGATAGMRLLSRKNSSQARDIFAAVTQVLGRSPVDFWGAELLAGQAEGAFGWITVNYGLGTLVKYSFTGEWIQPPEEMLVGALDMGGASTQITFVPGGPILDKSTQADFRLYGSDYSVYTHSYLCFGRDQMLSRLLVGLVQSRPAALLRHPCYLSGYQTTLALGPLYESPCVHATPPLSLPQNLTVEGTGNPGACVSAIRELFNFSSCQGQEDCAFDGVYQPPLRGQFYAFSNFYYTFHFLNLTSRQPLSTVNATIWEFCQRPWKLVEASYPGQDRWLRDYCASGLYILTLLHEGYGFSEETWPSLEFRKQAGGVDIGWTLGYMLNLTGMIPADAPAQWRAESYGVWVAKVVFMVLALVAVVGAALVQLFWLQD

SEQ ID NO: 4772 - protein, 495 aa, Homo sapiens; identical to SEQ ID NO: 4771

SEQ ID NO: 4773 - protein, 135 aa, Homo sapiens
MISAHCNLCLLDSSDSCALASQVAGITGVHHHAQLIFVFLIETEFHHVGQAGLELWVQEILPPCLPKCWDYRCEPPRMALNFLFLGIPKFSTFSALEFVNIFVEYHMTVIPECSNLFMIYLGKFTTVLLFAIIWL

SEQ ID NO: 4774 - protein, 124 aa, Homo sapiens
MLMLFVFGVLLHEVSLSGQNEAPPNTHSIPGEPLYNYASIRLPEEHIPFFLHNNRHIATVCRKDSLCPYKKHLEKLKYCWGYEKSCKPEFRFGYPVCSYVDMGWTDTLESAEDIFWKQADFGYA

SEQ ID NO: 4775 - protein, 132 aa, Homo sapiens
MLMLFVFGVLLHEVSLSGQNEAPPNTHSIPGEPLYNYASIRLPEEHIPFFLHNNRHIATVCRKDSLCPYKKHLEKLKYCWGYEKSCKPEFRFGYPVCSYVDMGWTDTLESAEDIFWKQADFGYARERLEEMH

SEQ ID NO: 4776 - protein, 206 aa, Homo sapiens
MLMLFVFGVLLHEVSLSGQNEAPPNTHSIPGEPLYNYASIRLPEEHIPFFLHNNRHIATVCRKDSLCPYKKHLEKLKYCWGYEKSCKPEFRFGYPVCSYVDMGWTDTLESAEDIFWKQADFGYARERLEEMHVLCQPKETSDSSLVCSRYLQYCRATNLYLDLRNIKRNHDRFKEDFFQSGEIGGHCKLDIRTLTSEGQRKSPLQS

SEQ ID NO: 4777 - protein, 443 aa, Homo sapiens
MLMLFVFGVLLHEVSLSGQNEAPPNTHSIPGEPLYNYASIRLPEEHIPFFLHNNRHIATVCRKDSLCPYKKHLEKLKYCWGYEKSCKPEFRFGYPVCSYVDMGWTDTLESAEDIFWKQADFGYARERLEEMHVLCQPKETSDSSLVCSRYLQYCRATNLYLDLRNIKRNHDRFKEDFFQSGEIGGHCKLDIRTLTSEGQRKSPLQSWFAELQSYTQLNFRPIEDAKCDIVIEKPTYFMKLDAGVNMYHHFCDFINLYITQHVNNSFSTDVYIVMWDTDGKIRVTILARSTEYRKILNQNELVNALKTVSTFEVQIVDYKYRELGFLDQLRITHNTDIFIGMHGAGLTHLLFLPDWAAVFELYNCEDERCYLDLARLRGVHYITWRRQNKVFPQDKGHHPTLGEHPKFTNYSFDVEEFMYLVLQAADHVLQHPKWPFKKKHDEL

SEQ ID NO: 4778 - protein, 527 aa, Homo sapiens
MLMLFVFGVLLHEVSLSGQNEAPPNTHSIPGEPLYNYASIRLPEEHIPFFLHNNRHIATVCRKDSLCPYKKHLEKLKYCWGYEKSCKPEFRFGYPVCSYVDMGWTDTLESAEDIFWKQADFGYARERLEEMHVLCQPKETSDSSLVCSRYLQYCRATNLYLDLRNIKRNHDRFKEDFFQSGEIGGHCKLDIRTLTSEGQRKSPLQSWFAELQSYTQLNFRPIEDAKCDIVIEKPTYFMKLDAGVNMYHHFCDFINLYITQHVNNSFSTDVYIVMWDTSSYGYGDLFSDTWNAFTDYDVIHLKTYDSKRVCFKEAVFSLLPRMRYGLFYNTPLISGCQNTGLFRAFAQHVLHRLNITQEGPKDGKIRVTILARSTEYRKILNQNELVNALKTVSTFEVQIVDYKYRELGFLDQLRITHNTDIFIGMHGAGLTHLLFLPDWAAVFELYNCEDERCYLDLARLRGVHYITWRRQNKVFPQDKGHHPTLGEHPKFTNYSFDVEEFMYLVLQAADHVLQHPKWPFKKKHDEL

SEQ ID NO: 4779 - protein, 443 aa, Homo sapiens; identical to SEQ ID NO: 4777

SEQ ID NO: 4780 - protein, 527 aa, Homo sapiens; identical to SEQ ID NO: 4778

SEQ ID NO: 4781 - protein, 314 aa, Homo sapiens
MAPPQVLAFGLLLAAATATFAAAQEECVCENYKLAVNCFVNNNRQCQCTSVGAQNTVICSKLAAKCLVMKAEMNGSKLGRRAKPEGALQNNDGLYDPDCDESGLFKAKQCNGTSMCWCVNTAGVRRTDKDTEITCSERVRTYWIIIELKHKAREKPYDSKSLRTALQKEITTRYQLDPKFITSILYENNVITIDLVQNSSQKTQNDVDIADVAYYFEKDVKGESLFHSKKMDLTVNGEQLDLDPGQTLIYYVDEKAPEFSMQGLKAGVIAVIVVVVIAVVAGIVVLVISRKKRMAKYEKAEIKEMGEMHRELNA

SEQ ID NO: 4782 - protein, 199 aa, Homo sapiens
MAPPQVLAFGLLLAAATATFAAAQEGEARIGAELWSWAGLGGSGPRPSAPETGIIGRGPRGRAFQRGDRTVRPCSGSGPPRGRKRRGPSRGAASLRSFARLECVCENYKLAVNCFVNNNRQCQCTSVGAQNTVICSKLAAKCLVMKAEMNGSKLGRRAKPEGALQNNDGLYDPDCDESGLFKAKQCNGTSMCWCVNTAG

SEQ ID NO: 4783 - protein, 342 aa, Homo sapiens
METKHLGRGGAGRAGPHLWRGPRPNCSAGAGGGEPTHSPNSRAVTHQRAPAARECVCENYKLAVNCFVNNNRQCQCTSVGAQNTVICSKLAAKCLVMKAEMNGSKLGRRAKPEGALQNNDGLYDPDCDESGLFKAKQCNGTSMCWCVNTAGVRRTDKDTEITCSERVRTYWIIIELKHKAREKPYDSKSLRTALQKEITTRYQLDPKFITSILYENNVITIDLVQNSSQKTQNDVDIADVAYYFEKDVKGESLFHSKKMDLTVNGEQLDLDPGQTLIYYVDEKAPEFSMQGLKAGVIAVIVVVVIAVVAGIVVLVISRKKRMAKYEKAEIKEMGEMHRELNA

SEQ ID NO: 4784 - protein, 342 aa, Homo sapiens; identical to SEQ ID NO: 4783

SEQ ID NO: 4785 - protein, 122 aa, Homo sapiens
MFQIDQATKQCSKMTLTQPWDPLDIPQNSTFEDQYSIGGPQEQITVQEWSDRKSARSYETWIGIYTVKDCYPVQETFTINYSVILSTRFFDIQLGIKDPSVFTPPSTCQMAQLEKMSEDCSW

SEQ ID NO: 4786 - protein, 90 aa, Homo sapiens
MPGRAPLRTVPGALGAWLLGGLWAWTLCGLCSLGAVGAPRPCQAPQQWEGRQVMYQQSSGRNSRALLSYDGLNQRVRVLDERKALIPCKR

SEQ ID NO: 4787 - protein, 224 aa, Homo sapiens
MPGRAPLRTVPGALGAWLLGGLWAWTLCGLCSLGAVGAPRPCQAPQQWEGRQVMYQQSSGRNSRALLSYDGLNQRVRVLDERKALIPCKRLFEYILLYKDGVMFQIDQATKQCSKMTLTQPWDPLDIPQNSTFEDQYSIGGPQEQITVQEWSDRKSARSYETWIGIYTVKDCYPVQETFTINYSVILSTRFFDIQLGIKDPSVFTPPSTCQMAQLEKMSEDCSW

SEQ ID NO: 4788 - protein, 163 aa, Homo sapiens
MVRDWEGRCAHRGRPAGGGLSNTQRGGGRLFEYILLYKDGVMFQIDQATKQCSKMTLTQPWDPLDIPQNSTFEDQYSIGGPQEQITVQEWSDRKSARSYETWIGIYTVKDCYPVQETFTINYSVILSTRFFDIQLGIKDPSVFTPPSTCQMAQLEKMSEDCSW

SEQ ID NO: 4789 - protein, 73 aa, Homo sapiens
MALGVPISVYLLFNADNIEGPIALKFSHLCLEDHNSYCINGACAFHHELEKAICRCLKLKSPYNVCSGERRPL

SEQ ID NO: 4790 - protein, 133 aa, Homo sapiens
MALGVPISVYLLFNAMTALTEEAAVTVTPPITAQQADNIEGPIALKFSHLCLEDHNSYCINGACAFHHELEKAICRCFTGYTGERCEHLTLTSYAVDSYEKYIAIGIGVGLLLSGFLVIFYCYIRKRYEKDKI

SEQ ID NO: 4791 - protein, 103 aa, Homo sapiens
MALGVPISVYLLFNAMTALTEEAAVTVTPPITAQQADNIEGPIALKFSHLCLEDHNSYCINGACAFHHELEKAICRCFTGYTGERCLKLKSPYNVCSGERRPL

SEQ ID NO: 4792 - protein, 94 aa, Homo sapiens
MALGVPISVYLLFNAMTALTEEAAVTVTPPITAQQADNIEGPIALKFSHLCLEDHNSYCINGACAFHHELEKAICRCLKLKSPYNVCSGERRPL

SEQ ID NO: 4793 - protein, 94 aa, Homo sapiens
MALGVPISVYLLFNAMTALTEEAAVTVTPPITAQQGNWTVNKTEADNIEGPIALKFSHLCLEDHNSYCINGACAFHHELEKAICRCFTGYTGER

SEQ ID NO: 4794 - protein, 154 aa, Homo sapiens
MALGVPISVYLLFNAMTALTEEAAVTVTPPITAQQGNWTVNKTEADNIEGPIALKFSHLCLEDHNSYCINGACAFHHELEKAICRCFTGYTGERCEHLTLTSYAVDSYEKYIAIGIGVGLLLSGFLVIFYCYIRKRCLKLKSPYNVCSGERRPL

SEQ ID NO: 4795 - protein, 112 aa, Homo sapiens
MALGVPISVYLLFNAMTALTEEAAVTVTPPITAQQGNWTVNKTEADNIEGPIALKFSHLCLEDHNSYCINGACAFHHELEKAICRCFTGYTGERCLKLKSPYNVCSGERRPL

SEQ ID NO: 4796 - protein, 103 aa, Homo sapiens
MALGVPISVYLLFNAMTALTEEAAVTVTPPITAQQGNWTVNKTEADNIEGPIALKFSHLCLEDHNSYCINGACAFHHELEKAICRCLKLKSPYNVCSGERRPL

SEQ ID NO: 4797 - protein, 130 aa, Homo sapiens
  SITE 1: note = misc_feature - Xaa can be any naturally occurring amino acid
XTALTEEAAVTVTPPITAQQADNIEGPIALKFSHLCLEDHNSYCINGACAFHHELEKAICRCFTGYTGERCEHLTLTSYAVDSYEKYIAIGIGVGLLLSGFLVIFYCYIRKRCLKLKSPYNVCSGERRPL

SEQ ID NO: 4798 - protein, 218 aa, Homo sapiens
AQVTVSTGPGAPWEEDEIRRDRVEPQSVSLSWREPIPAGAPGANDTEYEIRYYEKGQSEQTYSMVKTGAPTVTVTNLKPATRYVFQIRAASPGPSWEAQSFNPSIEVQTLGEAASGSRDQSPAIVVTVVTISALLVLGSVMSVLAIWRRPCSYGKGGGDAHDEEELYFHFKVPTRRTFLDPQSCGDLLQAVHLFAKELDAKSVTLERSLGGGLETSPH

SEQ ID NO: 4799 - protein, 392 aa, Homo sapiens
EQTYSMVKTGAPTVTVTNLKPATRYVFQIRAASPGPSWEAQSFNPSIEVQTLGEAASGSRDQSPAIVVTVVTISALLVLGSVMSVLAIWRRPCSYGKGGGDAHDEEELYFHFKVPTRRTFLDPQSCGDLLQAVHLFAKELDAKSVTLERSLGGGRFGELCCGCLQLPGRQELLVAVHMLRDSASDSQRLGFLAEALTLGQFDHSHIVRLEGVVTRGSTLMIVTEYMSHGALDGFLRRHEGQLVAGQLMGLLPGLASAMKYLSEMGYVHRGLAARHVLVSSDLVCKISGFGRGPRDRSEAVYTTMSGRSPALWAAPETLQFGHFSSASDVWSFGIIMWEVMAFGERPYWDMSGQDVIKAVEDGFRLPPPRNCPNLLHRLMLDCWQKDPGLPPH

SEQ ID NO: 4800 - protein, 295 aa, Homo sapiens
METCAGPHPLRLFLCRMQLCLALLLGPWRPGTAEEVILLDSKASQAELGWTALPSNGWEEISGVDEHDRPIRTYQVCNVLEPNQDNWLQTGWISRGRGQRIFVELQFTLRDCSSIPGAAGTCKETFNVYYLETEADLGRGRPRLGGSRPRKIDTIAADESFTQGDLGERKMKLNTEVREIGPLSRRGFHLAFQDVGACVALVSVRVYYKQCRATVRGLATFPATAAESAFSTLVEVAGTCVAHSEGEPGSPPRMHCGADGEWLVPVGRCSCSAGFQERGDFCEGIQLAGGRGVGV

SEQ ID NO: 4801 - protein, 1008 aa, Homo sapiens
METCAGPHPLRLFLCRMQLCLALLLGPWRPGTAEEVILLDSKASQAELGWTALPSNGWEEISGVDEHDRPIRTYQVCNVLEPNQDNWLQTGWISRGRGQRIFVELQFTLRDCSSIPGAAGTCKETFNVYYLETEADLGRGRPRLGGSRPRKIDTIAADESFTQGDLGERKMKLNTEVREIGPLSRRGFHLAFQDVGACVALVSVRVYYKQCRATVRGLATFPATAAESAFSTLVEVAGTCVAHSEGEPGSPPRMHCGADGEWLVPVGRCSCSAGFQERGDFCEACPPGFYKVSPRRPLCSPCPEHSRALENASTFCVCQDSYARSPTDPPSASCTRPPSAPRDLQYSLSRSPLVLRLRWLPPADSGGRSDVTYSLLCLRCGREGPAGACEPCGPRVAFLPRQAGLRERAATLLHLRPGARYTVRVAALNGVSGPAAAAGTTYAQVTVSTGPGAPWEEDEIRRDRVEPQSVSLSWREPIPAGAPGANDTEYEIRYYEKGQSEQTYSMVKTGAPTVTVTNLKPATRYVFQIRAASPGPSWEAQSFNPSIEVQTLGEAASGSRDQSPAIVVTVVTISALLVLGSVMSVLAIWRRPCSYGKGGGDAHDEEELYFHFKVPTRRTFLDPQSCGDLLQAVHLFAKELDAKSVTLERSLGGGRFGELCCGCLQLPGRQELLVAVHMLRDSASDSQRLGFLAEALTLGQFDHSHIVRLEGVVTRGSTLMIVTEYMSHGALDGFLRRHEGQLVAGQLMGLLPGLASAMKYLSEMGYVHRGLAARHVLVSSDLVCKISGFGRGPRDRSEAVYTTMSGRSPALWAAPETLQFGHFSSASDVWSFGIIMWEVMAFGERPYWDMSGQDVIKAVEDGFRLPPPRNCPNLLHRLMLDCWQKDPGERPRFSQIHSILSKMVQDPEPPKCALTTCPRPPTPLADRAFSTFPSFGSVGAWLEALDLCRYKDSFAAAGYGSLEAVAEMTAQDLVSLGISLAEHREALLSGISALQARVLQLQGQGVQV

SEQ ID NO: 4802 - protein, 1014 aa, Homo sapiens
METCAGPHPLRLFLCRMQLCLALLLGPWRPGTAEEVILLDSKASQAELGWTALPSNGWEEISGVDEHDRPIRTYQVCNVLEPNQDNWLQTGWISRGRGQRIFVELQFTLRDCSSIPGAAGTCKETFNVYYLETEADLGRGRPRLGGSRPRKIDTIAADESFTQGDLGERKMKLNTEVREIGPLSRRGFHLAFQDVGACVALVSVRVYYKQCRATVRGLATFPATAAESAFSTLVEVAGTCVAHSEGEPGSPPRMHCGADGEWLVPVGRCSCSAGFQERGDFCEACPPGFYKVSPRRPLCSPCPEHSRALENASTFCVCQDSYARSPTDPPSASCTRPPSAPRDLQYSLSRSPLVLRLRWLPPADSGGRSDVTYSLLCLRCGREGPAGACEPCGPRVAFLPRQAGLRERAATLLHLRPGARYTVRVAALNGVSGPAAAAGTTYAQVTVSTGPGAPWEEDEIRRDRVEPQSVSLSWREPIPAGAPGANDTEYEIRYYEKGQSEQTYSMVKTGAPTVTVTNLKPATRYVFQIRAASPGPSWEAQSFNPSIEVQTLGEAASGSRDQSPAIVVTVVTISALLVLGSVMSVLAIWRRPCSYGKGGGDAHDEEELYFHFKVPTRRTFLDPQSCGDLLQAVHLFAKELDAKSVTLERSLGGGRFGELCCGCLQLPGRQELLVAVHMLRDSASDSQRLGFLAEALTLGQFDHSHIVRLEGVVTRGSTLMIVTEYMSHGALDGFLRRHEGQLVAGQLMGLLPGLASAMKYLSEMGYVHRGLAARHVLVSSDLVCKISGFGRGPRDRSEAVYTTMSGRSPALWAAPETLQFGHFSSASDVWSFGIIMWEVMAFGERPYWDMSGQDVIKAVEDGFRLPPPRNCPNLLHRLMLDCWQKDPGERPRFSQIHSILSKMVQDPEPPKCALTTCPRPPTPLADRAFSTFPSFGSVGAWLEALDLCRYKDSFAAAGYGSLEAVAEMTAQDLVSLGISLAEHREALLSGISALQARVLQLQGQGVQVIIKTCL

SEQ ID NO: 4803 - protein, 155 aa, Homo sapiens
MVKTGAPTVTVTNLKPATRYVFQIRAASPGPSWEAQSFNPSIEVQTLGEAASGSRDQSPAIVVTVVTISALLVLGSVMSVLAIWRRPCSYGKGGGDAHDEEELYFHFKVPTRRTFLDPQSCGDLLQAVHLFAKELDAKSVTLERSLGGGLETSPH

SEQ ID NO: 4804 - protein, 92 aa, Homo sapiens
  SITE 1: note = misc_feature - Xaa can be any naturally occurring amino acid
XHLRPGARYTVRVAALNGVSGPAAAAGTTYAQVTVSTGPGAPWEEDEIRRDRVEPQSVSLSWREPIPAGAPGANDTEYEIRYYEKDTCADFC

SEQ ID NO: 4805 - protein, 217 aa, Homo sapiens
  SITE 1: note = misc_feature - Xaa can be any naturally occurring amino acid
XQIRAASPGPSWEAQSFNPSIEVQTLGEAASGSRDQSPAIVVTVVTISALLVLGSVMSVLAIWRRPCSYGKGGGDAHDEEELYFHFKVPTRRTFLDPQSCGDLLQAVHLFAKELDAKSVTLERSLGGGLCSCLEALPPHQAHPPPRKSLACLIIGKRMAEGSVTLSWSSRAVWGAVLWLLAAPRSPGAARSRAYAEGQRLRLTEARLPGRGPHAGPV

SEQ ID NO: 4806 - protein, 983 aa, Homo sapiens
MDCQLSILLLLSCSVLDSFGELIPQPSNEVNLLDSKTIQGELGWISYPSHGWEEISGVDEHYTPIRTYQVCNVMDHSQNNWLRTNWVPRNSAQKIYVELKFTLRDCNSIPLVLGTCKETFNLYYMESDDDHGVKFREHQFTKIDTIAADESFTQMDLGDRILKLNTEIREVGPVNKKGFYLAFQDVGACVALVSVRVYFKKCPFTVKNLAMFPDTVPMDSQSLVEVRGSCVNNSKEEDPPRMYCSTEGEWLVPIGKCSCNAGYEERGFMCQACRPGFYKALDGNMKCAKCPPHSSTQEDGSMNCRCENNYFRADKDPPSMACTRPPSSPRNVISNINETSVILDWSWPLDTGGRKDVTFNIICKKCGWNIKQCEPCSPNVRFLPRQFGLTNTTVTVTDLLAHTNYTFEIDAVNGVSELSSPPRQFAAVSITTNQAAPSPVLTIKKDRTSRNSISLSWQEPEHPNGIILDYEVKYYEKQEQETSYTILRARGTNVTISSLKPDTIYVFQIRARTAAGYGTNSRKFEFETSPDSFSISGESSQVVMIAISAAVAIILLTVVIYVLIGRFCGYKSKHGADEKRLHFGNGHLKLPGLRTYVDPHTYEDPTQAVHEFAKELDATNISIDKVVGAGEFGEVCSGRLKLPSKKEISVAIKTLKVGYTEKQRRDFLGEASIMGQFDHPNIIRLEGVVTKSKPVMIVTEYMENGSLDSFLRKHDAQFTVIQLVGMLRGIASGMKYLSDMGYVHRDLAARNILINSNLVCKVSDFGLSRVLEDDPEAAYTTRGGKIPIRWTSPEAIAYRKFTSASDVWSYGIVLWEVMSYGERPYWEMSNQDVIKAVDEGYRLPPPMDCPAALYQLMLDCWQKDRNNRPKFEQIVSILDKLIRNPGSLKIITSAAARPSNLLLDQSNVDITTFRTTGDWLNGVWTAHCKEIFTGVEYSSCDTIAKISTDDMKKVGVTVVGPQKKIISSIKALETQSKNGPVPV

SEQ ID NO: 4807 - protein, 918 aa, Homo sapiens
MDCQLSILLLLSCSVLDSFGELIPQPSNEVNLLDSKTIQGELGWISYPSHGWEEISGVDEHYTPIRTYQVCNVMDHSQNNWLRTNWVPRNSAQKIYVELKFTLRDCNSIPLVLGTCKETFNLYYMESDDDHGVKFREHQFTKIDTIAADESFTQMDLGDRILKLNTEIREVGPVNKKGFYLAFQDVGACVALVSVRVYFKKCPFTVKNLAMFPDTVPMDSQSLVEVRGSCVNNSKEEDPPRMYCSTEGEWLVPIGKCSCNAGYEERGFMCQACRPGFYKALDGNMKCAKCPPHSSTQEDGSMNCRCENNYFRADKDPPSMACTRPPSSPRNVISNINETSVILDWSWPLDTGGRKDVTFNIICKKCGWNIKQCEPCSPNVRFLPRQFGLTNTTVTVTDLLAHTNYTFEIDAVNGVSELSSPPRQFAAVSITTNQAAPSPVLTIKKDRTSRNSISLSWQEPEHPNGIILDYEVKYYEKQEQETSYTILRARGTNVTISSLKPDTIYVFQIRARTAAGYGTNSRKFEFETSPDSFSISGESSQVVMIAISAAVAIILLTVVIYVLIGRFCGYKSKHGADEKRLHFGNGHLKLPGLRTYVDPHTYEDPTQAVHEFAKELDATNISIDKVVGAGEFGEVCSGRLKLPSKKEISVAIKTLKVGYTEKQRRDFLGEASIMGQFDHPNIIRLEGVVTKSKPVMIVTEYMENGSLDSFLRKHDAQFTVIQLVGMLRGIASGMKYLSDMGYVHRDLAARNILINSNLVCKVSDFGLSRVLEDDPEAAYTTRGGKIPIRWTSPEAIAYRKFTSASDVWSYGIVLWEVMSYGERPYWEMSNQDVIKAVDEGYRLPPPMDCPAALYQLMLDCWQKDRNNRPKFEQIVSILDKLIRNPGSLKIITSAAARPSNLLLDQSNVDITTFRTTVT

SEQ ID NO: 4808 - protein, 539 aa, Homo sapiens
MDCQLSILLLLSCSVLDSFGELIPQPSNEVNLLDSKTIQGELGWISYPSHGWEEISGVDEHYTPIRTYQVCNVMDHSQNNWLRTNWVPRNSAQKIYVELKFTLRDCNSIPLVLGTCKETFNLYYMESDDDHGVKFREHQFTKIDTIAADESFTQMDLGDRILKLNTEIREVGPVNKKGFYLAFQDVGACVALVSVRVYFKKCPFTVKNLAMFPDTVPMDSQSLVEVRGSCVNNSKEEDPPRMYCSTEGEWLVPIGKCSCNAGYEERGFMCQACRPGFYKALDGNMKCAKCPPHSSTQEDGSMNCRCENNYFRADKDPPSMACTRPPSSPRNVISNINETSVILDWSWPLDTGGRKDVTFNIICKKCGWNIKQCEPCSPNVRFLPRQFGLTNTTVTVTDLLAHTNYTFEIDAVNGVSELSSPPRQFAAVSITTNQAAPSPVLTIKKDRTSRNSISLSWQEPEHPNGIILDYEVKYYEKQEQETSYTILRARGTNVTISSLKPDTIYVFQIRARTAAGYGTNSRKFEFETSPDCMYYFNAV

SEQ ID NO: 4809 - protein, 37 aa, Homo sapiens
AYRKFTSASDVWSYGIVMWEVMSYGERPYWDMSNQDT

SEQ ID NO: 4810 - protein, 177 aa, Homo sapiens
MAGIFYFALFSCLFGICDAVTGSRVYPANEGPPSAPLNLISNVNETSVNLEWSSPQNTGGRQDISYNVVCKKCGAGDPSKCRPCGSGVHYTPQQNGLKTTKVSITDLLAHTNYTFEIWAVNGVSKYNPNPDQSVSVTVTTNQAAPSSIALVQAKEVTRYSVALAWLEPDRPNGVILE

SEQ ID NO: 4811 - protein, 38 aa, Homo sapiens
MAGIFYFALFSCLFGICDAVTGSRVYPANEVGGSEYHG

SEQ ID NO: 4812 - protein, 91 aa, Homo sapiens
MAGIFYFALFSCLFGICDAVTGSRVYPANEVTLLDSRSVQGELGWIASPLEGGWEEVSIMDEKNTPIRTYQVCNVMEPSQNNWLRTDWITR

SEQ ID NO: 4813 - protein, 149 aa, Homo sapiens
MAGIFYFALFSCLFGICDAVTGSRVYPANEVTLLDSRSVQGELGWIASPLEGGWEEVSIMDEKNTPIRTYQVCNVMEPSQNNWLRTDWITREGAQRVYIEIKFTLRDCNSLPGVMGTCKETFNLYYYESDNDKERFIRENQFVKIDTIA

SEQ ID NO: 4814 - protein, 986 aa, Homo sapiens
MAGIFYFALFSCLFGICDAVTGSRVYPANEVTLLDSRSVQGELGWIASPLEGGWEEVSIMDEKNTPIRTYQVCNVMEPSQNNWLRTDWITREGAQRVYIEIKFTLRDCNSLPGVMGTCKETFNLYYYESDNDKERFIRENQFVKIDTIAADESFTQVDIGDRIMKLNTEIRDVGPLSKKGFYLAFQDVGACIALVSVRVFYKKCPLTVRNLAQFPDTITGADTSSLVEVRGSCVNNSEEKDVPKMYCGADGEWLVPIGNCLCNAGHEERSGECQACKIGYYKALSTDATCAKCPPHSYSVWEGATSCTCDRGFFRADNDAASMPCTRPPSAPLNLISNVNETSVNLEWSSPQNTGGRQDISYNVVCKKCGAGDPSKCRPCGSGVHYTPQQNGLKTTKVSITDLLAHTNYTFEIWAVNGVSKYNPNPDQSVSVTVTTNQAAPSSIALVQAKEVTRYSVALAWLEPDRPNGVILEYEVKYYEKDQNERSYRIVRTAARNTDIKGLNPLTSYVFHVRARTAAGYGDFSEPLEVTTNTVPSRIIGDGANSTVLLVSVSGSVVLVVILIAAFVISRRRSKYSKAKQEADEEKHLNQGVRTYVDPFTYEDPNQAVREFAKEIDASCIKIEKVIGVGEFGEVCSGRLKVPGKREICVAIKTLKAGYTDKQRRDFLSEASIMGQFDHPNIIHLEGVVTKCKPVMIITEYMENGSLDAFLRKNDGRFTVIQLVGMLRGIGSGMKYLSDMSYVHRDLAARNILVNSNLVCKVSDFGMSRVLEDDPEAAYTTRGGKIPIRWTAPEAIAYRKFTSASDVWSYGIVMWEVMSYGERPYWDMSNQDVIKAIEEGYRLPPPMDCPIALHQLMLDCWQKERSDRPKFGQIVNMLDKLIRNPNSLKRTGTESSRPNTALLDPSSPEFSAVVSVGDWLQAIKMDRYKDNFTAAGYTTLEAVVHVNQEDLARIGITAITHQNKILSSVQAMRTQMQQMHGRMVPV

SEQ ID NO: 4815 - protein, 986 aa, Homo sapiens; identical to SEQ ID NO: 4814

SEQ ID NO: 4816 - protein, 949 aa, Homo sapiens
MAGIFYFALFSCLFGICDAVTGSRVYPANEVTLLDSRSVQGELGWIASPLEGGWEEVSIMDEKNTPIRTYQVCNVMEPSQNNWLRTDWITREGAQRVYIEIKFTLRDCNSLPGVMGTCKETFNLYYYESDNDKERFIRENQFVKIDTIAADESFTQVDIGDRIMKLNTEIRDVGPLSKKGFYLAFQDVGACIALVSVRVFYKKCPLTVRNLAQFPDTITGADTSSLVEVRGSCVNNSEEKDVPKMYCGADGEWLVPIGNCLCNAGHEERSGECQACKIGYYKALSTDATCAKCPPHSYSVWEGATSCTCDRGFFRADNDAASMPCTRPPSAPLNLISNVNETSVNLEWSSPQNTGGRQDISYNVVCKKCGAGDPSKCRPCGSGVHYTPQQNGLKTTKVSITDLLAHTNYTFEIWAVNGVSKYNPNPDQSVSVTVTTNQAAPSSIALVQAKEVTRYSVALAWLEPDRPNGVILEYEVKYYEKDQNERSYRIVRTAARNTDIKGLNPLTSYVFHVRARTAAGYGDFSEPLEVTTNTVPSRIIGDGANSTVLLVSVSGSVVLVVILIAAFVISRRRSKYSKAKQEADEEKHLNQGVRTYVDPFTYEDPNQAVREFAKEIDASCIKIEKVIGVGEFGEVCSGRLKVPGKREICVAIKTLKAGYTDKQRRDFLSEASIMGQFDHPNIIHLEGVVTKCKPVMIITEYMENGSLDAFLRKNDGRFTVIQLVGMLRGIGSGMKYLSDMSYVHRDLAARNILVNSNLVCKVSDFGMSRVLEDDPEAAYTTRGGKIPIRWTAPEAIAYRKFTSASDVWSYGIVMWEVMSYGERPYWDMSNQDVIKAIEEGYRLPPPMDCPIALHQLMLDCWQKERSDRPKFGQIVNMLDKLIRNPNSLKRTGTESSRPNTALLDPSSPEFSAVVSVGDWLQAIKMDRYKDNFTAAGYTTLEAVVHVNQE

SEQ ID NO: 4817 - protein, 126 aa, Homo sapiens
MDEKNTPIRTYQVCNVMEPSQNNWLRTDWITREGAQRVYIEIKFTLRDCNSLPGVMGTCKETFNLYYYESDNDKERFIRENQFVKIDTIAADESFTQVDIGDRIMKLNTEIRDVGPLSKKGFYLAF

SEQ ID NO: 4818 - protein, 189 aa, Homo sapiens
  SITE 1: note = misc_feature - Xaa can be any naturally occurring amino acid
XFHGSLSSTHFTCKIGYYKALSTDATCAKCPPHSYSVWEGATSCTCDRGFFRADNDAASMPCTRPPSAPLNLISNVNETSVNLEWSSPQNTGGRQDISYNVVCKKCGAGDPSKCRPCGSGVHYTPQQNGLKTTKVSITDLLAHTNYTFEIWAVNGVSKYNPNPDQSVSVTVTTNQAAPSSIALVQAKEV

SEQ ID NO: 4819 - protein, 279 aa, Homo sapiens
MVFQTRYPSWIILCYIWLLRFAHTGEAQAAKEVLLLDSKAQQTELEWISSPPNGWEEISGLDENYTPIRTYQVCQVMEPNQNNWLRTNWISKGNAQRIFVELKFTLRDCNSLPGVLGTCKETFNLYYYETDYDTGRNIRENLYVKIDTIAADESFTQGDLGERKMKLNTEVREIGPLSKKGFYLAFQDVGACIALVSVKVYYKKCWSIIENLAIFPDTVTGSEFSSLVEVRGTCVSSAEEEAENAPRMHCSAEGEWLVPIGKCICKAGYQQKGDTCERK

SEQ ID NO: 4820 - protein, 998 aa, Homo sapiens
MVFQTRYPSWIILCYIWLLRFAHTGEAQAAKEVLLLDSKAQQTELEWISSPPNGWEEISGLDENYTPIRTYQVCQVMEPNQNNWLRTNWISKGNAQRIFVELKFTLRDCNSLPGVLGTCKETFNLYYYETDYDTGRNIRENLYVKIDTIAADESFTQGDLGERKMKLNTEVREIGPLSKKGFYLAFQDVGACIALVSVKVYYKKCWSIIENLAIFPDTVTGSEFSSLVEVRGTCVSSAEEEAENAPRMHCSAEGEWLVPIGKCICKAGYQQKGDTCEPCGRGFYKSSSQDLQCSRCPTHSFSDKEGSSRCECEDGYYRAPSDPPYVACTRPPSAPQNLIFNINQTTVSLEWSPPADNGGRNDVTYRILCKRCSWEQGECVPCGSNIGYMPQQTGLEDNYVTVMDLLAHANYTFEVEAVNGVSDLSRSQRLFAAVSITTGQAAPSQVSGVMKERVLQRSVELSWQEPEHPNGVITEYEIKYYEKDQRERTYSTVKTKSTSASINNLKPGTVYVFQIRAFTAAGYGNYSPRLDVATLEEATGKMFEATAVSSEQNPVIIIAVVAVAGTIILVFMVFGFIIGRRHCGYSKADQEGDEELYFHFKFPGTKTYIDPETYEDPNRAVHQFAKELDASCIKIERVIGAGEFGEVCSGRLKLPGKRDVAVAIKTLKVGYTEKQRRDFLCEASIMGQFDHPNVVHLEGVVTRGKPVMIVIEFMENGALDAFLRKHDGQFTVIQLVGMLRGIAAGMRYLADMGYVHRDLAARNILVNSNLVCKVSDFGLSRVIEDDPEAVYTTTGGKIPVRWTAPEAIQYRKFTSASDVWSYGIVMWEVMSYGERPYWDMSNQDVIKAIEEGYRLPAPMDCPAGLHQLMLDCWQKERAERPKFEQIVGILDKMIRNPNSLKTPLGTCSRPISPLLDQNTPDFTTFCSVGEWLQAIKMERYKDNFTAAGYNSLESVARMTIEDVMSLGITLVGHQKKIMSSIQTMRAQMLHLHGTGIQV

SEQ ID NO: 4821 - protein, 1005 aa, Homo sapiens
MAPARGRLPPALWVVTAAAAAATCVSAARGEVNLLDTSTIHGDWGWLTYPAHGWDSINEVDESFQPIHTYQVCNVMSPNQNNWLRTSWVPRDGARRVYAEIKFTLRDCNSMPGVLGTCKETFNLYYLESDRDLGASTQESQFLKIDTIAADESFTGADLGVRRLKLNTEVRSVGPLSKRGFYLAFQDIGACLAILSLRIYYKKCPAMVRNLAAFSEAVTGADSSSLVEVRGQCVRHSEERDTPKMYCSAEGEWLVPIGKCVCSAGYEERRDACVACELGFYKSAPGDQLCARCPPHSHSAAPAAQACHCDLSYYRAALDPPSSACTRPPSAPVNLISSVNGTSVTLEWAPPLDPGGRSDITYNAVCRRCPWALSRCEACGSGTRFVPQQTSLVQASLLVANLLAHMNYSFWIEAVNGVSDLSPEPRRAAVVNITTNQAAPSQVVVIRQERAGQTSVSLLWQEPEQPNGIILEYEIKYYEKDKEMQSYSTLKAVTTRATVSGLKPGTRYVFQVRARTSAGCGRFSQAMEVETGKPRPRYDTRTIVWICLTLITGLVVLLLLLICKKRHCGYSKAFQDSDEEKMHYQNGQAPPPVFLPLHHPPGKLPEPQFYAEPHTYEEPGRAGRSFTREIEASRIHIEKIIGSGDSGEVCYGRLRVPGQRDVPVAIKALKAGYTERQRRDFLSEASIMGQFDHPNIIRLEGVVTRGRLAMIVTEYMENGSLDTFLRTHDGQFTIMQLVGMLRGVGAGMRYLSDLGYVHRDLAARNVLVDSNLVCKVSDFGLSRVLEDDPDAAYTTTGGKIPIRWTAPEAIAFRTFSSASDVWSFGVVMWEVLAYGERPYWNMTNRDVISSVEEGYRLPAPMGCPHALHQLMLDCWHKDRAQRPRFSQIVSVLDALIRSPESLRATATVSRCPPPAFVRSCFDLRGGSGGGGGLTVGDWLDSIRMGRYRDHFAAGGYSSLGMVLRMNAQDVRALGITLMGHQKKILGSIQTMRAQLTSTQGPRRHL

SEQ ID NO: 4822 - protein, 495 aa, Homo sapiens
MAPARGRLPPALWVVTAAAAAATCVSAARGEVNLLDTSTIHGDWGWLTYPAHGWDSINEVDESFQPIHTYQVCNVMSPNQNNWLRTSWVPRDGARRVYAEIKFTLRDCNSMPGVLGTCKETFNLYYLESDRDLGASTQESQFLKIDTIAADESFTGADLGVRRLKLNTEVRSVGPLSKRGFYLAFQDIGACLAILSLRIYYKKCPAMVRNLAAFSEAVTGADSSSLVEVRGQCVRHSEERDTPKMYCSAEGEWLVPIGKCVCSAGYEERRDACVACELGFYKSAPGDQLCARCPPHSHSAAPAAQACHCDLSYYRAALDPPSSACTRPPSAPVNLISSVNGTSVTLEWAPPLDPGGRSDITYNAVCRRCPWALSRCEACGSGTRFVPQQTSLVQASLLVANLLAHMNYSFWIEAVNGVSDLSPEPRRAAVVNITTNQAGRRRNSVPQRPGPPASPASDPSRDQSSAGDVLWAFRQVPLWPCAPHQDPELEALHCL

SEQ ID NO: 4823 - protein, 986 aa, Homo sapiens
MALRRLGAALLLLPLLAAVEETLMDSTTATAELGWMVHPPSGWEEVSGYDENMNTIRTYQVCNVFESSQNNWLRTKFIRRRGAHRIHVEMKFSVRDCSSIPSVPGSCKETFNLYYYEADFDSATKTFPNWMENPWVKVDTIAADESFSQVDLGGRVMKINTEVRSFGPVSRSGFYLAFQDYGGCMSLIAVRVFYRKCPRIIQNGAIFQETLSGAESTSLVAARGSCIANAEEVDVPIKLYCNGDGEWLVPIGRCMCKAGFEAVENGTVCRGCPSGTFKANQGDEACTHCPINSRTTSEGATNCVCRNGYYRADLDPLDMPCTTIPSAPQAVISSVNETSLMLEWTPPRDSGGREDLVYNIICKSCGSGRGACTRCGDNVQYAPRQLGLTEPRIYISDLLAHTQYTFEIQAVNGVTDQSPFSPQFASVNITTNQAAPSAVSIMHQVSRTVDSITLSWSQPDQPNGVILDYELQYYEKELSEYNATAIKSPTNTVTVQGLKAGAIYVFQVRARTVAGYGRYSGKMYFQTMTEAEYQTSIQEKLPLIIGSSAAGLVFLIAVVVIAIVCNRRGFERADSEYTDKLQHYTSGHMTPGMKIYIDPFTYEDPNEAVREFAKEIDISCVKIEQVIGAGEFGEVCSGHLKLPGKREIFVAIKTLKSGYTEKQRRDFLSEASIMGQFDHPNVIHLEGVVTKSTPVMIITEFMENGSLDSFLRQNDGQFTVIQLVGMLRGIAAGMKYLADMNYVHRDLAARNILVNSNLVCKVSDFGLSRFLEDDTSDPTYTSALGGKIPIRWTAPEAIQYRKFTSASDVWSYGIVMWEVMSYGERPYWDMTNQDVINAIEQDYRLPPPMDCPSALHQLMLDCWQKDRNHRPKFGQIVNTLDKMIRNPNSLKAMAPLSSGINLPLLDRTIPDYTSFNTVDEWLEAIKMGQYKESFANAGFTSFDVVSQMMMEDILRVGVTLAGHQKKILNSIQVMRAQMNQIQSVEV

SEQ ID NO: 4824 - protein, 1055 aa, Homo sapiens
MALRRLGAALLLLPLLAAVEETLMDSTTATAELGWMVHPPSGWEEVSGYDENMNTIRTYQVCNVFESSQNNWLRTKFIRRRGAHRIHVEMKFSVRDCSSIPSVPGSCKETFNLYYYEADFDSATKTFPNWMENPWVKVDTIAADESFSQVDLGGRVMKINTEVRSFGPVSRSGFYLAFQDYGGCMSLIAVRVFYRKCPRIIQNGAIFQETLSGAESTSLVAARGSCIANAEEVDVPIKLYCNGDGEWLVPIGRCMCKAGFEAVENGTVCRGCPSGTFKANQGDEACTHCPINSRTTSEGATNCVCRNGYYRADLDPLDMPCTTIPSAPQAVISSVNETSLMLEWTPPRDSGGREDLVYNIICKSCGSGRGACTRCGDNVQYAPRQLGLTEPRIYISDLLAHTQYTFEIQAVNGVTDQSPFSPQFASVNITTNQAAPSAVSIMHQVSRTVDSITLSWSQPDQPNGVILDYELQYYEKELSEYNATAIKSPTNTVTVQGLKAGAIYVFQVRARTVAGYGRYSGKMYFQTMTEAEYQTSIQEKLPLIIGSSAAGLVFLIAVVVIAIVCNRRGFERADSEYTDKLQHYTSGHMTPGMKIYIDPFTYEDPNEAVREFAKEIDISCVKIEQVIGAGEFGEVCSGHLKLPGKREIFVAIKTLKSGYTEKQRRDFLSEASIMGQFDHPNVIHLEGVVTKSTPVMIITEFMENGSLDSFLRQNDGQFTVIQLVGMLRGIAAGMKYLADMNYVHRDLAARNILVNSNLVCKVSDFGLSRFLEDDTSDPTYTSALGGKIPIRWTAPEAIQYRKFTSASDVWSYGIVMWEVMSYGERPYWDMTNQDVINAIEQDYRLPPPMDCPSALHQLMLDCWQKDRNHRPKFGQIVNTLDKMIRNPNSLKAMAPLSSGINLPLLDRTIPDYTSFNTVDEWLEAIKMGQYKESFANAGFTSFDVVSQMMMEDILRVGVTLAGHQKKILNSIQVMRAQMNQIQSVEGQPLARRPRATGRTKRCQPRDVTKKTCNSNDGKKKGMGKKKTDPGRGREIQGIFFKEDSHKESNDCSCGG

SEQ ID NO: 4825 - protein, 987 aa, Homo sapiens
MALRRLGAALLLLPLLAAVEETLMDSTTATAELGWMVHPPSGWEEVSGYDENMNTIRTYQVCNVFESSQNNWLRTKFIRRRGAHRIHVEMKFSVRDCSSIPSVPGSCKETFNLYYYEADFDSATKTFPNWMENPWVKVDTIAADESFSQVDLGGRVMKINTEVRSFGPVSRSGFYLAFQDYGGCMSLIAVRVFYRKCPRIIQNGAIFQETLSGAESTSLVAARGSCIANAEEVDVPIKLYCNGDGEWLVPIGRCMCKAGFEAVENGTVCRGCPSGTFKANQGDEACTHCPINSRTTSEGATNCVCRNGYYRADLDPLDMPCTTIPSAPQAVISSVNETSLMLEWTPPRDSGGREDLVYNIICKSCGSGRGACTRCGDNVQYAPRQLGLTEPRIYISDLLAHTQYTFEIQAVNGVTDQSPFSPQFASVNITTNQAAPSAVSIMHQVSRTVDSITLSWSQPDQPNGVILDYELQYYEKELSEYNATAIKSPTNTVTVQGLKAGAIYVFQVRARTVAGYGRYSGKMYFQTMTEAEYQTSIQEKLPLIIGSSAAGLVFLIAVVVIAIVCNRRRGFERADSEYTDKLQHYTSGHMTPGMKIYIDPFTYEDPNEAVREFAKEIDISCVKIEQVIGAGEFGEVCSGHLKLPGKREIFVAIKTLKSGYTEKQRRDFLSEASIMGQFDHPNVIHLEGVVTKSTPVMIITEFMENGSLDSFLRQNDGQFTVIQLVGMLRGIAAGMKYLADMNYVHRDLAARNILVNSNLVCKVSDFGLSRFLEDDTSDPTYTSALGGKIPIRWTAPEAIQYRKFTSASDVWSYGIVMWEVMSYGERPYWDMTNQDVINAIEQDYRLPPPMDCPSALHQLMLDCWQKDRNHRPKFGQIVNTLDKMIRNPNSLKAMAPLSSGINLPLLDRTIPDYTSFNTVDEWLEAIKMGQYKESFANAGFTSFDVVSQMMMEDILRVGVTLAGHQKKILNSIQVMRAQMNQIQSVEV

SEQ ID NO: 4826 - protein, 482 aa, Homo sapiens
MALRRLGAALLLLPLLAAVEETLMDSTTATAELGWMVHPPSGWEEVSGYDENMNTIRTYQVCNVFESSQNNWLRTKFIRRRGAHRIHVEMKFSVRDCSSIPSVPGSCKETFNLYYYEADFDSATKTFPNWMENPWVKVDTIAADESFSQVDLGGRVMKINTEVRSFGPVSRSGFYLAFQDYGGCMSLIAVRVFYRKCPRIIQNGAIFQETLSGAESTSLVAARGSCIANAEEVDVPIKLYCNGDGEWLVPIGRCMCKAGFEAVENGTVCRGCPSGTFKANQGDEACTHCPINSRTTSEGATNCVCRNGYYRADLDPLDMPCTTIPSAPQAVISSVNETSLMLEWTPPRDSGGREDLVYNIICKSCGSGRGACTRCGDNVQYAPRQLGLTEPRIYISDLLAHTQYTFEIQAVNGVTDQSPFSPQFASVNITTNQAAPSAVSIMHQVSRTVDSITLSWSQPDQPNGVILDYELQYYEKMKTQRS

SEQ ID NO: 4827 - protein, 946 aa, Homo sapiens
MWVPVLALPVCTYAETLMDSTTATAELGWMVHPPSGWEEVSGYDENMNTIRTYQVCNVFESSQNNWLRTKFIRRRGAHRIHVEMKFSVRDCSSIPSVPGSCKETFNLYYYEADFDSATKTFPNWMENPWVKVDTIAADESFSQVDLGGRVMKINTEVRSFGPVSRSGFYLAFQDYGGCMSLIAVRVFYRKCPRIIQNGAIFQETLSGAESTSLVAARGSCIANAEEVDVPIKLYCNGDGEWLVPIGRCMCKAGFEAVENGTVCRGCPSGTFKANQGDEACTHCPINSRTTSEGATNCVCRNGYYRADLDPLDMPCTTIPSAPQAVISSVNETSLMLEWTPPRDSGGREDLVYNIICKSCGSGRGACTRCGDNVQYAPRQLGLTEPRIYISDLLAHTQYTFEIQAVNGVTDQSPFSPQFASVNITTNQAAPSAVSIMHQVSRTVDSITLSWSQPDQPNGVILDYELQYYEKQELSEYNATAIKSPTNTVTVQGLKAGAIYVFQVRARTVAGYGRYSGKMYFQTMTEAEYQTSIQEKLPLIIGSSAAGLVFLIAVVVIAIVCNRRGFERADSEYTDKLQHYTSGHMTPGMKIYIDPFTYEDPNEAVREFAKEIDISCVKIEQVIGAGEFGEVCSGHLKLPGKREIFVAIKTLKSGYTEKQRRDFLSEASIMGQFDHPNVIHLEGVVTKSTPVMIITEFMENGSLDSFLRQNDGQFTVIQLVGMLRGIAAGMKYLADMNYVHRDLAARNILVNSNLVCKVSDFGLSRFLEDDTSDPTYTSALGGKIPIRWTAPEAIQYRKFTSASDVWSYGIVMWEVMSYGERPYWDMTNQDVINAIEQDYRLPPPMDCPSALHQLMLDCWQKDRNHRPKFGQIVNTLDKMIRNPNSLKAMAPLSSGINLPLLDRTIPDYTSFNTVDEWLEAIKMGQYKESFANAGFTSFDVVSQMMME

SEQ ID NO: 4828 - protein, 935 aa, Homo sapiens
MELRVLLCWASLAAALEETLLNTKLETADLKWVTFPQVDGQWEELSGLDEEQHSVRTYEVCDVQRAPGQAHWLRTGWVPRRGAVHVYATLRFTMLECLSLPRAGRSCKETFTVFYYESDADTATALTPAWMENPYIKVDTVAAEHLTRKRPGAEATGKVNVKTLRLGPLSKAGFYLAFQDQGACMALLSLHLFYKKCAQLTVNLTRFPETVPRELVVPVAGSCVVDAVPAPGPSPSLYCREDGQWAEQPVTGCSCAPGFEAAEGNTKCRACAQGTFKPLSGEGSCQPCPANSHSNTIGSAVCQCRVGYFRARTDPRGAPCTTPPSAPRSVVSRLNGSSLHLEWSAPLESGGREDLTYALRCRECRPGGSCAPCGGDLTFDPGPRDLVEPWVVVRGLRPDFTYTFEVTALNGVSSLATGPVPFEPVNVTTDREVPPAVSDIRVTRSSPSSLSLAWAVPRAPSGAVLDYEVKYHEKGAEGPSSVRFLKTSENRAELRGLKRGASYLVQVRARSEAGYGPFGQEHHSQTQLDESEGWREQLALIAGTAVVGVVLVLVVIVVAVLCLRKQSNGREAEYSDKHGQYLIGHGTKVYIDPFTYEDPNEAVREFAKEIDVSYVKIEEVIGAGEFGEVCRGRLKAPGKKESCVAIKTLKGGYTERQRREFLSEASIMGQFEHPNIIRLEGVVTNSMPVMILTEFMENGALDSFLRLNDGQFTVIQLVGMLRGIASGMRYLAEMSYVHRDLAARNILVNSNLVCKVSDFGLSRFLEENSSDPTYTSSLGGKIPIRWTAPEAIAFRKFTSASDAWSYGIVMWEVMSFGERPYWDMSNQDVINAIEQDYRLPPPPDCPTSLHQLMLDCWQKDRNARPRFPQVVSALDKMIRNPASLKIVARENGGDLLRIGVTLAGHQKKILASVQHMKSQAKPGTPGGTGGPAPQY

SEQ ID NO: 4829 - protein, 987 aa, Homo sapiens
MELRVLLCWASLAAALEETLLNTKLETADLKWVTFPQVDGQWEELSGLDEEQHSVRTYEVCDVQRAPGQAHWLRTGWVPRRGAVHVYATLRFTMLECLSLPRAGRSCKETFTVFYYESDADTATALTPAWMENPYIKVDTVAAEHLTRKRPGAEATGKVNVKTLRLGPLSKAGFYLAFQDQGACMALLSLHLFYKKCAQLTVNLTRFPETVPRELVVPVAGSCVVDAVPAPGPSPSLYCREDGQWAEQPVTGCSCAPGFEAAEGNTKCRACAQGTFKPLSGEGSCQPCPANSHSNTIGSAVCQCRVGYFRARTDPRGAPCTTPPSAPRSVVSRLNGSSLHLEWSAPLESGGREDLTYALRCRECRPGGSCAPCGGDLTFDPGPRDLVEPWVVVRGLRPDFTYTFEVTALNGVSSLATGPVPFEPVNVTTDREVPPAVSDIRVTRSSPSSLSLAWAVPRAPSGAVLDYEVKYHEKGAEGPSSVRFLKTSENRAELRGLKRGASYLVQVRARSEAGYGPFGQEHHSQTQLDESEGWREQLALIAGTAVVGVVLVLVVIVVAVLCLRKQSNGREAEYSDKHGQYLIGHGTKVYIDPFTYEDPNEAVREFAKEIDVSYVKIEEVIGAGEFGEVCRGRLKAPGKKESCVAIKTLKGGYTERQRREFLSEASIMGQFEHPNIIRLEGVVTNSMPVMILTEFMENGALDSFLRLNDGQFTVIQLVGMLRGIASGMRYLAEMSYVHRDLAARNILVNSNLVCKVSDFGLSRFLEENSSDPTYTSSLGGKIPIRWTAPEAIAFRKFTSASDAWSYGIVMWEVMSFGERPYWDMSNQDVINAIEQDYRLPPPPDCPTSLHQLMLDCWQKDRNARPRFPQVVSALDKMIRNPASLKIVARENGGASHPLLDQRQPHYSAFGSVGEWLRAIKMGRYEESFAAAGFGSFELVSQISAEDLLRIGVTLAGHQKKILASVQHMKSQAKPGTPGGTGGPAPQY

SEQ ID NO: 4830 - protein, 306 aa, Homo sapiens
MELRVLLCWASLAAALEETLLNTKLETADLKWVTFPQVDGQWEELSGLDEEQHSVRTYEVCDVQRAPGQAHWLRTGWVPRRGAVHVYATLRFTMLECLSLPRAGRSCKETFTVFYYESDADTATALTPAWMENPYIKVDTVAAEHLTRKRPGAEATGKVNVKTLRLGPLSKAGFYLAFQDQGACMALLSLHLFYKKCAQLTVNLTRFPETVPRELVVPVAGSCVVDAVPAPGPSPSLYCREDGQWAEQPVTGCSCAPGFEAAEGNTKCRGRRGSQQRAVPEDVRKPGRAAGAEAGSQLPGAGTGAL

SEQ ID NO: 4831 - protein, 126 aa, Homo sapiens
MPELVVTALLAPSRLSLKLLRAFMWSLVFSVALVAAAVYGCIALTHVLCRPRRGCCGRRRSASPACLSDPSLGEHGFLNLKSSGLRLHYVSAGRGNGPLMLFLHGFPENWFSWRYQLREFQSRFHV

SEQ ID NO: 4832 - protein, 360 aa, Homo sapiens
MPELVVTALLAPSRLSLKLLRAFMWSLVFSVALVAAAVYGCIALTHVLCRPRRGCCGRRRSASPACLSDPSLGEHGFLNLKSSGLRLHYVSAGRGNGPLMLFLHGFPENWFSWRYQLREFQSRFHVVAVDLRGYGPSDAPRDVDCYTIDLLLVDIKDVILGLGYSKCILVAHDWGALLAWHFSIYYPSLVERMVVVSGAPMSVYQDYSLHHISQFFRSHYMFLFQLPWLPEKLLSMSDFQILKTTLTHRKTGIPCLTPSELEAFLYNFSQPGGLTGPLNYYRNLFRNFPLEPQELTTPTLLLWGEKDTYLELGLVEAIGSRFVPGRLEAHILPGIGHWIPQSNPQEMHQYMWAFLQDLLD

SEQ ID NO: 4833 - protein, 360 aa, Homo sapiens; identical to SEQ ID NO: 4832

SEQ ID NO: 4834 - protein, 360 aa, Homo sapiens; identical to SEQ ID NO: 4832

SEQ ID NO: 4835 - protein, 193 aa, Homo sapiens
MGVHECPAWLWLLLSLLSLPLGLPVLGAPPRLICDSRVLERYLLEAKEAENITTGCAEHCSLNENITVPDTKVNFYAWKRMEVGQQAVEVWQGLALLSEAVLRGQALLVNSSQPWEPLQLHVDKAVSGLRSLTTLLRALGAQKEAISPPDAASAAPLRTITADTFRKLFRVYSNFLRGKLKLYTGEACRTGDR

SEQ ID NO: 4836 - protein, 133 aa, Homo sapiens
MGSSGLLSLLVLFVLLANVQGPGLTDWLFPRRCPKIREECEFQERDVCTKDRQCQDNKKCCVFSCGKKCLDLKQDVCEMPKETGPCLAYFLHWWYDKKDNTCSMFVYGGCQGNNNNFQSKANCLNTCKNKRFP

SEQ ID NO: 4837 - protein, 77 aa, Homo sapiens
MGSSGLLSLLVLFVLLANVQGPGLTDWLFPRRCPKIREECEFQERDVCTKDRQCQDNKKCCVFSCGKKCLDLKQGKQ

SEQ ID NO: 4838 - protein, 117 aa, Homo sapiens
MLSKAHGCKTALSLGRCPKIREECEFQERDVCTKDRQCQDNKKCCVFSCGKKCLDLKQDVCEMPKETGPCLAYFLHWWYDKKDNTCSMFVYGGCQGNNNNFQSKANCLNTCKNKRFP

SEQ ID NO: 4839 - protein, 179 aa, Homo sapiens
MGSSGLLSLLVLFVLLANVQGPGLTDWLFPRRCPKIREECEFQERDVCTKDRQCQDNKKCCVFSCGKKCLDLKQDVCEMPKETGPCLAYFLHWWYDKKDNTCSMFVYGGCQGNNNNFQSKANCLNTCKNKQPCPKIKVECEVEEIDQCTKPRDCPENMKCCPFSRGKKCLDFRKASLST

SEQ ID NO: 4840 - protein, 762 aa, Homo sapiens
MAAAAQLSLTQLSSGNPVYEKYYRQVDTGNTGRVLASDAAAFLKKSGLPDLILGKIWDLADTDGKGILNKQEFFVALRLVACAQNGLEVSLSSLNLAVPPPRFHDTSSPLLISGTSAAELPWAVKPEDKAKYDAIFDSLSPVNGFLSGDKVKPVLLNSKLPVDILGRVWELSDIDHDGMLDRDEFAVAMFLVYCALEKEPVPMSLPPALVPPSKRKTWVVSPAEKAKYDEIFLKTDKDMDGFVSGLEVREIFLKTGLPSTLLAHIWSLCDTKDCGKLSKDQFALAFHLISQKLIKGIDPPHVLTPEMIPPSDRASLQKNIIGSSPVADFSAIKELDTLNNEIVDLQREKNNVEQDLKEKEDTIKQRTSEVQDLQDEVQRENTNLQKLQAQKQQVQELLDELDEQKAQLEEQLKEVRKKCAEEAQLARSSPELLPSGVTDENEVTTAVTEKVCSELDNNRHSKEEDPFNVDSSSLTGPVADTNLDFFQSDPFVGSDPFKDDPFGKIDPFGGDPFKGSDPFASDCFFRQSTDPFATSSTDPFSAANNSSITSVETLKHNDPFAPGGTVVAASDSATDPFASVFGNESFGGGFADFSTLSKVNNEDPFRSATSSSVSNVVITKNVFEETSVKSEDEPPALPPKIGTPTRPCPLPPGKRSINKLDSPDPFKLNDPFQPFPGNDSPKEKDPEIFCDPFTSATTTTNKEADPSNFANFSAYPSEEDMIEWAKRESEREEEQRLARLNQQEQEDLELAIALSKSEISEA

SEQ ID NO: 4841 - protein, 896 aa, Homo sapiens
MAAAAQLSLTQLSSGNPVYEKYYRQVDTGNTGRVLASDAAAFLKKSGLPDLILGKIWDLADTDGKGILNKQEFFVALRLVACAQNGLEVSLSSLNLAVPPPRFHDTSSPLLISGTSAAELPWAVKPEDKAKYDAIFDSLSPVNGFLSGDKVKPVLLNSKLPVDILGRVWELSDIDHDGMLDRDEFAVAMFLVYCALEKEPVPMSLPPALVPPSKRKTWVVSPAEKAKYDEIFLKTDKDMDGFVSGLEVREIFLKTGLPSTLLAHIWSLCDTKDCGKLSKDQFALAFHLISQKLIKGIDPPHVLTPEMIPPSDRASLQKNIIGSSPVADFSAIKELDTLNNEIVDLQREKNNVEQDLKEKEDTIKQRTSEVQDLQDEVQRENTNLQKLQAQKQQVQELLDELDEQKAQLEEQLKEVRKKCAEEAQLISSLKAELTSQESQISTYEEELAKAREELSRLQQETAELEESVESGKAQLEPLQQHLQDSQQEISSMQMKLMEMKDLENHNSQLNWCSSPHSILVNGATDYCSLSTSSSETANLNEHVEGQSNLESEPIHQESPARSSPELLPSGVTDENEVTTAVTEKVCSELDNNRHSKEEDPFNVDSSSLTGPVADTNLDFFQSDPFVGSDPFKDDPFGKIDPFGGDPFKGSDPFASDCFFRQSTDPFATSSTDPFSAANNSSITSVETLKHNDPFAPGGTVVAASDSATDPFASVFGNESFGGGFADFSTLSKVNNEDPFRSATSSSVSNVVITKNVFEETSVKSEDEPPALPPKIGTPTRPCPLPPGKRSINKLDSPDPFKLNDPFQPFPGNDSPKEKDPEIFCDPFTSATTTTNKEADPSNFANFSAYPSEEDMIEWAKRESEREEEQRLARLNQQEQEDLELAIALSKSEISEA

SEQ ID NO: 4842 - protein, 90 aa, Homo sapiens
  SITE 1: note = misc_feature - Xaa can be any naturally occurring amino acid
XAAAQLSLTQLSSGNPVYEKYYRQVDTGNTGRVLASDAAAFLKKSGLPDLILGKIWDLADTDGKGILNKQHDTSSPLLISGTSAAELPWA

SEQ ID NO: 4843 - protein, 659 aa, Homo sapiens
MDSQGRVWAQEMLLRVSPDHVTLLDPASKEELESYPLGAIVRCDAVMPPGRSRSLLLLVCQEPERAQPDVHFFQGLRLGAELIREDIQGALHNYRSGRGERRAAALRATQEELQRDRSPAAETPPLQRRPSVRAVISTVERGAGRGRPQAKPIPEAEEAQRPEPVGTSSNADSASPDLGPRGPDLAVLQAEREVDILNHVFDDVESFVSRLQKSAEAARVLEHRERGRRSRRRAAGEGLLTLRAKPPSEAEYTDVLQKIKYAFSLLARLRGNIADPSSPELLHFLFGPLQMIVNTSGGPEFASSVRRPHLTSDAVALLRDNVTPRENELWTSLGDSWTRPGLELSPEEGPPYRPEFFSGWEPPVTDPQSRAWEDPVEKQLQHERRRRQQSAPQVAVNGHRDLEPESEPQLESETAGKWVLCNYDFQARNSSELSVKQRDVLEVLDDSRKWWKVRDPAGQEGYVPYNILTPYPGPRLHHSQSPARSLNSTPPPPPAPAPAPPPALARPRWDRPRWDSCDSLNGLDPSEKEKFSQMLIVNEELQARLAQGRSGPSRAVPGPRAPEPQLSPGSDASEVRAWLQAKGFSSGTVDALGVLTGAQLFSLQKEELRAVSPEEGARVYSQVTVQRSLLEDKEKVSELEAVMEKQKKKVEGEVEMEVI

SEQ ID NO: 4844 - protein, 548 aa, Homo sapiens
MGRKAIVLAIANTSLAFPLCQHLVTFCLGEDDGVHTVEDASRKLAVMDSQGRVWAQEMLLRVSPDHVTLLDPASKEELESYPLGAIVRCDAVMPPGRSRSLLLLVCQEPERAQPDVHFFQGLRLGAELIREDIQGALHNYRSGRGERRAAALRATQEELQRDRSPAAETPPLQRRPSVRAVISTVERGAGRGRPQAKPIPEAEEAQRPEPVGTSSNADSASPDLGPRGPDLAVLQAEREVDILNHVFDDVESFVSRLQKSAEAARVLEHRERGRRSRRRAAGEGLLTLRAKPPSEAEYTDVLQKIKYAFSLLARLRGNIADPSSPELLHFLFGPLQMIVNTSGGPEFASSVRRPHLTSDAVALLRDNVTPRENELWTSLGDSWTRPGLELSPEEGPPYRPEFFSGWEPPVTDPQSRAWEDPVEKQLQHERRRRQVTQATQQGRGWEVRGRGRSAWPRLTRLSYFLQQSAPQVAVNGHRDLEPESEPQLESETAGKWVLCNYDFQARNSSELSVKQRDVLEDKEKVSELEAVMEKQKKKVEGEVEMEVI

SEQ ID NO: 4845 - protein, 428 aa, Homo sapiens
MHLVTFCLGEDDGVHTVEDASRKLAVMDSQGRVWAQEMLLRVSPDHVTLLDPASKEELESYPLGAIVRCDAVMPPGRSRSLLLLVCQEPERAQPDVHFFQGLRLGAELIREDIQGALHNYRSGRGERRAAALRATQEELQRDRSPAAETPPLQRRPSVRAVISTVERGAGRGRPQAKPIPEAEEAQRPEPVGTSSNADSASPDLGPRGPDLAVLQAEREVDILNHVFDDVESFVSRLQKSAEAARVLEHRERGRRSRRRAAGEGLLTLRAKPPSEAEYTDVLQKIKYAFSLLARLRGNIADPSSPELLHFLFGPLQMIVNTSGGPEFASSVRRPHLTSDAVALLRDNVTPRENELWTSLGDSWTRPGLELSPEEGPPYRPEFFSGWEPPVTDPQSRAWEDPVEKQLQHERRRRQQSAPQVAVNGWVRW

SEQ ID NO: 4846 - protein, 596 aa, Homo sapiens
MNRTWPRRIWGSSQDEAELIREDIQGALHNYRSGRGERRAAALRATQEELQRDRSPAAETPPLQRRPSVRAVISTVERGAGRGRPQAKPIPEAEEAQRPEPVGTSSNADSASPDLGPRGPDLAVLQAEREVDILNHVFDDVESFVSRLQKSAEAARVLEHRERGRRSRRRAAGEGLLTLRAKPPSEAEYTDVLQKIKYAFSLLARLRGNIADPSSPELLHFLFGPLQMIVNTSGGPEFASSVRRPHLTSDAVALLRDNVTPRENELWTSLGDSWTRPGLELSPEEGPPYRPEFFSGWEPPVTDPQSRAWEDPVEKQLQHERRRRQQSAPQVAVNGHRDLEPESEPQLESETAGKWVLCNYDFQARNSSELSVKQRDVLEVLDDSRKWWKVRDPAGQEGYVPYNILTPYPGPRLHHSQSPARSLNSTPPPPPAPAPAPPPALARPRWDRPRWDSCDSLNGLDPSEKEKFSQMLIVNEELQARLAQGRSGPSRAVPGPRAPEPQLSPGSDASEVRAWLQAKGFSSGTVDALGVLTGAQLFSLQKEELRAVSPEEGARVYSQVTVQRSLLEDKEKVSELEAVMEKQKKKVEGEVEMEVI

SEQ ID NO: 4847 - protein, 409 aa, Homo sapiens
MNRTWPRRIWGSSQDEVGFASSVRRPHLTSDAVALLRDNVTPRENELWTSLGDSWTRPGLELSPEEGPPYRPEFFSGWEPPVTDPQSRAWEDPVEKQLQHERRRRQVTQATQQGRGWEVRGRGRSAWPRLTRLSYFLQQSAPQVAVNGHRDLEPESEPQLESETAGKWVLCNYDFQARNSSELSVKQRDVLEVLDDSRKWWKVRDPAGQEGYVPYNILTPYPGPRLHHSQSPARSLNSTPPPPPAPAPAPPPALARPRWDRPRWDSCDSLNGLDPSEKEKFSQMLIVNEELQARLAQGRSGPSRAVPGPRAPEPQLSPGSDASEVRAWLQAKGFSSGTVDALGVLTGAQLFSLQKEELRAVSPEEGARVYSQVTVQRSLLEDKEKVSELEAVMEKQKKKVEGEVEMEVI

SEQ ID NO: 4848 - protein, 723 aa, Homo sapiens
MSTATGPEAAPKPSAKSIYEQRKRYSTVVMADVSQYPVNHLVTFCLGEDDGVHTVEDASRKLAVMDSQGRVWAQEMLLRVSPDHVTLLDPASKEELESYPLGAIVRCDAVMPPGRSRSLLLLVCQEPERAQPDVHFFQGLRLGAELIREDIQGALHNYRSGRGERRAAALRATQEELQRDRSPAAETPPLQRRPSVRAVISTVERGAGRGRPQAKPIPEAEEAQRPEPVGTSSNADSASPDLGPRGPDLAVLQAEREVDILNHVFDDVESFVSRLQKSAEAARVLEHRERGRRSRRRAAGEGLLTLRAKPPSEAEYTDVLQKIKYAFSLLARLRGNIADPSSPELLHFLFGPLQMIVNTSGGPEFASSVRRPHLTSDAVALLRDNVTPRENELWTSLGDSWTRPGLELSPEEGPPYRPEFFSGWEPPVTDPQSRAWEDPVEKQLQHERRRRQQSAPQVAVNGHRDLEPESEPQLESETAGKWVLCNYDFQARNSSELSVKQRDVLEVLDDSRKWWKVRDPAGQEGYVPYNILTPYPGPRLHHSQSPARSLNSTPPPPPAPAPAPPPALARPRWDRPRWDSCDSLNGLDPSEKEKFSQMLIVNEELQARLAQGRSGPSRAVPGPRAPEPQLSPGSDASEVRAWLQAKGFSSGTVDALGVLTGAQLFSLQKEELRAVSPEEGARVYSQVTVQRSLLEDKEKVSELEAVMEKQKKKVEGEVEMEVI

SEQ ID NO: 4849 - protein, 715 aa, Homo sapiens
MHLLPALAGVLATLVLAQPCEGTDPASPGAVETSVLRDCIAEAKLLVDAAYNWTQKSIKQRLRSGSASPMDLLSYFKQPVAATRTVVRAADYMHVALGLLEEKLQPQRSGPFNVTDVLTEPQLRLLSQASGCALRDQAERCSDKYRTITGRCNNKRRPLLGASNQALARWLPAEYEDGLSLPFGWTPSRRRNGFLLPLVRAVSNQIVRFPNERLTSDRGRALMFMQWGQFIDHDLDFSPESPARVAFTAGVDCERTCAQLPPCFPIKIPPNDPRIKNQRDCIPFFRSAPSCPQNKNRVRNQINALTSFVDASMVYGSEVSLSLRLRNRTNYLGLLAINQRFQDNGRALLPFDNLHDDPCLLTNRSARIPCFLAGDTRSTETPKLAAMHTLFMREHNRLATELRRLNPRWNGDKLYNEARKIMGAMVQIITYRDFLPLVLGKARARRTLGHYRGYCSNVDPRVANVFTLAFRFGHTMLQPFMFRLDSQYRASAPNSHVPLSSAFFASWRIVYEGGIDPILRGLMATPAKLNRQDAMLVDELRDRLFRQVRRIGLDLAALNMQRSRDHGLPGYNAWRRFCGLSQPRNLAQLSRVLKNQDLARKFLNLYGTPDNIDIWIGAIAEPLLPGARVGPLLACLFENQFRRARDGDRFWWQKRGVFTKRQRKALSRISLSRIICDNTGITTVSRDIFRANIYPRGFVNCSRIPRLNLSAWRGT

SEQ ID NO: 4850 - protein, 234 aa, Homo sapiens
MKTLAGLVLGLVIFDAAVTAPTLESINYDSETYDATLEDLDNLYNYENIPVDKVEIEIATVMPSGNRELLTPPPQPEKAQEEEEEEESTPRLIDGSSPQEPEFTGVLGPHTNEDFPTCLLCTCISTTVYCDDHELDAIPPLPKNTAYFYSRFNRIKKINKNDFASLSDLKRIDLTSNLISEIDEDAFRKLPQLRELVLRDNKIRQLPELPTTLTFIDISNNRLGRKGIKQEAFK

SEQ ID NO: 4851 - protein, 322 aa, Homo sapiens
MKTLAGLVLGLVIFDAAVTAPTLESINYDSETYDATLEDLDNLYNYENIPVDKVEIEIATVMPSGNRELLTPPPQPEKAQEEEEEEESTPRLIDGSSPQEPEFTGVLGPHTNEDFPTCLLCTCISTTVYCDDHELDAIPPLPKNTAYFYSRFNRIKKINKNDFASLSDLKRIDLTSNLISEIDEDAFRKLPQLRELVLRDNKIRQLPELPTTLTFIDISNNRLGRKGIKQEAFKDMYDLHHLYLTDNNLDHIPLPLPENLRALHLQNNNILEMHEDTFCNVKNLTYIRKALEDIRLDGNPINLSKTPQAYMCLPRLPVGSLV

SEQ ID NO: 4852 - protein, 294 aa, Homo sapiens
MNFILFIFIPGVFSLKSSTLKPTIEALPNVLPLNEDVNKQEEKNEDHTPNYAPANEKNGNYYKDIKQYVFTTQNPNGTESEISVRATTDLNFALKNDKTVNATTYEKSTIEEETTTSEPSHKNIQRSTPNVPAFWTMLAKAINGTAVVMDDKDQLFHPIPESDVNATQGENQPDLEDLKIKIMLGISLMTLLLFVVLLAFCSATLYKLRHLSYKSCESQYSVNPELATMSYFHPSEGVSDTSFSKSAESSTFLGTTSSDMRRSGTRTSESKIMTDIISIGSDNEMHENDESVTR

SEQ ID NO: 4853 - protein, 127 aa, Homo sapiens
MNFILFIFIPGVFSLKSSTLKPTIEALPNVLPLNEDVNKQEEKNEDHTPNYAPANEKNGNYYKDIKQYVFTTQNPNGTESEISVRATTDLNFALKNDKTVNATTYEKSTIEEETTTSEPSHKNIQSI

SEQ ID NO: 4854 - protein, 265 aa, Homo sapiens
MNFILFIFIPGVFSLKSSTLKPTIEALPNVLPLNEDVNKQEEKNEDHTPNYAPANEKNGNYYKDIKQYVFTTQNPNGTESEISVRATTDLNFALKNGSTPNVPAFWTMLAKAINGTAVVMDDKDQLFHPIPESDVNATQGENQPDLEDLKIKIMLGISLMTLLLFVVLLAFCSATLYKLRHLSYKSCESQYSVNPELATMSYFHPSEGVSDTSFSKSAESSTFLGTTSSDMRRSGTRTSESKIMTDIISIGSDNEMHENDESVTR

SEQ ID NO: 4855 - protein, 9 aa, Homo sapiens
MAFPCFDEP

SEQ ID NO: 4856 - protein, 129 aa, Homo sapiens
MVFLPLKWSLATMSFLLSSLLALLTVSTPSWCQSTEASPKRSDGTPFPWNKIRLPEYVIPVHYDLLIHANLTTLTFWGTTKVEITASQPTSTIILHSHHLQISRATLRKGAGERLSEEPLQVLEHPRQE

SEQ ID NO: 4857 - protein, 948 aa, Homo sapiens
MVFLPLKWSLATMSFLLSSLLALLTVSTPSWCQSTEASPKRSDGTPFPWNKIRLPEYVIPVHYDLLIHANLTTLTFWGTTKVEITASQPTSTIILHSHHLQISRATLRKGAGERLSEEPLQVLEHPRQEQIALLAPEPLLVGLPYTVVIHYAGNLSETFHGFYKSTYRTKEGELRILASTQFEPTAARMAFPCFDEPAFKASFSIKIRREPRHLAISNMPLVKSVTVAEGLIEDHFDVTVKMSTYLVAFIISDFESVSKITKSGVKVSVYAVPDKINQADYALDAAVTLLEFYEDYFSIPYPLPKQDLAAIPDFQSGAMENWGLTTYRESALLFDAEKSSASSKLGITMTVAHELAHQWFGNLVTMEWWNDLWLNEGFAKFMEFVSVSVTHPELKVGDYFFGKCFDAMEVDALNSSHPVSTPVENPAQIREMFDDVSYDKGACILNMLREYLSADAFKSGIVQYLQKHSYKNTKNEDLWDSMASICPTDGVKGMDGFCSRSQHSSSSSHWHQEGVDVKTMMNTWTLQKGFPLITITVRGRNVHMKQEHYMKGSDGAPDTGYLWHVPLTFITSKSDMVHRFLLKTKTDVLILPEEVEWIKFNVGMNGYYIVHYEDDGWDSLTGLLKGTHTAVSSNDRASLINNAFQLVSIGKLSIEKALDLSLYLKHETEIMPVFQGLNELIPMYKLMEKRDMNEVETQFKAFLIRLLRDLIDKQTWTDEGSVSERMLRSQLLLLACVHNYQPCVQRAEGYFRKWKESNGNLSLPVDVTLAVFAVGAQSTEGWDFLYSKYQFSLSSTEKSQIEFALCRTQNKEKLQWLLDESFKGDKIKTQEFPQILTLIGRNPVGYPLAWQFLRKNWNKLVQKFELGSSSIAHMVMGTTNQFSTRTRLEEVKGFFSSLKENGSQLRCVQQTIETIEENIGWMDKNFDKIRVWLQSEKLEHDPEADATG

SEQ ID NO: 4858 - protein, 941 aa, Homo sapiens
MVFLPLKWSLATMSFLLSSLLALLTVSTPSWCQSTEASPKRSDGTPFPWNKIRLPEYVIPVHYDLLIHANLTTLTFWGTTKVEITASQPTSTIILHSHHLQISRATLRKGAGERLSEEPLQVLEHPRQEQIALLAPEPLLVGLPYTVVIHYAGNLSETFHGFYKSTYRTKEGELRILASTQFEPTAARMAFPCFDEPAFKASFSIKIRREPRHLAISNMPLVKSVTVAEGLIEDHFDVTVKMSTYLVAFIISDFESVSKITKSGVKVSVYAVPDKINQADYALDAAVTLLEFYEDYFSIPYPLPKQDLAAIPDFQSGAMENWGLTTYRESALLFDAEKSSASSKLGITMTVAHELAHQWFGNLVTMEWWNDLWLNEGFAKFMEFVSVSVTHPELKVGDYFFGKCFDAMEVDALNSSHPVSTPVENPAQIREMFDDVSYDKGACILNMLREYLSADAFKSGIVQYLQKHSYKNTKNEDLWDSMASICPTDGVKGMDGFCSRSQHSSSSSHWHQEGVDVKTMMNTWTLQKGFPLITITVRGRNVHMKQEHYMKGSDGAPDTGYLWHVPLTFITSKSDMVHRFLLKTKTDVLILPEEVEWIKFNVGMNGYYIVHYEDDGWDSLTGLLKGTHTAVSSNDRASLINNAFQLVSIGKLSIEKALDLSLYLKHETEIMPVFQGLNELIPMYKLMEKRDMNEVETQFKAFLIRLLRDLIDKQTWTDEGSVSERMLRSQLLLLACVHNYQPCVQRAEGYFRKWKESNGNLSLPVDVTLAVFAVGAQSTEGWDFLYSKYQFSLSSTEKSQIEFALCRTQNKEKLQWLLDESFKGDKIKTQEFPQILTLIGRNPVGYPLAWQFLRKNWNKLVQKFELGSSSIAHMVMGTTNQFSTRTRLEEVKGFFSSLKENGSQLRCVQQTIETIEENIGWMDKNFDKIRVWLQSEKLERM

SEQ ID NO: 4859 - protein, 144 aa, Homo sapiens
  SITE 1: note = misc_feature - Xaa can be any naturally occurring amino acid
XKGDKIKTQEFPQILTLIGRNPVGYPLAWQFLRKNWNKLVQKFELGSSSIAHMVMGTTNQFSTRTRLEEVKGFFSSLKENGSQLRCVQQTIETIEENIGWMDKNFDKIRVWLQSEKLERVALQRKPKCWVPCHRRIKYLILLIL

SEQ ID NO: 4860 - protein, 960 aa, Homo sapiens
MFHSSAMVNSHRKPMFNIHRGFYCLTAILPQICICSQFSVPSSYHFTEDPGAFPVATNGERFPWQELRLPSVVIPLHYDLFVHPNLTSLDFVASEKIEVLVSNATQFIILHSKDLEITNATLQSEEDSRYMKPGKELKVLSYPAHEQIALLVPEKLTPHLKYYVAMDFQAKLGDGFEGFYKSTYRTLGGETRILAVTDFEPTQARMAFPCFDEPLFKANFSIKIRRESRHIALSNMPKVKTIELEGGLLEDHFETTVKMSTYLVAYIVCDFHSLSGFTSSGVKVSIYASPDKRNQTHYALQASLKLLDFYEKYFDIYYPLSKLDLIAIPDFAPGAMENWGLITYRETSLLFDPKTSSASDKLWVTRVIAHELAHQWFGNLVTMEWWNDIWLKEGFAKYMELIAVNATYPELQFDDYFLNVCFEVITKDSLNSSRPISKPAETPTQIQEMFDEVSYNKGACILNMLKDFLGEEKFQKGIIQYLKKFSYRNAKNDDLWSSLSNSCLESDFTSGGVCHSDPKMTSNMLAFLGENAEVKEMMTTWTLQKGIPLLVVKQDGCSLRLQQERFLQGVFQEDPEWRALQERYLWHIPLTYSTSSSNVIHRHILKSKTDTLDLPEKTSWVKFNVDSNGYYIVHYEGHGWDQLITQLNQNHTLLRPKDRVGLIHDVFQLVGAGRLTLDKALDMTYYLQHETSSPALLEGLSYLESFYHMMDRRNISDISENLKRYLLQYFKPVIDRQSWSDKGSVWDRMLRSALLKLACDLNHAPCIQKAAELFSQWMESSGKLNIPTDVLKIVYSVGAQTTAGWNYLLEQYELSMSSAEQNKILYALSTSKHQEKLLKLIELGMEGKVIKTQNLAALLHAIARRPKGQQLAWDFVRENWTHLLKKFDLGSYDIRMIISGTTAHFSSKDKLQEVKLFFESLEAQGSHLDIFQTVLETITKNIKWLEKNLPTLRTWLMVNT

SEQ ID NO: 4861 - protein, 350 aa, Homo sapiens
MFHSSAMVNSHRKPMFNIHRGFYCLTAILPQICICSQFSVPSSYHFTEDPGAFPVATNGERFPWQELRLPSVVIPLHYDLFVHPNLTSLDFVASEKIEVLVSNATQFIILHSKDLEITNATLQSEEDSRYMKPGKELKVLSYPAHEQIALLVPEKLTPHLKYYVAMDFQAKLGDGFEGFYKSTYRTLGGETRILAVTDFEPTQARMAFPCFDEPLFKANFSIKIRRESRHIALSNMPKVKTIELEGGLLEDHFETTVKMSTYLVAYIVCDFHSLSGFTSSGVKVSIYASPDKRNQTHYALQASLKLLDFYEKYFDIYYPLSKLGMFKFHIIVFIFAHKTCFDLFPLSLSM

SEQ ID NO: 4862 - protein, 694 aa, Homo sapiens
MFHSSAMVNSHRKPMFNIHRGFYCLTAILPQICICSQFSVPSSYHFTEDPGAFPVATNGERFPWQELRLPSVVIPLHYDLFVHPNLTSLDFVASEKIEVLVSNATQFIILHSKDLEITNATLQSEEDSRYMKPGKELKVLSYPAHEQIALLVPEKLTPHLKYYVAMDFQAKLGDGFEGFYKSTYRTLGGETRILAVTDFEPTQARMAFPCFDEPLFKANFSIKIRRESRHIALSNMPKVKTIELEGGLLEDHFETTVKMSTYLVAYIVCDFHSLSGFTSSGVKVSIYASPDKRNQTHYALQASLKLLDFYEKYFDIYYPLSKLDLIAIPDFAPGAMENWGLITYRETSLLFDPKTSSASDKLWVTRVIAHELAHQWFGNLVTMEWWNDIWLKEGFAKYMELIAVNATYPELQFDDYFLNVCFEVITKDSLNSSRPISKPAETPTQIQEMFDEVSYNKGACILNMLKDFLGEEKFQKGIIQYLKKFSYRNAKNDDLWSSLSNSCLESDFTSGGVCHSDPKMTSNMLAFLGENAEVKEMMTTWTLQKGIPLLVVKQDGCSLRLQQERFLQGVFQEDPEWRALQERYLWHIPLTYSTSSSNVIHRHILKSKTDTLDLPEKTSWVKFNVDSNGYYIVHYEGHGWDQLITQLNQNHTLLRPKDRVGLIHDVFQLVGAGRLTLDKALDMTYYLQHETSSP

SEQ ID NO: 4863 - protein, 532 aa, Homo sapiens
MFHSSAMVNSHRKPMFNIHRGFYCLTAILPQICICSQFSVPSSYHFTEDPGAFPVATNGERFPWQELRLPSVVIPLHYDLFVHPNLTSLDFVASEKIEVLVSNATQFIILHSKDLEITNATLQSEEDSRYMKPGKELKVLSYPAHEQIALLVPEKLTPHLKYYVAMDFQAKLGDGFEGFYKSTYRTLGGETRILAVTDFEPTQARMAFPCFDEPLFKANFSIKIRRESRHIALSNMPKVKTIELEGGLLEDHFETTVKMSTYLVAYIVCDFHSLSGFTSSGVKVSIYASPDKRNQTHYALQASLKLLDFYEKYFDIYYPLSKLDLIAIPDFAPGAMENWGLITYRETSLLFDPKTSSASDKLWVTRVIAHELAHQWFGNLVTMEWWNDIWLKEGFAKYMELIAVNATYPELQFDDYFLNVCFEVITKDSLNSSRPISKPAETPTQIQEMFDEVSYNKGACILNMLKDFLGEEKFQKGIIQYLKKFSYRNAKNDDLWSSLSNSCLESDFTSGGVCHSDPKMTSNMVRIKRVTE

SEQ ID NO: 4864 - protein, 915 aa, Homo sapiens
MFHSSAMVNSHRKPMFNIHRGFYCLTAILPQICICSQFSVPSSYHFTEDPGAFPVATNGERFPWQELRLPSVVIPLHYDLFVHPNLTSLDFVASEKIEVLVSNATQFIILHSKDLEITNATLQSEEDSRYMKPGKELKVLSYPAHEQIALLVPEKLTPHLKYYVAMDFQAKLGDGFEGFYKSTYRTLGGETRILAVTDFEPTQARMAFPCFDEPLFKANFSIKIRRESRHIALSNMPKVSIYASPDKRNQTHYALQASLKLLDFYEKYFDIYYPLSKLDLIAIPDFAPGAMENWGLITYRETSLLFDPKTSSASDKLWVTRVIAHELAHQWFGNLVTMEWWNDIWLKEGFAKYMELIAVNATYPELQFDDYFLNVCFEVITKDSLNSSRPISKPAETPTQIQEMFDEVSYNKGACILNMLKDFLGEEKFQKGIIQYLKKFSYRNAKNDDLWSSLSNSCLESDFTSGGVCHSDPKMTSNMLAFLGENAEVKEMMTTWTLQKGIPLLVVKQDGCSLRLQQERFLQGVFQEDPEWRALQERYLWHIPLTYSTSSSNVIHRHILKSKTDTLDLPEKTSWVKFNVDSNGYYIVHYEGHGWDQLITQLNQNHTLLRPKDRVGLIHDVFQLVGAGRLTLDKALDMTYYLQHETSSPALLEGLSYLESFYHMMDRRNISDISENLKRYLLQYFKPVIDRQSWSDKGSVWDRMLRSALLKLACDLNHAPCIQKAAELFSQWMESSGKLNIPTDVLKIVYSVGAQTTAGWNYLLEQYELSMSSAEQNKILYALSTSKHQEKLLKLIELGMEGKVIKTQNLAALLHAIARRPKGQQLAWDFVRENWTHLLKKFDLGSYDIRMIISGTTAHFSSKDKLQEVKLFFESLEAQGSHLDIFQTVLETITKNIKWLEKNLPTLRTWLMVNT

SEQ ID NO: 4865 - protein, 29 aa, Homo sapiens
MLHRVDGLVSQGQDPSGRILAVTDFEPTQ

SEQ ID NO: 4866 - protein, 79 aa, Homo sapiens
  SITE 1: note = misc_feature - Xaa can be any naturally occurring amino acid
XGKVIKTQNLAALLHAIARRPKGQQLAWDFVRENWTHLLKKFDLGSYDIRMIISGTTAHFSSKDKLQEVCDFLFLTISK

SEQ ID NO: 4867 - protein, 163 aa, Homo sapiens
  SITE 1: note = misc_feature - Xaa can be any naturally occurring amino acid
XQTHYALQASLKLLDFYEKYFDIYYPLSKLDLIAIPDFAPGAMENWGLITYRETSLLFDPKTSSASDKLWVTRVIAHELAHQWFGNLVTMEWWNDIWLKEGFAKYMELIAVNATYPELQFGACILNMLKDFLGEEKFQKGIIQYLKKFSYRNAKNDDLWSSLS

SEQ ID NO: 4868 - protein, 649 aa, Homo sapiens
CLSCRNYSRGGVCVTHCNFLNGEPREFAHEAECFSCHPECQPMEGTATCNGSGSDTCAQCAHFRDGPHCVSSCPHGVLGAKGPIYKYPDVQNECRPCHENCTQGCKGPELQDCLGQTLVLIGKTHLTMALTVIAGLVVIFMMLGGTFLYWRGRRIQNKRAMRRYLERGESIEPLDPSEKTPIKWMALESIHFGKYTHQSDVWSYGVTVWELMTFGAEPYAGLRLAEVPDLLEKGERLAQPQICTIDVYMVMVKCWMIDENIRPTFKELANEFTRMARDPPRYLVIKRESGPGIAPGPEPHGLTNKKLEEVELEPELDLDLDLEAEEDNLATTTLGSALSLPVGTLNRPRGSQSLLSPSSGYMPMNQGNLGESCQESAVSGSSERCPRPVSLHPMPRGCLASESSEGHVTGSEAELQEKVSMCRSRSRSRSPRPRGDSAYHSQRHSLLTPVTPLSPPGLEEEDVNGYVMPDTHLKGTPSSREGTLSSVGLSSVLGTEEEDEDEEYEYMNRRRRHSPPHPPRPSSLEELGYEYMDVGSDLSASLGSTQSCPLHPVPIMPTAGTTPDEDYEYMNRQRDGGGPGGDYAAMGACPASEQGYEEMRAFQGPGHQAPHVHYARLKTLRSLEATDSAFDNPDYWHSRLFPKANAQRT

SEQ ID NO: 4869 - protein, 81 aa, Homo sapiens
LDIKHNRPRRDCVAEGKVCDPLCSSGGCWGPGPGQCLSCRNYSRGGVCVTHCNFLNGYSKGSQSRMGGGGALQWNCSGGIQ

SEQ ID NO: 4870 - protein, 19 aa, Homo sapiens
MGNLEIVLTGHNADLSFLQ

SEQ ID NO: 4871 - protein, 115 aa, Homo sapiens
MGNLEIVLTGHNADLSFLQWIREVTGYVLVAMNEFSTLPLPNLRVVRGTQVYDGKFAIFVMLNYNTNSSHALRQLRLTQLTEILSGGVYIEKNDKLCHMDTIDWRDIVRDRDAEI

SEQ ID NO: 4872 - protein, 116 aa, Homo sapiens
MGNLEIVLTGHNADLSFLQWIREVTGYVLVAMNEFSTLPLPNLRVVRGTQVYDGKFAIFVMLNYNTNSSHALRQLRLTQLTEILSGGVYIEKNDKLCHMDTIDWRDIVRDRDAEIV

SEQ ID NO: 4873 - protein, 1283 aa, Homo sapiens
MGNLEIVLTGHNADLSFLQWIREVTGYVLVAMNEFSTLPLPNLRVVRGTQVYDGKFAIFVMLNYNTNSSHALRQLRLTQLTEILSGGVYIEKNDKLCHMDTIDWRDIVRDRDAEIVVKDNGRSCPPCHEVCKGRCWGPGSEDCQTLTKTICAPQCNGHCFGPNPNQCCHDECAGGCSGPQDTDCFACRHFNDSGACVPRCPQPLVYNKLTFQLEPNPHTKYQYGGVCVASCPHNFVVDQTSCVRACPPDKMEVDKNGLKMCEPCGGLCPKACEGTGSGSRFQTVDSSNIDGFVNCTKILGNLDFLITGLNGDPWHKIPALDPEKLNVFRTVREITGYLNIQSWPPHMHNFSVFSNLTTIGGRSLYNRGFSLLIMKNLNVTSLGFRSLKEISAGRIYISANRQLCYHHSLNWTKVLRGPTEERLDIKHNRPRRDCVAEGKVCDPLCSSGGCWGPGPGQCLSCRNYSRGGVCVTHCNFLNGEPREFAHEAECFSCHPECQPMEGTATCNGSGSDTCAQCAHFRDGPHCVSSCPHGVLGAKGPIYKYPDVQNECRPCHENCTQGCKGPELQDCLGQTLVLIGKTHLTMALTVIAGLVVIFMMLGGTFLYWRGRRIQNKRAMRRYLERGESIEPLDPSEKANKVLARIFKETELRKLKVLGSGVFGTVHKGVWIPEGESIKIPVCIKVIEDKSGRQSFQAVTDHMLAIGSLDHAHIVRLLGLCPGSSLQLVTQYLPLGSLLDHVRQHRGALGPQLLLNWGVQIAKGMYYLEEHGMVHRNLAARNVLLKSPSQVQVADFGVADLLPPDDKQLLYSEAKTPIKWMALESIHFGKYTHQSDVWSYGVTVWELMTFGAEPYAGLRLAEVPDLLEKGERLAQPQICTIDVYMVMVKCWMIDENIRPTFKELANEFTRMARDPPRYLVIKRESGPGIAPGPEPHGLTNKKLEEVELEPELDLDLDLEAEEDNLATTTLGSALSLPVGTLNRPRGSQSLLSPSSGYMPMNQGNLGESCQESAVSGSSERCPRPVSLHPMPRGCLASESSEGHVTGSEAELQEKVSMCRSRSRSRSPRPRGDSAYHSQRHSLLTPVTPLSPPGLEEEDVNGYVMPDTHLKGTPSSREGTLSSVGLSSVLGTEEEDEDEEYEYMNRRRRHSPPHPPRPSSLEELGYEYMDVGSDLSASLGSTQSCPLHPVPIMPTAGTTPDEDYEYMNRQRDGGGPGGDYAAMGACPASEQGYEEMRAFQGPGHQAPHVHYARLKTLRSLEATDSAFDNPDYWHSRLFPKANAQRT

SEQ ID NO: 4874 - protein, 583 aa, Homo sapiens
MLAIGSLDHAHIVRLLGLCPGSSLQLVTQYLPLGSLLDHVRQHRGALGPQLLLNWGVQIAKGMYYLEEHGMVHRNLAARNVLLKSPSQVQVADFGVADLLPPDDKQLLYSEAKTPIKWMALESIHFGKYTHQSDVWSYGVTVWELMTFGAEPYAGLRLAEVPDLLEKGERLAQPQICTIDVYMVMVKCWMIDENIRPTFKELANEFTRMARDPPRYLVIKRESGPGIAPGPEPHGLTNKKLEEVELEPELDLDLDLEAEEDNLATTTLGSALSLPVGTLNRPRGSQSLLSPSSGYMPMNQGNLGESCQESAVSGSSERCPRPVSLHPMPRGCLASESSEGHVTGSEAELQEKVSMCRSRSRSRSPRPRGDSAYHSQRHSLLTPVTPLSPPGLEEEDVNGYVMPDTHLKGTPSSREGTLSSVGLSSVLGTEEEDEDEEYEYMNRRRRHSPPHPPRPSSLEELGYEYMDVGSDLSASLGSTQSCPLHPVPIMPTAGTTPDEDYEYMNRQRDGGGPGGDYAAMGACPASEQGYEEMRAFQGPGHQAPHVHYARLKTLRSLEATDSAFDNPDYWHSRLFPKANAQRT

SEQ ID NO: 4875 - protein, 462 aa, Homo sapiens
MPMSTILPVTSPCLPATGVTVWELMTFGAEPYAGLRLAEVPDLLEKGERLAQPQICTIDVYMVMVKCWMIDENIRPTFKELANEFTRMARDPPRYLVIKRESGPGIAPGPEPHGLTNKKLEEVELEPELDLDLDLEAEEDNLATTTLGSALSLPVGTLNRPRGSQSLLSPSSGYMPMNQGNLGESCQESAVSGSSERCPRPVSLHPMPRGCLASESSEGHVTGSEAELQEKVSMCRSRSRSRSPRPRGDSAYHSQRHSLLTPVTPLSPPGLEEEDVNGYVMPDTHLKGTPSSREGTLSSVGLSSVLGTEEEDEDEEYEYMNRRRRHSPPHPPRPSSLEELGYEYMDVGSDLSASLGSTQSCPLHPVPIMPTAGTTPDEDYEYMNRQRDGGGPGGDYAAMGACPASEQGYEEMRAFQGPGHQAPHVHYARLKTLRSLEATDSAFDNPDYWHSRLFPKANAQRT

SEQ ID NO: 4876 - protein, 126 aa, Homo sapiens
MRANDALQVLGLLFSLARGSEVGNSQAVCPGTLNGLSVTGDAENQYQTLYKLYERCEVVMGNLEIVLTGHNADLSFLQWIREVTGYVLVAMNEFSTLPLPNLRVVRGTQVYDGKFAIFVMLNYNTN

SEQ ID NO: 4877 - protein, 1342 aa, Homo sapiens
MRANDALQVLGLLFSLARGSEVGNSQAVCPGTLNGLSVTGDAENQYQTLYKLYERCEVVMGNLEIVLTGHNADLSFLQWIREVTGYVLVAMNEFSTLPLPNLRVVRGTQVYDGKFAIFVMLNYNTNSSHALRQLRLTQLTEILSGGVYIEKNDKLCHMDTIDWRDIVRDRDAEIVVKDNGRSCPPCHEVCKGRCWGPGSEDCQTLTKTICAPQCNGHCFGPNPNQCCHDECAGGCSGPQDTDCFACRHFNDSGACVPRCPQPLVYNKLTFQLEPNPHTKYQYGGVCVASCPHNFVVDQTSCVRACPPDKMEVDKNGLKMCEPCGGLCPKACEGTGSGSRFQTVDSSNIDGFVNCTKILGNLDFLITGLNGDPWHKIPALDPEKLNVFRTVREITGYLNIQSWPPHMHNFSVFSNLTTIGGRSLYNRGFSLLIMKNLNVTSLGFRSLKEISAGRIYISANRQLCYHHSLNWTKVLRGPTEERLDIKHNRPRRDCVAEGKVCDPLCSSGGCWGPGPGQCLSCRNYSRGGVCVTHCNFLNGEPREFAHEAECFSCHPECQPMEGTATCNGSGSDTCAQCAHFRDGPHCVSSCPHGVLGAKGPIYKYPDVQNECRPCHENCTQGCKGPELQDCLGQTLVLIGKTHLTMALTVIAGLVVIFMMLGGTFLYWRGRRIQNKRAMRRYLERGESIEPLDPSEKANKVLARIFKETELRKLKVLGSGVFGTVHKGVWIPEGESIKIPVCIKVIEDKSGRQSFQAVTDHMLAIGSLDHAHIVRLLGLCPGSSLQLVTQYLPLGSLLDHVRQHRGALGPQLLLNWGVQIAKGMYYLEEHGMVHRNLAARNVLLKSPSQVQVADFGVADLLPPDDKQLLYSEAKTPIKWMALESIHFGKYTHQSDVWSYGVTVWELMTFGAEPYAGLRLAEVPDLLEKGERLAQPQICTIDVYMVMVKCWMIDENIRPTFKELANEFTRMARDPPRYLVIKRESGPGIAPGPEPHGLTNKKLEEVELEPELDLDLDLEAEEDNLATTTLGSALSLPVGTLNRPRGSQSLLSPSSGYMPMNQGNLGESCQESAVSGSSERCPRPVSLHPMPRGCLASESSEGHVTGSEAELQEKVSMCRSRSRSRSPRPRGDSAYHSQRHSLLTPVTPLSPPGLEEEDVNGYVMPDTHLKGTPSSREGTLSSVGLSSVLGTEEEDEDEEYEYMNRRRRHSPPHPPRPSSLEELGYEYMDVGSDLSASLGSTQSCPLHPVPIMPTAGTTPDEDYEYMNRQRDGGGPGGDYAAMGACPASEQGYEEMRAFQGPGHQAPHVHYARLKTLRSLEATDSAFDNPDYWHSRLFPKANAQRT

SEQ ID NO: 4878 - protein, 921 aa, Homo sapiens
MRANDALQVLGLLFSLARGSEVGNSQAVCPGTLNGLSVTGDAENQYQTLYKLYERCEVVMGNLEIVLTGHNADLSFLQWIREVTGYVLVAMNEFSTLPLPNLRVVRGTQVYDGKFAIFVMLNYNTNSSHALRQLRLTQLTEILSGGVYIEKNDKLCHMDTIDWRDIVRDRDAEIVVKDNGRSCPPCHEVCKGRCWGPGSEDCQTLTKTICAPQCNGHCFGPNPNQCCHDECAGGCSGPQDTDCFACRHFNDSGACVPRCPQPLVYNKLTFQLEPNPHTKYQYGGVCVASCPHNFVVDQTSCVRACPPDKMEVDKNGLKMCEPCGGLCPKACEGTGSGSRFQTVDSSNIDGFVNCTKILGNLDFLITGLNGDPWHKIPALDPEKLNVFRTVREITGYLNIQSWPPHMHNFSVFSNLTTIGGRSLYNRGFSLLIMKNLNVTSLGFRSLKEISAGRIYISANRQLCYHHSLNWTKVLRGPTEERLDIKHNRPRRDCVAEGKVCDPLCSSGGCWGPGPGQCLSCRNYSRGGVCVTHCNFLNGEPREFAHEAECFSCHPECQPMEGTATCNGSGSDTCAQCAHFRDGPHCVSSCPHGVLGAKGPIYKYPDVQNECRPCHENCTQGCKGPELQDCLGQTLVLIGKTHLTMALTVIAGLVVIFMMLGGTFLYWRGRRIQNKRAMRRYLERGESIEPLDPSEKANKVLARIFKETELRKLKVLGSGVFGTVHKGVWIPEGESIKIPVCIKVIEDKSGRQSFQAVTDHMLAIGSLDHAHIVRLLGLCPGSSLQLVTQYLPLGSLLDHVRQHRGALGPQLLLNWGVQIAKGMYYLEEHGMVHRNLAARNVLLKSPSQVQVADFGVADLLPPDDKQLLYSEAKTPIKWMALESIHFGKYTHQSDVWSYGQCIWMPSLPSLAPVSNLPFETPS

SEQ ID NO: 4879 - protein, 331 aa, Homo sapiens
MRANDALQVLGLLFSLARGSEVGNSQAVCPGTLNGLSVTGDAENQYQTLYKLYERCEVVMGNLEIVLTGHNADLSFLQWIREVTGYVLVAMNEFSTLPLPNLRVVRGTQVYDGKFAIFVMLNYNTNSSHALRQLRLTQLTEILSGGVYIEKNDKLCHMDTIDWRDIVRDRDAEIVVKDNGRSCPPCHEVCKGRCWGPGSEDCQTLTKTICAPQCNGHCFGPNPNQCCHDECAGGCSGPQDTDCFACRHFNDSGACVPRCPQPLVYNKLTFQLEPNPHTKYQYGGVCVASCPHNFVVDQTSCVRACPPDKMEVDKNGLKMCEPCGGLCPKAF

SEQ ID NO: 4880 - protein, 183 aa, Homo sapiens
MRANDALQVLGLLFSLARGSEVGNSQAVCPGTLNGLSVTGDAENQYQTLYKLYERCEVVMGNLEIVLTGHNADLSFLQWIREVTGYVLVAMNEFSTLPLPNLRVVRGTQVYDGKFAIFVMLNYNTNSSHALRQLRLTQLTGQFPMVPSGLTPQPAQDWYLLDDDPRLLTLSASSKVPVTLAAV

SEQ ID NO: 4881 - protein, 43 aa, Homo sapiens
MRANDALQVPRAQSTSTQMFRMNVGPAMRTAPRGVKDQSFKTV

SEQ ID NO: 4882 - protein, 354 aa, Homo sapiens
MAPARRPAGARLLLVYAGLLAAAAAGLGSPEPGAPSRSRARREPPPGNELPRGPGESRAGPAARPPEPTAERAHSVDPRDAWMLFVRQSDKGVNGKKRSRGKAKKLKFGLPGPPGPPGPQGPPGPIIPPEALLKEFQLLLKGAVRQRERAEPEPCTCGPAGPVAASLAPVSATAGEDDDDVVGDVLALLAAPLAPGPRAPRVEAAFLCRLRRDALVERRALHELGVYYLPDAEGAFRRGPGLNLTSGQYRAPVAGFYALAATLHVALGEPPRRGPPRPRDHLRLLICIQSRCQRNASLEAIMGLESSSELFTISVNGVLYLQMGQWTSVFLDNASGCSLTVRSGSHFSAVLLGV

SEQ ID NO: 4883 - protein, 63 aa, Homo sapiens
  SITE 1: note = misc_feature - Xaa can be any naturally occurring amino acid
XFGYSSLEAIMGLESSSELFTISVNGVLYLQMGQWTSVFLDNASGCSLTVRSGSHFSAVLLGV

SEQ ID NO: 4884 - protein, 74 aa, Homo sapiens
  SITE 1: note = misc_feature - Xaa can be any naturally occurring amino acid
XIQSRCQRNASLEAIMGLESSSELFTISVNGVLYLQATKNLVPQDLLGAKLVWQGRSGLGEKGAMASHLHLLTN

SEQ ID NO: 4885 - protein, 275 aa, Homo sapiens
MNMTQARVLVAAVVGLVAVLLYASIHKIEEGHLAVYYRGGALLTSPSGPGYHIMLPFITTFRSVQTTLQTDEVKNVPCGTSGGVMIYIDRIEVVNMLAPYAVFDIVRNYTADYDKTLIFNKIHHELNQFCSAHTLQEVYIELFDQIDENLKQALQKDLNLMAPGLTIQAVRVTKPKIPEAIRRNFELMEAEKTKLLIAAQKQKVVEKEAETERKKAVIEAEKIAQVAKIRFQQKVMEKETEKRISEIEDAAFLAREKAKADAEYYAAHKYATSNK

SEQ ID NO: 4886 - protein, 348 aa, Homo sapiens
MNMTQARVLVAAVVGLVAVLLYASIHKIEEGHLAVYYRGGALLTSPSGPGYHIMLPFITTFRSVQTTLQTDEVKNVPCGTSGGVMIYIDRIEVVNMLAPYAVFDIVRNYTADYDKTLIFNKIHHELNQFCSAHTLQEVYIELFDQIDENLKQALQKDLNLMAPGLTIQAVRVTKPKIPEAIRRNFELMEAEKTKLLIAAQKQKVVEKEAETERKKAVIEAEKIAQVAKIRFQQKVMEKETEKRISEIEDAAFLAREKAKADAEYYAAHKYATSNKHKLTPEYLELKKYQAIASNSKIYFGSNIPNMFVDSSCALKYSDIRTGRESSLPSKEALEPSGENVIQNKESTG

SEQ ID NO: 4887 - protein, 348 aa, Homo sapiens; identical to SEQ ID NO: 4886

SEQ ID NO: 4888 - protein, 339 aa, Homo sapiens
MAQLGAVVAVASSFFCASLFSAVHKIEEGHIGVYYRGGALLTSTSGPGFHLMLPFITSYKSVQTTLQTDEVKNVPCGTSGGVMIYFDRIEVVNFLVPNAVYDIVKNYTADYDKALIFNKIHHELNQFCSVHTLQEVYIELFDQIDENLKLALQQDLTSMAPGLVIQAVRVTKPNIPEAIRRNYELMESEKTKLLIAAQKQKVVEKEAETERKKALIEAEKVAQVAEITYGQKVMEKETEKKISEIEDAAFLAREKAKADAECYTAMKIAEANKLKLTPEYLQLMKYKAIASNSKIYFGKDIPNMFMDSAGSVSKQFEGLADKLSFGLEDEPLETATKEN

SEQ ID NO: 4889 - protein, 339 aa, Homo sapiens; identical to SEQ ID NO: 4888

SEQ ID NO: 4890 - protein, 338 aa, Homo sapiens
MAQLGAVVAVASSFFCASLFSAVHKIEEGHIGVYYRGGALLTSTSGPGFHLMLPFITSYKSVQTTLQTDEVKNVPCGTSGGVMIYFDRIEVVNFLVPNAVYDIVKNYTADYDKALIFNKIHHELNQFCSVHTLQEVYIELFDQIDENLKLALQQDLTSMAPGLVIQAVRVTKPNIPEAIRRNYELMESEKTKLLIAAQKQKVVEKEAETERKKALIEAEKVAQVAEITYGQKVMEKETEKKISEIEDAAFLAREKAKADAECYTAMKIAEANKLKLTPEYLQLMKYKAIASNSKIYFGKDIPNMFMDSAGSVSKQFEGLADKLSFGLEDEPLETATKE

SEQ ID NO: 4891 - protein, 206 aa, Homo sapiens
MAQLGAVVAVASSFFCASLFSAVHKIEEGHIGVYYRGGALLTSTSGPGFHLMLPFITSYKSVQTTLQTDEVKNVPCGTSGGVMIYFDRIEVVNFLVPNAVYDIVKNYTADYDKALIFNKIHHELNQFCSVHTLQEVYIELFGKKVSPEHAVLKQGSWNPASLHCLKPGCLQGVMVTYGQEMLKNLVLRSWSQRSSWRMLIAMQQDP

SEQ ID NO: 4892 - protein, 206 aa, Homo sapiens; identical to SEQ ID NO: 4891

SEQ ID NO: 4893 - protein, 206 aa, Homo sapiens; identical to SEQ ID NO: 4891

SEQ ID NO: 4894 - protein, 152 aa, Homo sapiens
MAQLGAVVAVASSFFCASLFSAVHKIEEGHIGVYYRGGALLTSTSGPGFHLMLPFITSYKSVQTTLQTDEVKNVPCGTSGGVMIYFDRIEVVNFLVPNAVYDIVKNYTADYDKALIFNKIHHELNQFCSVHTLQEVYIELFGLENDFSQESS

SEQ ID NO: 4895 - protein, 152 aa, Homo sapiens; identical to SEQ ID NO: 4894

SEQ ID NO: 4896 - protein, 197 aa, Homo sapiens
MAQLGAVVAVASSFFCASLFSAVHKIEEGHIGVYYSGGVMIYFDRIEVVNFLVPNAVYDIVKNYTADYDKALIFNKIHHELNQFCSVHTLQEVYIELFDQIDENLKLALQQDLTSMAPGLVIQAVRVTKPNIPEAIRRNYELMESEKTKLLIAAQKQKVVEKEAETERKKALIEAEKVAQVAEITYGQKVMEKETEK

SEQ ID NO: 4897 - protein, 977 aa, Homo sapiens
MPARRLLLLLTLLLPGLGIFGSTSTVTLPETLLFVSTLDGSLHAVSKRTGSIKWTLKEDPVLQVPTHVEEPAFLPDPNDGSLYTLGSKNNEGLTKLPFTIPELVQASPCRSSDGILYMGKKQDIWYVIDLLTGEKQQTLSSAFADSLCPSTSLLYLGRTEYTITMYDTKTRELRWNATYFDYAASLPEDDVDYKMSHFVSNGDGLVVTVDSESGDVLWIQNYASPVVAFYVWQREGLRKVMHINVAVETLRYLTFMSGEVGRITKWKYPFPKETEAKSKLTPTLYVGKYSTSLYASPSMVHEGVAVVPRGSTLPLLEGPQTDGVTIGDKGECVITPSTDVKFDPGLKSKNKLNYLRNYWLLIGHHETPLSASTKMLERFPNNLPKHRENVIPADSEKKSFEEVINLVDQTSENAPTTVSRDVEEKPAHAPARPEAPVDSMLKDMATIILSTFLLIGWVAFIITYPLSMHQQQQLQHQQFQKELEKIQLLQQQQQQLPFHPPGDTAQDGELLDTSGPYSESSGTSSPSTSPRASNHSLCSGSSASKAGSSPSLEQDDGDEETSVVIVGKISFCPKDVLGHGAEGTIVYRGMFDNRDVAVKRILPECFSFADREVQLLRESDEHPNVIRYFCTEKDRQFQYIAIELCAATLQEYVEQKDFAHLGLEPITLLQQTTSGLAHLHSLNIVHRDLKPHNILISMPNAHGKIKAMISDFGLCKKLAVGRHSFSRRSGVPGTEGWIAPEMLSEDCKENPTYTVDIFSAGCVFYYVISEGSHPFGKSLQRQANILLGACSLDCLHPEKHEDVIARELIEKMIAMDPQKRPSAKHVLKHPFFWSLEKQLQFFQDVSDRIEKESLDGPIVKQLERGGRAVVKMDWRENITVPLQTDLRKFRTYKGGSVRDLLRAMRNKKHHYRELPAEVRETLGSLPDDFVCYFTSRFPHLLAHTYRAMELCSHERLFQPYYFHEPPEPQPPVTPDAL

SEQ ID NO: 4898 - protein, 70 aa, Homo sapiens
MPARRLLLLLTLLLPGLGVSDRGAWGGGQLATAGSGPGQRRGAGAGVRAGSATAAARCPVSPAVGGSGRA

SEQ ID NO: 4899 - protein, 23 aa, Homo sapiens
ELLQLLPPDSPTRWLPGTWLEPC

SEQ ID NO: 4900 - protein, 80 aa, Homo sapiens
MASAVRGSRPWPRLGLQLQFAALLLGTLSPQGCGWATRMLGLLLGAQPHPVCSRRDWSRFILSGQRTSCWCPPWMEVSTH

SEQ ID NO: 4901 - protein, 129 aa, Homo sapiens
MASAVRGSRPWPRLGLQLQFAALLLGTLSPQVHTLRPENLLLVSTLDGSLHALSKQTGDLKWTLRDDPVIEGPMYVTEMAFLSDPADGSLYILGTQKQQGLMAGVQWYDHKAHCSLELLASSNPRTSVS

SEQ ID NO: 4902 - protein, 926 aa, Homo sapiens
MASAVRGSRPWPRLGLQLQFAALLLGTLSPQVHTLRPENLLLVSTLDGSLHALSKQTGDLKWTLRDDPVIEGPMYVTEMAFLSDPADGSLYILGTQKQQGLMKLPFTIPELVHASPCRSSDGVFYTGRKQDAWFVVDPESGETQMTLTTEGPSTPRLYIGRTQYTVTMHDPRAPALRWNTTYRRYSAPPMDGSPGKYMSHLASCGMGLLLTVDPGSGTVLWTQDLGVPVMGVYTWHQDGLRQLPHLTLARDTLHFLALRWGHIRLPASGPRDTATLFSTLDTQLLMTLYVGKDETGFYVSKALVHTGVALVPRGLTLAPADGPTTDEVTLQVSGEREGSPSTAVRYPSGSVALPSQWLLIGHHELPPVLHTTMLRVHPTLGSGTAETRPPENTQAPAFFLELLSLSREKLWDSELHPEEKTPDSYLGLGPQDLLAASLTAVLLGGWILFVMRQQQPQVVEKQQETPLAPADFAHISQDAQSLHSGASRRSQKRLQSPSKQAQPLDDPEAEQLTVVGKISFNPKDVLGRGAGGTFVFRGQFEGRAVAVKRLLRECFGLVRREVQLLQESDRHPNVLRYFCTERGPQFHYIALELCRASLQEYVENPDLDRGGLEPEVVLQQLMSGLAHLHSLHIVHRDLKPGNILITGPDSQGLGRVVLSDFGLCKKLPAGRCSFSLHSGIPGTEGWMAPELLQLLPPDSPTSAVDIFSAGCVFYYVLSGGSHPFGDSLYRQANILTGAPCLAHLEEEVHDKVVARDLVGAMLSPLPQPRPSAPQVLAHPFFWSRAKQLQFFQDVSDWLEKESEQEPLVRALEAGGCAVVRDNWHEHISMPLQTDLRKFRSYKGTSVRDLLRAVRNKKHHYRELPVEVRQALGQVPDGFVQYFTNRFPRLLLHTHRAMRSCASESLFLPYYPPDSEARRPCPGATGR

SEQ ID NO: 4903 - protein, 874 aa, Homo sapiens
MASAVRGSRPWPRLGLQLQFAALLLGTLSPQVHTLRPENLLLVSTLDGSLHALSKQTGDLKWTLRDDPVIEGPMYVTEMAFLSDPADGSLYILGTQKQQGLMKLPFTIPELVHASPCRSSDGVFYTGRKQDAWFVVDPESGETQMTLTTEGPSTPRLYIGRTQYTVTMHDPRAPALRWNTTYRRYSAPPMDGSPGKYMSHLASCGMGLLLTVDPGSGTVLWTQDLGVPVMGVYTWHQDGLRQLPHLTLARDTLHFLALRWGHIRLPASGPRDTATLFSTLDTQLLMTLYVGKDETGFYVSKALVHTGVALVPRGLTLAPADGPTTDEVTLQVSGEREGSPSTAVRYPSGSVALPSQWLLIGHHELPPVLHTTMLRVHPTLGSGTAETRPPENTQAPAFFLEQQPQVVEKQQETPLAPADFAHISQDAQSLHSGASRRSQKRLQSPSKQAQPLDDPEAEQLTVVGKISFNPKDVLGRGAGGTFVFRGQFEGRAVAVKRLLRECFGLVRREVQLLQESDRHPNVLRYFCTERGPQFHYIALELCRASLQEYVENPDLDRGGLEPEVVLQQLMSGLAHLHSLHIVHRDLKPGNILITGPDSQGLGRVVLSDFGLCKKLPAGRCSFSLHSGIPGTEGWMAPELLQLLPPDSPTSAVDIFSAGCVFYYVLSGGSHPFGDSLYRQANILTGAPCLAHLEEEVHDKVVARDLVGAMLSPLPQPRPSAPQVLAHPFFWSRAKQLQFFQDVSDWLEKESEQEPLVRALEAGGCAVVRDNWHEHISMPLQTDLRKFRSYKGTSVRDLLRAVRNKKHHYRELPVEVRQALGQVPDGFVQYFTNRFPRLLLHTHRAMRSCASESLFLPYYPPDSEARRPCPGATGR

SEQ ID NO: 4904 - protein, 169 aa, Homo sapiens
MGRGWGFLFGLLGAVWLLSSGHGEEQPPETAAQRCFCQVNLKRPCPFWNDISQCGRRDCAVKPCQSDEVPDGIKSASYKYSEEANNLIEECEQAERLGAVDESLSEETQKAVLQWTKHDDSSDNFCEADDIQSPEAEYVDLLLNPERYTGYKGPDAWKIWNVIYEENCF

SEQ ID NO: 4905 - protein, 125 aa, Homo sapiens
MGRGWGFLFGLLGAVWLLSSGHGEEQPPETAAQRCFCQVSGYLDDCTCDVETIDRFNNYRLFPRLQKLLESDYFRYYKVNLKRPCPFWNDISQCGRRDCAVKPCQSDEVPDGIKSASYKVCTYTY

SEQ ID NO: 4906 - protein, 257 aa, Homo sapiens
MGRGWGFLFGLLGAVWLLSSGHGEEQPPETAAQRCFCQVSGYLDDCTCDVETIDRFNNYRLFPRLQKLLESDYFRYYKVNLKRPCPFWNDISQCGRRDCAVKPCQSDEVPDGIKSASYKYSEEANNLIEECEQAERLGAVDESLSEETQKAVLQWTKHDDSSDNFCEADDIQSPEAEYVDLLLNPERYTGYKGPDAWKIWNVIYEENCFKPQTIKRPLNPLASGQGKLLICVSLLFLRSLCRKKSILQTYIWPTCKH

SEQ ID NO: 4907 - protein, 257 aa, Homo sapiens; identical to SEQ ID NO: 4906

SEQ ID NO: 4908 - protein, 257 aa, Homo sapiens; identical to SEQ ID NO: 4906

SEQ ID NO: 4909 - protein, 468 aa, Homo sapiens
MGRGWGFLFGLLGAVWLLSSGHGEEQPPETAAQRCFCQVSGYLDDCTCDVETIDRFNNYRLFPRLQKLLESDYFRYYKVNLKRPCPFWNDISQCGRRDCAVKPCQSDEVPDGIKSASYKYSEEANNLIEECEQAERLGAVDESLSEETQKAVLQWTKHDDSSDNFCEADDIQSPEAEYVDLLLNPERYTGYKGPDAWKIWNVIYEENCFKPQTIKRPLNPLASGQGTSEENTFYSWLEGLCVEKRAFYRLISGLHASINVHLSARYLLQETWLEKKWGHNITEFQQRFDGILTEGEGPRRLKNLYFLYLIELRALSKVLPFFERPDFQLFTGNKIQDEENKMLLLEILHEIKSFPLHFDENSFFAGDKKEAHKLKEDFRLHFRNISRIMDCVGCFKCRLWGKLQTQGLGTALKILFSEKLIANMPESGPSYEFHLTRQEIVSLFNAFGRISTSVKELENFRNLLQNIH

SEQ ID NO: 4910 - protein, 75 aa, Homo sapiens
MLLLEILHEIKSFPLHFDENSFFAGDKKEAHKLKEDFRLHFRNISRIMDCVGCFKCRLWGKLQTQGLGTALKILF

SEQ ID NO: 4911 - protein, 71 aa, Homo sapiens
MANNTKELEDCEQANKLGAINSTLSNQSKEAFIDWARYDDSRDHFCELDDERSPAAQYVDLLLNPERYTGY

SEQ ID NO: 4912 - protein, 467 aa, Homo sapiens
MSQGVRRAGAGQGVAAAVQLLVTLSFLRSVVEAQVTGVLDDCLCDIDSIDNFNTYKIFPKIKKLQERDYFRYYKVNLKRPCPFWAEDGHCSIKDCHVEPCPESKIPVGIKAGHSNKYLKMANNTKELEDCEQANKLGAINSTLSNQSKEAFIDWARYDDSRDHFCELDDERSPAAQYVDLLLNPERYTGYKGTSAWRVWNSIYEENCFKPRSVYRPLNPLAPSRGEDDGESFYTWLEGLCLEKRVFYKLISGLHASINLHLCANYLLEETWGKPSWGPNIKEFKHRFDPVETKGEGPRRLKNLYFLYLIELRALSKVAPYFERSIVDLYTGNAEEDADTKTLLLNIFQDTKSFPMHFDEKSMFAGDKKGAKSLKEEFRLHFKNISRIMDCVGCDKCRLWGKLQTQGLGTALKILFSEKEIQKLPENSPSKGFQLTRQEIVALLNAFGRLSTSIRDLQNFKVLLQHSR

SEQ ID NO: 4913 - protein, 173 aa, Homo sapiens
WGPNIKEFKHRFDPVETKGEGPRRLKNLYFLYLIELRALSKVAPYFERSIVDLYTGNAEEDADTKTLLLNIFQDTKSFPMHFDEKSMFAGDKKGAKSLKEEFRLHFKNISRIMDCVGCDKCRLWGKLQTQGLGTALKILFSEKEIQKLPENSPSKGFQLTRQEIVALLNAFGR

SEQ ID NO: 4914 - protein, 273 aa, Homo sapiens
MEAAPSRFMFLLFLLTCELAAEVAAEVEKSSDGPGAAQEPTWLTDVPAAMEFIAATEVAVIGFFQDLEIPAVPILHSMVQKFPGVSFGISTDSEVLTHYNITGNTICLFRLVDNEQLNLEDEDIESIDATKLSRFIEINSLHMVTEYNPVTVIGLFNSVIQIHLLLIMNKASPEYEENMHRYQKAAKLFQGKILFILVDSGMKENGKVISFFKLKESQLPALAIYQTLDDEWDTLPTAEVSVEHVQNFCDGFLSGKLLKENRESEGKTPKVEL

SEQ ID NO: 4915 - protein, 172 aa, Homo sapiens
MKETCQLEIQVDNEQLNLEDEDIESIDATKLSRFIEINSLHMVTEYNPVTVIGLFNSVIQIHLLLIMNKASPEYEENMHRYQKAAKLFQGKILFILVDSGMKENGKVISFFKLKESQLPALAIYQTLDDEWDTLPTAEVSVEHVQNFCDGFLSGKLLKENRESEGKTPKVEL

SEQ ID NO: 4916 - protein, 53 aa, Homo sapiens
MAAAVPRAAFLSPLLPLLLGFLLLSAPHGGSGLHTKGALPLDTVTFYKIMVTS

SEQ ID NO: 4917 - protein, 261 aa, Homo sapiens
MAAAVPRAAFLSPLLPLLLGFLLLSAPHGGSGLHTKGALPLDTVTFYKVIPKSKFVLVKFDTQYPYGEKQDEFKRLAENSASSDDLLVAEVGISDYGDKLNMELSEKYKLDKESYPVFYLFRDGDFENPVPYTGAVKVGAIQRWLKGQGVYLGMPGCLPVYDALAGEFIRASGVEARQALLKQGQDNLSSVKETQKKWAEQYLKIMGKILDQGEDFPASEMTRIARLIEKNKMSDGKKEELQKSLNILTAFQKKGAEKEEL

SEQ ID NO: 4918 - protein, 160 aa, Homo sapiens
MELSEKYKLDKESYPVFYLFRDGDFENPVPYTGAVKVGAIQRWLKGQGVYLGMPGCLPVYDALAGEFIRASGVEARQALLKQGQDNLSSVKETQKKWAEQYLKIMGKILDQGEDFPASEMTRIARLIEKNKMSDGKKEELQKSLNILTAFQKKGAEKEEL

SEQ ID NO: 4919 - protein, 95 aa, Homo sapiens
  SITE 1: note = misc_feature - Xaa can be any naturally occurring amino acid
XPAPHFSPRCFPFSWASCSSPLRMAAAACTPRAPFPWIRSLSTRGPLGRGISPKSPWNTHLLSSIRPQVIPKSKFVLVKFDTQYPYGEKQDEFKR

SEQ ID NO: 4920 - protein, 406 aa, Homo sapiens
MHPAVFLSLPDLRCSLLLLVTWVFTPVTTEITSLDTENIDEILNNADVALVNFYADWCRFSQMLHPIFEEASDVIKEEFPNENQVVFARVDCDQHSDIAQRYRISKYPTLKLFRNGMMMKREYRGQRSVKALADYIRQQKSDPIQEIRDLAEITTLDRSKRNIIGYFEQKDSDNYRVFERVANILHDDCAFLSAFGDVSKPERYSGDNIIYKPPGHSAPDMVYLGAMTNFDVTYNWIQDKCVPLVREITFENGEELTEEGLPFLILFHMKEDTESLEIFQNEVARQLISEKGTINFLHADCDKFRHPLLHIQKTPADCPVIAIDSFRHMYVFGDFKDVLIPGKLKQFVFDLHSGKLHREFHHGPDPTDTAPGEQAQDVASSPPESSFQKLAPSEYRYTLLRDRDEL

SEQ ID NO: 4921 - protein, 604 aa, Homo sapiens
MLGMNMLLITLFLLLPLSMLKGEPWEGCLHCTHTTWSGNIMTKTLLYHTYYECAGTCLGTCTHNQTTYSVCDPGRGQPYVCYDPKSSPGTWFEIHVGSKEGDLLNQTKVFPSGKDVVSLYFDVCQIVSMGSLFPVIFSSMEYYSSCHKNRYAHPACSTDSPVTTCWDCTTWSTNQQSLGPIMLTKIPLEPDCKTSTCNSVNLTILEPDQPIWTTGLKAPLGARVSGEEIGPGAYVYLYIIKKTRTRSTQQFRVFESFYEHVNQKLPEPPPLASNLFAQLAENIASSLHVASCYVCGGMNMGDQWPWEARELMPQDNFTLTASSLEPAPSSQSIWFLKTSIIGKFCIARWGKAFTDPVGELTCLGQQYYNETLGKTLWRGKSNNSESPHPSPFSRFPSLNHSWYQLEAPNTWQAPSGLYWICGPQAYRQLPAKWSGACVLGTIRPSFFLMPLKQGEALGYPIYDETKRKSKRGITIGDWKDNEWPPERIIQYYGPATWAEDGMWGYRTPVYMLNRIIRLQAVLEIITNETAGALNLLAQQATKMRNVIYQNRLALDYLLAQEEGVCGKFNLTNCCLELDDEGKVIKEITAKIQKLAHIPVQTWKG

SEQ ID NO: 4922 - protein, 89 aa, Homo sapiens
MKSVLLLTTLLVPAHLVAAWSNNYAVDCPQHCDSSECKSSPRCKRTVLDDCGCCRVCAAGRGETCYRTVSGMDGMKCGPGLRCQPSNGE

SEQ ID NO: 4923 - protein, 184 aa, Homo sapiens
MKSVLLLTTLLVPAHLVAAWSNNYAVDCPQHCDSSECKSSPRCKRTVLDDCGCCRVCAAGRGETCYRTVSGMDGMKCGPGLRCQPSNGEDPFGEEFGICKDCPYGTFGMDCRETCNCQSGICDRGTGKCLKFPFFQYSVTKSSNRFVSLTEHDMASGDGNIVREEVVKENAAGSPVMRKWLNPR

SEQ ID NO: 4924 - protein, 134 aa, Homo sapiens
MKSVLLLTTLLVPAHLVAAWSNNYAVDCPQHCDSSECKSSPRCKRTVLDDCGCCRVCAAGRGETCYRTVSGMDGMKCGPGLRCQPSNGEDPFGEEFGICKEHDMASGDGNIVREEVVKENAAGSPVMRKWLNPR

SEQ ID NO: 4925 - protein, 522 aa, Homo sapiens
EFKKCCPGSPDIDKLDVATMTEYLNFEKSSSVSRYGASQVEDMGNIILAMISEPYNHRFSDPERVNYKFESGTCSKMELIDDNTVVRARGLPWQSSDQDIARFFKGLNIAKGGAALCLNAQGRRNGEALVRFVSEEHRDLALQRHKHHMGTRYIEVYKATGEDFLKIAGGTSNEVAQFLSKENQVIVRMRGLPFTATAEEVVAFFGQHCPITGGKEGILFVTYPDGRPTGDAFVLFACEEYAQNALRKHKDLLGKRYIELFRSTAAEVQQVLNRFSSAPLIPLPTPPIIPVLPQQFVPPTNVRDCIRLRGLPYAATIEDILDFLGEFATDIRTHGVHMVLNHQGRPSGDAFIQMKSADRAFMAAQKCHKKNMKDRYVEVFQCSAEEMNFVLMGGTLNRNGLSPPPCKLPCLSPPSYTFPAPAAVIPTEAAIYQPSVILNPRALQPSTAYYPAGTQLFMNYTAYYPSPPGSPNSLGYFPTAANLSGVPPQPGTVVRMQGLAYNTGVKEILNFFQGYQCLKDVW

SEQ ID NO: 4926 - protein, 677 aa, Homo sapiens
MTASPDYLVVLFGITAGATGAKLGSDEKELILLFWKVVDLANKKVGQLHEVLVRPDQLELTEDCKEETKIDVESLSSASQLDQALRQFNQSVSNELNIGVGTSFCLCTDGQLHVRQILHPEASKKNVLLPECFYSFFDLRKEFKKCCPGSPDIDKLDVATMTEYLNFEKSSSVSRYGASQVEDMGNIILAMISEPYNHRFSDPERVNYKFESGTCSKMELIDDNTVVRARGLPWQSSDQDIARFFKGLNIAKGGAALCLNAQGRRNGEALVRFVSEEHRDLALQRHKHHMGTRYIEVYKATGEDFLKIAGGTSNEVAQFLSKENQVIVRMRGLPFTATAEEVVAFFGQHCPITGGKEGILFVTYPDGRPTGDAFVLFACEEYAQNALRKHKDLLGKRYIELFRSTAAEVQQVLNRFSSAPLIPLPTPPIIPVLPQQFVPPTNVRDCIRLRGLPYAATIEDILDFLGEFATDIRTHGVHMVLNHQGRPSGDAFIQMKSADRAFMAAQKCHKKNMKDRYVEVFQCSAEEMNFVLMGGTLNRNGLSPPPCLSPPSYTFPAPAAVIPTEAAIYQPSVILNPRALQPSTAYYPAGTQLFMNYTAYYPSPPGSPNSLGYFPTAANLSGVPPQPGTVVRMQGLAYNTGVKEILNFFQGYQYATEDGLIHTNDQARTLPKEWVCI

SEQ ID NO: 4927 - protein, 681 aa, Homo sapiens
MTASPDYLVVLFGITAGATGAKLGSDEKELILLFWKVVDLANKKVGQLHEVLVRPDQLELTEDCKEETKIDVESLSSASQLDQALRQFNQSVSNELNIGVGTSFCLCTDGQLHVRQILHPEASKKNVLLPECFYSFFDLRKEFKKCCPGSPDIDKLDVATMTEYLNFEKSSSVSRYGASQVEDMGNIILAMISEPYNHRFSDPERVNYKFESGTCSKMELIDDNTVVRARGLPWQSSDQDIARFFKGLNIAKGGAALCLNAQGRRNGEALVRFVSEEHRDLALQRHKHHMGTRYIEVYKATGEDFLKIAGGTSNEVAQFLSKENQVIVRMRGLPFTATAEEVVAFFGQHCPITGGKEGILFVTYPDGRPTGDAFVLFACEEYAQNALRKHKDLLGKRYIELFRSTAAEVQQVLNRFSSAPLIPLPTPPIIPVLPQQFVPPTNVRDCIRLRGLPYAATIEDILDFLGEFATDIRTHGVHMVLNHQGRPSGDAFIQMKSADRAFMAAQKCHKKNMKDRYVEVFQCSAEEMNFVLMGGTLNRNGLSPPPCKLPCLSPPSYTFPAPAAVIPTEAAIYQPSVILNPRALQPSTAYYPAGTQLFMNYTAYYPSPPGSPNSLGYFPTAANLSGVPPQPGTVVRMQGLAYNTGVKEILNFFQGYQYATEDGLIHTNDQARTLPKEWVCI

SEQ ID NO: 4928 - protein, 659 aa, Homo sapiens
MTASPDYLVVLFGITAGATGAKLGSDEKELILLFWKVVDLANKKVGQLHEVLVRPDQLELTEDCKEETKIDVESLSSASQLDQALRQFNQSVSNELNIGVGTSFCLCTDGQLHVRQILHPEASKKNVLLPECFYSFFDLRKEFKKCCPGSPDIDKLDVATMTEYLNFEKSSSVSRYGASQVEDMGNIILAMISEPYNHRFSDPERVNYKFESGTCSKMELIDDNTVVRARGLPWQSSDQDIARFFKGLNIAKGGAALCLNAQGRRNGEALVRFVSEEHRDLALQRHKHHMGTRYIEVYKATGEDFLKIAGGTSNEVAQFLSKENQVIVRMRGLPFTATAEEVVAFFGQHCPITGGKEGILFVTYPDGRPTGDAFVLFACEEYAQNALRKHKDLLGKRYIELFRSTAAEVQQVLNRFSSAPLIPLPTPPIIPVLPQQFVPPTNVRDCIRLRGLPYAATIEDILDFLGEFATDIRTHGVHMVLNHQGRPSGDAFIQMKSADRAFMAAQKCHKKNMKDRYVEVFQCSAEEMNFVLMGGTLNRNGLSPPPCLSPPSYTFPAPAAVIPTEAAIYQPSVILNPRALQPSTAYYPAGTQLFMNYTAYYPSPPGSPNSLGYFPTAANLSGVPPQPGTVVRMQGLAYNTGVKEILNFFQGYQCLKDVW

SEQ ID NO: 4929 - protein, 604 aa, Homo sapiens
MTASPDYLVVLFGITAGATGAKLGSDEKELILLFWKVVDLANKKVGQLHEVLVRPDQLELTEDCKEETKIDVESLSSASQLDQALRQFNQSVSNELNIGVGTSFCLCTDGQLHVRQILHPEASKKNVLLPECFYSFFDLRKEFKKCCPGSPDIDKLDVATMTEYLNFEKSSSVSRYGASQVEDMGNIILAMISEPYNHRFSDPERVNYKFESGTCSKMELIDDNTVVRARGLPWQSSDQDIARFFKGLNIAKGGAALCLNAQGRRNGEALVRFVSEEHRDLALQRHKHHMGTRYIEVYKATGEDFLKIAGGTSNEVAQFLSKENQVIVRMRGLPFTATAEEVVAFFGQHCPITGGKEGILFVTYPDGRPTGDAFVLFACEEYAQNALRKHKDLLGKRYIELFRSTAAEVQQVLNRFSSAPLIPLPTPPIIPVLPQQFVPPTNVRDCIRLRGLPYAATIEDILDFLGEFATDIRTHGVHMVLNHQGRPSGDAFIQMKSADRAFMAAQKCHKKNMKDRYVEVFQCSAEEMNFVLMGGTLNRNGLSPPPCLSPPSYTFPAPAAVIPTEAAIYQPSVILNPRALQPSTAYYPAGTQLFMNYTAYYPSV

SEQ ID NO: 4930 - protein, 681 aa, Homo sapiens; identical to SEQ ID NO: 4927

SEQ ID NO: 4931 - protein, 608 aa, Homo sapiens
MTASPDYLVVLFGITAGATGAKLGSDEKELILLFWKVVDLANKKVGQLHEVLVRPDQLELTEDCKEETKIDVESLSSASQLDQALRQFNQSVSNELNIGVGTSFCLCTDGQLHVRQILHPEASKKNVLLPECFYSFFDLRKEFKKCCPGSPDIDKLDVATMTEYLNFEKSSSVSRYGASQVEDMGNIILAMISEPYNHRFSDPERVNYKFESGTCSKMELIDDNTVVRARGLPWQSSDQDIARFFKGLNIAKGGAALCLNAQGRRNGEALVRFVSEEHRDLALQRHKHHMGTRYIEVYKATGEDFLKIAGGTSNEVAQFLSKENQVIVRMRGLPFTATAEEVVAFFGQHCPITGGKEGILFVTYPDGRPTGDAFVLFACEEYAQNALRKHKDLLGKRYIELFRSTAAEVQQVLNRFSSAPLIPLPTPPIIPVLPQQFVPPTNVRDCIRLRGLPYAATIEDILDFLGEFATDIRTHGVHMVLNHQGRPSGDAFIQMKSADRAFMAAQKCHKKNMKDRYVEVFQCSAEEMNFVLMGGTLNRNGLSPPPCKLPCLSPPSYTFPAPAAVIPTEAAIYQPSVILNPRALQPSTAYYPAGTQLFMNYTAYYPSV

SEQ ID NO: 4932 - protein, 502 aa, Homo sapiens
  SITE 1: note = misc_feature - Xaa can be any naturally occurring amino acid
XFFDLRKEFKKCCPGSPDIDKLDVATMTEYLNFEKSSSVSRYGASQVEDMGNIILAMISEPYNHRFSDPERVNYKFESGTCSKMELIDDNTVVRARGLPWQSSDQDIARFFKGLNIAKGGAALCLNAQGRRNGEALVRFVSEEHRDLALQRHKHHMGTRYIEVYKATGEDFLKIAGGTSNEVAQFLSKENQVIVRMRGLPFTATAEEVVAFFGQHCPITGGKEGILFVTYPDGRPTGDAFVLFACEEYAQNALRKHKDLLGKRYIELFRSTAAEVQQVLNRFSSAPLIPLPTPPIIPVLPQQFVPPTNVRDCIRLRGLPYAATIEDILDFLGEFATDIRTHGVHMVLNHQGRPSGDAFIQMKSADRAFMAAQKCHKKNMKDRYVEVFQCSAEEMNFVLMGGTLNRNGLSPPPCKLPCLSPPSYTFPAPAAVIPTEAAIYQPSVILNPRALQPSTAYYPAGTQLFMNYTAYYPSMQPRMDLYTQMTRPGLYPKNGFVFKGPSS

SEQ ID NO: 4933 - protein, 40 aa, Homo sapiens
  SITE 1: note = misc_feature - Xaa can be any naturally occurring amino acid
XLLPECFYSFFDLRKEFKKCCPGSPDIDKLDVATMTECIL

SEQ ID NO: 4934 - protein, 56 aa, Homo sapiens
MAIKSIASRLRGSRRFLSGFVAGAVVGAAGAGLAALQFFRSQGAEGALTGKQPDDC

SEQ ID NO: 4935 - protein, 56 aa, Homo sapiens; identical to SEQ ID NO: 4934

SEQ ID NO: 4936 - protein, 56 aa, Homo sapiens; identical to SEQ ID NO: 4934

SEQ ID NO: 4937 - protein, 56 aa, Homo sapiens; identical to SEQ ID NO: 4934

SEQ ID NO: 4938 - protein, 56 aa, Homo sapiens; identical to SEQ ID NO: 4934

SEQ ID NO: 4939 - protein, 318 aa, Homo sapiens
MAIKSIASRLRGSRRFLSGFVAGAVVGAAGAGLAALQFFRSQGAEGALTGKQPDGDADRKHCKFKPDPNIPPTFSAFNEDYVGSGWSRGHMAPAGNNKFSSKAMAETFYLSNIVPQDFDNNSGYWNRIEMYCRELTERFEDVWVVSGPLTLPQTRGDGKKIVSYQVIGEDNVAVPSHLYKVILARRSSVSTEPLALGAFVVPNEAIGFQPQLTEFQVSLQDLEKLSGLVFFPHLDRTSDIRNICSVDTCKLLDFQEFTLYLSTRKIEGARSVLRLEKIMENLKNAEIEPDDYFMSRYEKKLEELKAKEQSGTQIRKPS

SEQ ID NO: 4940 - protein, 368 aa, Homo sapiens
MAIKSIASRLRGSRRFLSGFVAGAVVGAAGAGLAALQFFRSQGAEGALTGKQPDGSAEKAVLEQFGFPLTGTEARCYTNHALSYDQAKRVPRWVLEHISKSKIMGDADRKHCKFKPDPNIPPTFSAFNEDYVGSGWSRGHMAPAGNNKFSSKAMAETFYLSNIVPQDFDNNSGYWNRIEMYCRELTERFEDVWVVSGPLTLPQTRGDGKKIVSYQVIGEDNVAVPSHLYKVILARRSSVSTEPLALGAFVVPNEAIGFQPQLTEFQVSLQDLEKLSGLVFFPHLDRTSDIRNICSVDTCKLLDFQEFTLYLSTRKIEGARSVLRLEKIMENLKNAEIEPDDYFMSRYEKKLEELKAKEQSGTQIRKPS

SEQ ID NO: 4941 - protein, 143 aa, Homo sapiens
MAIKSIASRLRGSRRFLSGFVAGAVVGAAGAGLAALQFFRSQGAEGALTGKQPDGSAEKAVLEQFGFPLTGTEARCYTNHALSYDQAKRVPRWVLEHISKSKIMGRFFKFTLLASLFLLSLNLHLWLVLNFWVQVTLLPQPPE

SEQ ID NO: 4942 - protein, 107 aa, Homo sapiens
MAIKSIASRLRGSRRFLSGFVAGAVVGAAGAGLAALQFFRSQGAEGALTGKQPDGSAEKAVLEQFGFPLTGTEARCYTNHALSYDQAKRVPRWVLEHISKSKIMGWS

SEQ ID NO: 4943 - protein, 81 aa, Homo sapiens
MAIKSIASRLRGSRRFLSGFVAGAVVGAAGAGLAALQFFRSQGAEGALTGKQPDGSAEKAVLEQFGFPLTGTEVDSSSLHS

SEQ ID NO: 4944 - protein, 146 aa, Homo sapiens
MAIKSIASRLRGSRRFLSGFVAGAVVGAAGAGLAALQFFRSQGAEGALTGKQPDGSAEKAVLEQFGFPLTGTEVMQTESIVNLSLIPISLQPSVPSMKIMLEVGGHEDTWLQQEITNFQVKPWLKPFTFLTLCLRILIIILDIGTE

SEQ ID NO: 4945 - protein, 107 aa, Homo sapiens
RSQGAEGALTGKQPDGSAEKAVLEQFGFPLTGTEVMQTESIVNLSLIPISLQPSVPSMKIMLEVGGHEDTWLQQEITNFQVKPWLKPFTFLTLCLRILIIILDIGTE

SEQ ID NO: 4946 - protein, 187 aa, Homo sapiens
  SITE 1: note = misc_feature - Xaa can be any naturally occurring amino acid
XFRSQGAEGALTGKQPDGSAEKAVLEQFGFPLTGTEARCYTNHALSYDQAKRVPRWVLEHISKSKIMGDADRKHCKFKPDPNIPPTFSAFNEDYVGSGWSRGHMAPAGNNKFSSKAMAETFYLSNIVPQDFDNNSGYWNRIEMYCRELTERFEDVWVVSGPLTLPQTRGDGKKIVSYQSWEYPSLQF

SEQ ID NO: 4947 - protein, 15 aa, Homo sapiens
  SITE 1: note = misc_feature - Xaa can be any naturally occurring amino acid
XGAEGALTGKQPDDC

SEQ ID NO: 4948 - protein, 676 aa, Homo sapiens
MQSWRRRKSLWLALSASWLLLVLLGGFSLLRLALPPRPRPGASQGWPRWLDAELLQSFSQPGELPEDAVSPPQAPHGGSCNWESCFDTSKCRGDGLKVFVYPAVGTISETHRRILASIEGSRFYTFSPAGACLLLLLSLDAQTGECSSMPLQWNRGRNHLVLRLHPAPCPRTFQLGQAMVAEASPTVDSFRPGFDVALPFLPEAHPLRGGAPGQLRQHSPQPGVALLALEEERGGWRTADTGSSACPWDGRCEQDPGPGQTQRQETLPNATFCLISGHRPEAASRFLQALQAGCIPVLLSPRWELPFSEVIDWTKAAIVADERLPLQVLAALQEMSPARVLALRQQTQFLWDAYFSSVEKVIHTTLEVIQDRIFGTSAHPSLLWNSPPGALLALSTFSTSPQDFPFYYLQQGSRPEGRFSALIWVGPPGQPPLKLIQAVAGSQHCAQILVLWSNERPLPSRWPETAVPLTVIDGHRKVSDRFYPYSTIRTDAILSLDARSSLSTSEVDFAFLVWQSFPERMVGFLTSSHFWDEAHGGWGYTAERTNEFSMVLTTAAFYHRYYHTLFTHSLPKALRTLADEAPTCVDVLMNFIVAAVTKLPPIKVPYGKQRQEAAPLAPGGPGPRPKPPAPAPDCINQIAAAFGHMPLLSSRLRLDPVLFKDPVSVQRKKYRSLEKP

SEQ ID NO: 4949 - protein, 117 aa, Homo sapiens
MGIRVLRLSLVVILVLLLVAGALTALLPSVKEDKMLMLRREIKSQGKSTMDSFTLIMQTYNRTDLLLKLLNHYQAVPNLHKVIVVWNNIGEKAPDELWNSLGPHPIPVIFKQQTANR

SEQ ID NO: 4950 - protein, 147 aa, Homo sapiens
MRCCHICKLPGRVMGIRVLRLSLVVILVLLLVAGALTALLPSVKEDKMLMLRREIKSQGKSTMDSFTLIMQTYNRTDLLLKLLNHYQAVPNLHKVIVVWNNIGEKAPDELWNSLGPHPIPVIFKQQTANRMRNRLQVFPELETNAIS

SEQ ID NO: 4951 - protein, 330 aa, Homo sapiens
MRCCHICKLPGRVMGIRVLRLSLVVILVLLLVAGALTALLPSVKEDKMLMLRREIKSQGKSTMDSFTLIMQTYNRTDLLLKLLNHYQAVPNLHKVIVVWNNIGEKAPDELWNSLGPHPIPVIFKQQTANRMRNRLQVFPELETNAVLMVDDDTLISTPDLVFAFSVWQQFPDQIVGFVPRKHVSTSSGIYSYGSFEMQAPGSGNGDQYSMVLIGASFFNSKYLELFQRQPAAVHALIDDTQNCDDIAMNFIIAKHIGKTSGIFVKPVNMDNLEKETNSGYSGMWHRAEHALQRSYCINKLVNIYDSMPLRYSNIMISQFGFPYANYKRKI

SEQ ID NO: 4952 - protein, 330 aa, Homo sapiens; identical to SEQ ID NO: 4951

SEQ ID NO: 4953 - protein, 266 aa, Homo sapiens
MRTWNSGGTKCCHICKLPGRVMGIRVLRLSLVVILVLLLVAGALTALLPSVKEDKMLMLRREIKSQGKSTMDSFTLIMQTYNRTDLLLKLLNHYQAVPNLHKVIVVWNNIGEKAPDELWNSLGPHPIPVIFKQQTANRMRNRLQVFPELETNAVLMVDDDTLISTPDLVFAFSVWQQFPDQIVGFVPRKHVSTSSGIYSYGSFEMQAPGSGNGDQYSMVLIGASFFNSKYLELFQRQPAAVHALIDDTQNCDDIAMNFIIAKHIGK

SEQ ID NO: 4954 - protein, 130 aa, Homo sapiens
MGRPLHLVLLSASLAGLLLLGESLFIRREQANNILARVTRANSFLEEMKKGHLERECMEETCSYEEAREVFEDSDKTNEFWNKYKDGDQCETSPCQNQGKCKDGLGEYTCTCLEGFEGKNCELCMLIFAL

SEQ ID NO: 4955 - protein, 334 aa, Homo sapiens
MGRPLHLVLLSASLAGLLLLGESLFIRREQANNILARVTRANSFLEEMKKGHLERECMEETCSYEEAREVFEDSDKTNEFWNKYKDGDQCETSPCQNQGKCKDGLGEYTCTCLEGFEGKNCELFTRKLCSLDNGDCDQFCHEEQNSVVCSCARGYTLADNGKACIPTGPYPCGKQTLERRKRSVAQATSSSGEAPDSITWKPYDAADLDPTENPFDLLDFNQTQPERGDNNLTRIVGGQECKDGECPWQALLINEENEGFCGGTILSEFYILTAAHCLYQAKRFKVRGTGTRSRRRAVRRCTRWRWSSSTTGSQRRPMTSTSPCSGSRPPSPSA

SEQ ID NO: 4956 - protein, 332 aa, Homo sapiens
MGRPLHLVLLSASLAGLLLLGESLFIRREQANNILARVTRANSFLEEMKKGHLERECMEETCSYEEAREVFEDSDKTNEFWNKYKDGDQCETSPCQNQGKCKDGLGEYTCTCLEGFEGKNCELFTRKLCSLDNGDCDQFCHEEQNSVVCSCARGYTLADNGKACIPTGPYPCGKQTLERRKRSVAQATSSSGEAPDSITWKPYDAADLDPTENPFDLLDFNQTQPERGDNNLTRIVGGQECKDGECPWQALLINEENEGFCGGTILSEFYILTAAHCLYQAKRFKGTGTRSRRRAVRRCTRWRWSSSTTGSQRRPMTSTSPCSGSRPPSPSA

SEQ ID NO: 4957 - protein, 488 aa, Homo sapiens
MGRPLHLVLLSASLAGLLLLGESLFIRREQANNILARVTRANSFLEEMKKGHLERECMEETCSYEEAREVFEDSDKTNEFWNKYKDGDQCETSPCQNQGKCKDGLGEYTCTCLEGFEGKNCELFTRKLCSLDNGDCDQFCHEEQNSVVCSCARGYTLADNGKACIPTGPYPCGKQTLERRKRSVAQATSSSGEAPDSITWKPYDAADLDPTENPFDLLDFNQTQPERGDNNLTRIVGGQECKDGECPWQALLINEENEGFCGGTILSEFYILTAAHCLYQAKRFKVRVGDRNTEQEEGGEAVHEVEVVIKHNRFTKETYDFDIAVLRLKTPITFRMNVAPACLPERDWAESTLMTQKTGIVSGFGRTHEKGRQSTRLKMLEVPYVDRNSCKLSSSFIITQNMFCAGYDTKQEDACQGDSGGPHVTRFKDTYFVTGIVSWGEGCARKGKYGIYTKVTAFLKWIDRSMKTRGLPKAKSHAPEVITSSPLK

SEQ ID NO: 4958 - protein, 162 aa, Homo sapiens
MIFLYQVVHFILFTSVSGECVTQLLKDTCFEGGDITTVFTPSAKYCQVVCTYHPRCLLFTFTAESPSEDPTRWFTCVLKDSVTETLPRVNRTAAISGYSFKQCSHQISACNKDIYVDLDMKGINYNSSVAKSAQECQERCTDDVHCHFFTYATRQFPSLEHR

SEQ ID NO: 4959 - protein, 625 aa, Homo sapiens
MIFLYQVVHFILFTSVSGECVTQLLKDTCFEGGDITTVFTPSAKYCQVVCTYHPRCLLFTFTAESPSEDPTRWFTCVLKDSVTETLPRVNRTAAISGYSFKQCSHQISACNKDIYVDLDMKGINYNSSVAKSAQECQERCTDDVHCHFFTYATRQFPSLEHRNICLLKHTQTGTPTRITKLDKVVSGFSLKSCALSNLACIRDIFPNTVFADSNIDSVMAPDAFVCGRICTHHPGCLFFTFFSQEWPKESQRNLCLLKTSESGLPSTRIKKSKALSGFSLQSCRHSIPVFCHSSFYHDTDFLGEELDIVAAKSHEACQKLCTNAVRCQFFTYTPAQASCNEGKGKCYLKLSSNGSPTKILHGRGGISGYTLRLCKMDNECTTKIKPRIVGGTASVRGEWPWQVTLHTTSPTQRHLCGGSIIGNQWILTAAHCFYGVESPKILRVYSGILNQSEIKEDTSFFGVQEIIIHDQYKMAESGYDIALLKLETTVNYTDSQRPICLPSKGDRNVIYTDCWVTGWGYRKLRDKIQNTLQKAKIPLVTNEECQKRYRGHKITHKMICAGYREGGKDACKGDSGGPLSCKHNEVWHLVGITSWGEGCAQRERPGVYTNVVEYVDWILEKTQAV

SEQ ID NO: 4960 - protein, 571 aa, Homo sapiens
MIFLYQVVHFILFTSVSGECVTQLLKDTCFEGGDITTVFTPSAKYCQVVCTYHPRCLLFTFTAESPSEDPTRWFTCVLKDSVTETLPRVNRTAAISGYSFKQCSHQISNICLLKHTQTGTPTRITKLDKVVSGFSLKSCALSNLACIRDIFPNTVFADSNIDSVMAPDAFVCGRICTHHPGCLFFTFFSQEWPKESQRNLCLLKTSESGLPSTRIKKSKALSGFSLQSCRHSIPVFCHSSFYHDTDFLGEELDIVAAKSHEACQKLCTNAVRCQFFTYTPAQASCNEGKGKCYLKLSSNGSPTKILHGRGGISGYTLRLCKMDNECTTKIKPRIVGGTASVRGEWPWQVTLHTTSPTQRHLCGGSIIGNQWILTAAHCFYGVESPKILRVYSGILNQSEIKEDTSFFGVQEIIIHDQYKMAESGYDIALLKLETTVNYTDSQRPICLPSKGDRNVIYTDCWVTGWGYRKLRDKIQNTLQKAKIPLVTNEECQKRYRGHKITHKMICAGYREGGKDACKGDSGGPLSCKHNEVWHLVGITSWGEGCAQRERPGVYTNVVEYVDWILEKTQAV

SEQ ID NO: 4961 - protein, 210 aa, Homo sapiens
  SITE 1: note = misc_feature - Xaa can be any naturally occurring amino acid
XSGFSLKSCALSNLACIRDIFPNTVFADSNIDSVMAPDAFVCGRICTHHPGCLFFTFFSQEWPKESQRNLCLLKTSESGLPSTRIKKSKALSGFSLQSCRHSIPVFCHSSFYHDTDFLGEELDIVAAKSHEACQKLCTNAVRCQFFTYTPAQASCNEGKGKCYLKLSSNGSPTKILHGRGGISGYTLRLCKMDNELRGAPMKISGWLKTS

SEQ ID NO: 4962 - protein, 159 aa, Homo sapiens
  SITE 1: note = misc_feature - Xaa can be any naturally occurring amino acid
XVESPKILRVYSGILNQSEIKEDTSFFGVQEIIIHDQYKMAESGYDIALLKLETTVNYTDKIQNTLQKAKIPLVTNEECQKRYRGHKITHKMICAGYREGGKDACKGDSGGPLSCKHNEVWHLVGITSWGEGCAQRERPGVYTNVVEYVDWILEKTQAV

SEQ ID NO: 4963 - protein, 615 aa, Homo sapiens
MRALLLLGFLLVSLESTLSIPPWEAPKEHKYKAEEHTVVLTVTGEPCHFPFQYHRQLYHKCTHKGRPGPQPWCATTPNFDQDQRWGYCLEPKKVKDHCSKHSPCQKGGTCVNMPSGPHCLCPQHLTGNHCQKEKCFEPQLLRFFHKNEIWYRTEQAAVARCQCKGPDAHCQRLASQACRTNPCLHGGRCLEVEGHRLCHCPVGYTGAFCDVDTKASCYDGRGLSYRGLARTTLSGAPCQPWASEATYRNVTAEQARNWGLGGHAFCRNPDNDIRPWCFVLNRDRLSWEYCDLAQCQTPTQAAPPTPVSPRLHVPLMPAQPAPPKPQPTTRTPPQSQTPGALPAKREQPPSLTRNGPLSCGQRLRKSLSSMTRVVGGLVALRGAHPYIAALYWGHSFCAGSLIAPCWVLTAAHCLQDRPAPEDLTVVLGQERRNHSCEPCQTLAVRSYRLHEAFSPVSYQHDLALLRLQEDADGSCALLSPYVQPVCLPSGAARPSETTLCQVAGWGHQFEGAEEYASFLQEAQVPFLSLERCSAPDVHGSSILPGMLCAGFLEGGTDACQGDSGGPLVCEDQAAERRLTLQGIISWGSGCGDRNKPGVYTDVAYYLAWIREHTVS

SEQ ID NO: 4964 - protein, 661 aa, Homo sapiens
MRLKNLTFIIILIISGELYAEEKPCGFPHVENGRIAQYYYTFKSFYFPMSIDKKLSFFCLAGYTTESGRQEEQTTCTTEGWSPEPRCFKKCTKPDLSNGYISDVKLLYKIQENMRYGCASGYKTTGGKDEEVVQCLSDGWSSQPTCRKEHETCLAPELYNGNYSTTQKTFKVKDKVQYECATGYYTAGGKKTEEVECLTYGWSLTPKCTKLKCSSLRLIENGYFHPVKQTYEEGDVVQFFCHENYYLSGSDLIQCYNFGWYPESPVCEGRRNRCPPPPLPINSKIQTHSTTYRHGEIVHIECELNFEIHGSAEIRCEDGKWTEPPKCIEGQEKVACEEPPFIENGAANLHSKIYYNGDKVTYACKSGYLLHGSNEITCNRGKWTLPPECVENNENCKHPPVVMNGAVADGILASYATGSSVEYRCNEYYLLRGSKISRCEQGKWSSPPVCLEPCTVNVDYMNRNNIEMKWKYEGKVLHGDLIDFVCKQGYDLSPLTPLSELSVQCNRGEVKYPLCTRKESKGMCTSPPLIKHGVIISSTVDTYENGSSVEYRCFDHHFLEGSREAYCLDGMWTTPPLCLEPCTLSFTEMEKNNLLLKWDFDNRPHILHGEYIEFICRGDTYPAELYITGSILRMQCDRGQLKYPRCIPRQSTLSYQEPLRT

SEQ ID NO: 4965 - protein, 622 aa, Homo sapiens
MAHVRGLQLPGCLALAALCSLVHSQHVFLAPQQARSLLQRVRRANTFLEEVRKGNLERECVEETCSYEEAFEALESSTATDVFWAKYTACETARTPRDKLAACLEGNCAEGLGTNYRGHVNITRSGIECQLWRSRYPHKPEINSTTHPGADLQENFCRNPDSSTTGPWCYTTDPTVRRQECSIPVCGQDQVTVAMTPRSEGSSVNLSPPLEQCVPDRGQQYQGRLAVTTHGLPCLAWASAQAKALSKHQDFNSAVQLVENFCRNPDGDEEGVWCYVAGKPGDFGYCDLNYCEEAVEEETGDGLDEDSDRAIEGRTATSEYQTFFNPRTFGSGEADCGLRPLFEKKSLEDKTERELLESYIDGRIVEGSDAEIGMSPWQVMLFRKSPQELLCGASLISDRWVLTAAHCLLYPPWDKNFTENDLLVRIGKHSRTRYERNIEKISMLEKIYIHPRYNWRENLDRDIALMKLKKPVAFSDYIHPVCLPDRETAASLLQAGYKGRVTGWGNLKETWTANVGKGQPSVLQVVNLPIVERPVCKDSTRIRITDNMFCAGYKPDEGKRGDACEGDSGGPFVMKSPFNNRWYQMGIVSWGEGCDRDGKYGFYTHVFRLKKWIQKVIDQFGE

SEQ ID NO: 4966 - protein, 583 aa, Homo sapiens
MAHVRGLQLPGCLALAALCSLVHSQHVFLAPQQARSLLQRVRRANTFLEEVRKGNLERECVEETCSYEEAFEALESSTATDVFWAKYTACETARTPRDKLAACLEGNCAEGLGTNYRGHVNITRSGIECQLWRSRYPHKPEINSTTHPGADLQENFCRNPDSSTTGPWCYTTDPTVRRQECSIPVCGQDQVTVAMTPRSEGSSVNLSPPLEQCVPDRGQQYQGRLAVTTHGLPCLAWASAQAKALSKHQDFNSAVQLVENFCRNPDGDEEGVWCYVAGKPGDFGYCDLNYCEEAVEEETGDGLDEDSDRAIEGRTATSEYQTFFNPRTFGSGEADCGLRPLFEKKSLEDKTERELLESYIDGRIVEGSDAEIGMSPWQVMLFRKSPQELLCGASLISDRWVLTAAHCLLYPPWDKNFTENDLLVRIGKHSRTRYERNIEKISMLEKIYIHPSLLQAGYKGRVTGWGNLKETWTANVGKGQPSVLQVVNLPIVERPVCKDSTRIRITDNMFCAGYKPDEGKRGDACEGDSGGPFVMKSPFNNRWYQMGIVSWGEGCDRDGKYGFYTHVFRLKKWIQKVIDQFGE

SEQ ID NO: 4967 - protein, 324 aa, Homo sapiens
MGWGLLAGQSTQSWPLMFLAPQQARSLLQRVRRANTFLEEVRKGNLERECVEETCSYEEAFEALESSTATDVFWAKYTACETARTPRDKLAACLEGNCAEGLGTNYRGHVNITRSGIECQLWRSRYPHKPEINSTTHPGADLQENFCRNPDSSTTGPWCYTTDPTVRRQECSIPVCGQDQVTVAMTPRSEGSSVNLSPPLEQCVPDRGQQYQGRLAVTTHGLPCLAWASAQAKALSKHQDFNSAVQLVENFCRNPDGDEEGVWCYVAGKPGDFGYCDLNYCEEAVEEETGDGLDEDSDRAIEGRTATSEYQTFFNPRTFGSGEA

SEQ ID NO: 4968 - protein, 425 aa, Homo sapiens
MGPRRLLLVAACFSLCGPLLSARTRARRPESKATNATLDPRSFLLRNPNDKYEPFWEDEEKNESGLTEYRLVSINKSSPLQKQLPAFISEDASGYLTSSWLTLFVPSVYTGVFVVSLPLNIMAIVVFILKMKVKKPAVVYMLHLATADVLFVSVLPFKISYYFSGSDWQFGSELCRFVTAAFYCNMYASILLMTVISIDRFLAVVYPMQSLSWRTLGRASFTCLAIWALAIAGVVPLLLKEQTIQVPGLNITTCHDVLNETLLEGYYAYYFSAFSAVFFFVPLIISTVCYVSIIRCLSSSAVANRSKKSRALFLSAAVFCIFIICFGPTNVLLIAHYSFLSHTSTTEAAYFAYLLCVCVSSISCCIDPLIYYYASSECQRYVYSILCCKESSDPSSYNSSGQLMASKMDTCSSNLNNSIYKKLLT

SEQ ID NO: 4969 - protein, 102 aa, Homo sapiens
MGPRRLLLVAACFSLCGPLLSARTRARRPVTFRWGVPPPSRAQPMPLWTRSWRVQPACHGVLDMEEDGAEAPWGSLQSCVALVIVFLPGPPPKRKALTLLHQ

SEQ ID NO: 4970 - protein, 113 aa, Homo sapiens
MWGRLLLWPLVLGFSLSGGTQTPSVYDESGSTGGGDARPQSCLPPAATQAKSVPMTVTPWSSRTAHGHCFWAGCPPGWCPPSMGWSWWWGCRPMGWRCGCWPRRHLGCPPPCC

SEQ ID NO: 4971 - protein, 385 aa, Homo sapiens
MWGRLLLWPLVLGFSLSGGTQTPSVYDESGSTGGGDDSTPSILPAPRGYPGQVCANDSDTLELPDSSRALLLGWVPTRLVPALYGLVLVVGLPANGLALWVLATQAPRLPSTMLLMNLAAADLLLALALPPRIAYHLRGQRWPFGEAACRLATAALYGHMYGSVLLLAAVSLDRYLALVHPLRARALRGRRLALGLCMAAWLMAAALALPLTLQRQTFRLARSDRVLCHDALPLDAQASHWQPAFTCLALLGCFLPLLAMLLCYGATLHTLAASGRRYGHALRLTAVVLASAVAFFVPSNLLLLLHYSDPSPSAWGNLYGAYVPSLALSTLNSCVDPFIYYYVSAEFRDKVRAGLFQRSPGDTVASKASAEGGSRGMGTHSSLLQ

SEQ ID NO: 4972 - protein, 2224 aa, Homo sapiens
MFPGCPRLWVLVVLGTSWVGWGSQGTEAAQLRQFYVAAQGISWSYRPEPTNSSLNLSVTSFKKIVYREYEPYFKKEKPQSTISGLLGPTLYAEVGDIIKVHFKNKADKPLSIHPQGIRYSKLSEGASYLDHTFPAEKMDDAVAPGREYTYEWSISEDSGPTHDDPPCLTHIYYSHENLIEDFNSGLIGPLLICKKGTLTEGGTQKTFDKQIVLLFAVFDESKSWSQSSSLMYTVNGYVNGTMPDITVCAHDHISWHLLGMSSGPELFSIHFNGQVLEQNHHKVSAITLVSATSTTANMTVGPEGKWIISSLTPKHLQAGMQAYIDIKNCPKKTRNLKKITREQRRHMKRWEYFIAAEEVIWDYAPVIPANMDKKYRSQHLDNFSNQIGKHYKKVMYTQYEDESFTKHTVNPNMKEDGILGPIIRAQVRDTLKIVFKNMASRPYSIYPHGVTFSPYEDEVNSSFTSGRNNTMIRAVQPGETYTYKWNILEFDEPTENDAQCLTRPYYSDVDIMRDIASGLIGLLLICKSRSLDRRGIQRAADIEQQAVFAVFDENKSWYLEDNINKFCENPDEVKRDDPKFYESNIMSTINGYVPESITTLGFCFDDTVQWHFCSVGTQNEILTIHFTGHSFIYGKRHEDTLTLFPMRGESVTVTMDNVGTWMLTSMNSSPRSKKLRLKFRDVKCIPDDDEDSYEIFEPPESTVMATRKMHDRLEPEDEESDADYDYQNRLAAALGIRSFRNSSLNQEEEEFNLTALALENGTEFVSSNTDIIVGSNYSSPSNISKFTVNNLAEPQKAPSHQQATTAGSPLRHLIGKNSVLNSSTAEHSSPYSEDPIEDPLQPDVTGIRLLSLGAGEFKSQEHAKHKGPKVERDQAAKHRFSWMKLLAHKVGRHLSQDTGSPSGMRPWEDLPSQDTGSPSRMRPWKDPPSDLLLLKQSNSSKILVGRWHLASEKGSYEIIQDTDEDTAVNNWLISPQNASRAWGESTPLANKPGKQSGHPKFPRVRHKSLQVRQDGGKSRLKKSQFLIKTRKKKKEKHTHHAPLSPRTFHPLRSEAYNTFSERRLKHSLVLHKSNETSLPTDLNQTLPSMDFGWIASLPDHNQNSSNDTGQASCPPGLYQTVPPEEHYQTFPIQDPDQMHSTSDPSHRSSSPELSEMLEYDRSHKSFPTDISQMSPSSEHEVWQTVISPDLSQVTLSPELSQTNLSPDLSHTTLSPELIQRNLSPALGQMPISPDLSHTTLSPDLSHTTLSLDLSQTNLSPELSQTNLSPALGQMPLSPDLSHTTLSLDFSQTNLSPELSHMTLSPELSQTNLSPALGQMPISPDLSHTTLSLDFSQTNLSPELSQTNLSPALGQMPLSPDPSHTTLSLDLSQTNLSPELSQTNLSPDLSEMPLFADLSQIPLTPDLDQMTLSPDLGETDLSPNFGQMSLSPDLSQVTLSPDISDTTLLPDLSQISPPPDLDQIFYPSESSQSLLLQEFNESFPYPDLGQMPSPSSPTLNDTFLSKEFNPLVIVGLSKDGTDYIEIIPKEEVQSSEDDYAEIDYVPYDDPYKTDVRTNINSSRDPDNIAAWYLRSNNGNRRNYYIAAEEISWDYSEFVQRETDIEDSDDIPEDTTYKKVVFRKYLDSTFTKRDPRGEYEEHLGILGPIIRAEVDDVIQVRFKNLASRPYSLHAHGLSYEKSSEGKTYEDDSPEWFKEDNAVQPNSSYTYVWHATERSGPESPGSACRAWAYYSAVNPEKDIHSGLIGPLLICQKGILHKDSNMPMDMREFVLLFMTFDEKKSWYYEKKSRSSWRLTSSEMKKSHEFHAINGMIYSLPGLKMYEQEWVRLHLLNIGGSQDIHVVHFHGQTLLENGNKQHQLGVWPLLPGSFKTLEMKASKPGWWLLNTEVGENQRAGMQTPFLIMDRDCRMPMGLSTGIISDSQIKASEFLGYWEPRLARLNNGGSYNAWSVEKLAAEFASKPWIQVDMQKEVIITGIQTQGAKHYLKSCYTTEFYVAYSSNQINWQIFKGNSTRNVMYFNGNSDASTIKENQFDPPIVARYIRISPTRAYNRPTLRLELQGCEVNGCSTPLGMENGKIENKQITASSFKKSWWGDYWEPFRARLNAQGRVNAWQAKANNNKQWLEIDLLKIKKITAIITQGCKSLSSEMYVKSYTIHYSEQGVEWKPYRLKSSMVDKIFEGNTNTKGHVKNFFNPPIISRFIRVIPKTWNQSIALRLELFGCDIY

SEQ ID NO: 4973 - protein, 2229 aa, Homo sapiens
MFPGCPRLWVLVVLGTSWVGWGSQGTEAAQLRQFYVAAQGISWSYRPEPTNSSLNLSVTSFKKIVYREYEPYFKKEKPQSTISGLLGPTLYAEVGDIIKVHFKNKADKPLSIHPQGIRYSKLSEGASYLDHTFPAEKMDDAVAPGREYTYEWSISEDSGPTHDDPPCLTHIYYSHENLIEDFNSGLIGPLLICKKGTLTEGGTQKTFDKQIVLLFAVFDESKSWSQSSSLMYTVNGYVNGTMPDITVCAHDHISWHLLGMSSGPELFSIHFNGQVLEQNHHKVSAITLVSATSTTANMTVGPEGKWIISSLTPKHLQAGMQAYIDIKNCPKKTRNLKKITREQRRHMKRWEYFIAAEEVIWDYAPVIPANMDKKYRSQHLDNFSNQIGKHYKKVMYTQYEDESFTKHTVNPNMKEDGILGPIIRAQVRDTLKIVFKNMASRPYSIYPHGVTFSPYEDEVNSSFTSGRNNTMIRAVQPGETYTYKWNILEFDEPTENDAQCLTRPYYSDVDIMRDIASGLIGLLLICKSRSLDRRGIQRAADIEQQAVFAVFDENKSWYLEDNINKFCENPDEVKRDDPKFYESNIMSNFTLSAINGYVPESITTLGFCFDDTVQWHFCSVGTQNEILTIHFTGHSFIYGKRHEDTLTLFPMRGESVTVTMDNVGTWMLTSMNSSPRSKKLRLKFRDVKCIPDDDEDSYEIFEPPESTVMATRKMHDRLEPEDEESDADYDYQNRLAAALGIRSFRNSSLNQEEEEFNLTALALENGTEFVSSNTDIIVGSNYSSPSNISKFTVNNLAEPQKAPSHQQATTAGSPLRHLIGKNSVLNSSTAEHSSPYSEDPIEDPLQPDVTGIRLLSLGAGEFKSQEHAKHKGPKVERDQAAKHRFSWMKLLAHKVGRHLSQDTGSPSGMRPWEDLPSQDTGSPSRMRPWKDPPSDLLLLKQSNSSKILVGRWHLASEKGSYEIIQDTDEDTAVNNWLISPQNASRAWGESTPLANKPGKQSGHPKFPRVRHKSLQVRQDGGKSRLKKSQFLIKTRKKKKEKHTHHAPLSPRTFHPLRSEAYNTFSERRLKHSLVLHKSNETSLPTDLNQTLPSMDFGWIASLPDHNQNSSNDTGQASCPPGLYQTVPPEEHYQTFPIQDPDQMHSTSDPSHRSSSPELSEMLEYDRSHKSFPTDISQMSPSSEHEVWQTVISPDLSQVTLSPELSQTNLSPDLSHTTLSPELIQRNLSPALGQMPISPDLSHTTLSPDLSHTTLSLDLSQTNLSPELSQTNLSPALGQMPLSPDLSHTTLSLDFSQTNLSPELSHMTLSPELSQTNLSPALGQMPISPDLSHTTLSLDFSQTNLSPELSQTNLSPALGQMPLSPDPSHTTLSLDLSQTNLSPELSQTNLSPDLSEMPLFADLSQIPLTPDLDQMTLSPDLGETDLSPNFGQMSLSPDLSQVTLSPDISDTTLLPDLSQISPPPDLDQIFYPSESSQSLLLQEFNESFPYPDLGQMPSPSSPTLNDTFLSKEFNPLVIVGLSKDGTDYIEIIPKEEVQSSEDDYAEIDYVPYDDPYKTDVRTNINSSRDPDNIAAWYLRSNNGNRRNYYIAAEEISWDYSEFVQRETDIEDSDDIPEDTTYKKVVFRKYLDSTFTKRDPRGEYEEHLGILGPIIRAEVDDVIQVRFKNLASRPYSLHAHGLSYEKSSEGKTYEDDSPEWFKEDNAVQPNSSYTYVWHATERSGPESPGSACRAWAYYSAVNPEKDIHSGLIGPLLICQKGILHKDSNMPMDMREFVLLFMTFDEKKSWYYEKKSRSSWRLTSSEMKKSHEFHAINGMIYSLPGLKMYEQEWVRLHLLNIGGSQDIHVVHFHGQTLLENGNKQHQLGVWPLLPGSFKTLEMKASKPGWWLLNTEVGENQRAGMQTPFLIMDRDCRMPMGLSTGIISDSQIKASEFLGYWEPRLARLNNGGSYNAWSVEKLAAEFASKPWIQVDMQKEVIITGIQTQGAKHYLKSCYTTEFYVAYSSNQINWQIFKGNSTRNVMYFNGNSDASTIKENQFDPPIVARYIRISPTRAYNRPTLRLELQGCEVNGCSTPLGMENGKIENKQITASSFKKSWWGDYWEPFRARLNAQGRVNAWQAKANNNKQWLEIDLLKIKKITAIITQGCKSLSSEMYVKSYTIHYSEQGVEWKPYRLKSSMVDKIFEGNTNTKGHVKNFFNPPIISRFIRVIPKTWNQSIALRLELFGCDIY

SEQ ID NO: 4974 - protein, 382 aa, Homo sapiens
MVSQALRLLCLLLGLQGCLAADGDQCASSPCQNGGSCKDQLQSYICFCLPAFEGRNCETHKDDQLICVNENGGCEQYCSDHTGTKRSCRCHEGYSLLADGVSCTPTVEYPCGKIPILEKRNASKPQGRIVGGKVCPKGECPWQVLLLVNGAQLCGGTLINTIWVVSAAHCFDKIKNWRNLIAVLGEHDLSEHDGDEQSRRVAQVIIPSTYVPGTTNHDIALLRLHQPVVLTDHVVPLCLPERTFSERTLAFVRFSLVSGWGQLLDRGATALELMVLNVPRLMTQDCLQQSRKVGDSPNITEYMFCAGYSDGSKDSCKGDSGGPHATHYRGTWYLTGIVSWGQGCATVGHFGVYTRVSQYIEWLQKLMRSEPRPGVLLRAPFP

SEQ ID NO: 4975 - protein, 74 aa, Homo sapiens
MVSQALRLLCLLLGLQGCLAAGGSPRRPAPAPARQRVPGGAAAGLPGEGVQGGAVLLRGGPGDLQGRGEDVVSG

SEQ ID NO: 4976 - protein, 466 aa, Homo sapiens
MVSQALRLLCLLLGLQGCLAAGGVAKASGGETRDMPWKPGPHRVFVTQEEAHGVLHRRRRANAFLEELRPGSLERECKEEQCSFEEAREIFKDAERTKLFWISYSDGDQCASSPCQNGGSCKDQLQSYICFCLPAFEGRNCETHKDDQLICVNENGGCEQYCSDHTGTKRSCRCHEGYSLLADGVSCTPTVEYPCGKIPILEKRNASKPQGRIVGGKVCPKGECPWQVLLLVNGAQLCGGTLINTIWVVSAAHCFDKIKNWRNLIAVLGEHDLSEHDGDEQSRRVAQVIIPSTYVPGTTNHDIALLRLHQPVVLTDHVVPLCLPERTFSERTLAFVRFSLVSGWGQLLDRGATALELMVLNVPRLMTQDCLQQSRKVGDSPNITEYMFCAGYSDGSKDSCKGDSGGPHATHYRGTWYLTGIVSWGQGCATVGHFGVYTRVSQYIEWLQKLMRSEPRPGVLLRAPFP

SEQ ID NO: 4977 - protein, 444 aa, Homo sapiens
MVSQALRLLCLLLGLQGCLAAVFVTQEEAHGVLHRRRRANAFLEELRPGSLERECKEEQCSFEEAREIFKDAERTKLFWISYSDGDQCASSPCQNGGSCKDQLQSYICFCLPAFEGRNCETHKDDQLICVNENGGCEQYCSDHTGTKRSCRCHEGYSLLADGVSCTPTVEYPCGKIPILEKRNASKPQGRIVGGKVCPKGECPWQVLLLVNGAQLCGGTLINTIWVVSAAHCFDKIKNWRNLIAVLGEHDLSEHDGDEQSRRVAQVIIPSTYVPGTTNHDIALLRLHQPVVLTDHVVPLCLPERTFSERTLAFVRFSLVSGWGQLLDRGATALELMVLNVPRLMTQDCLQQSRKVGDSPNITEYMFCAGYSDGSKDSCKGDSGGPHATHYRGTWYLTGIVSWGQGCATVGHFGVYTRVSQYIEWLQKLMRSEPRPGVLLRAPFP

SEQ ID NO: 4978 - protein, 165 aa, Homo sapiens [sequence omitted]

SEQ ID NO: 4979 - protein, 222 aa, Homo sapiens
MHRDARAQKASRGFPPRVPKSFPFNTSVVYKKTLFVEFTDHLFNIAKPRPPWMGLLGPTIQAEVYDTVVITLKNMASHPVSLHAVGVSYWKASEGAEYDDQTSQREKEDDKVFPGGSHTYVWQVLKENGPMASDPLCLTYSYLSHVDLVKDLNSGLIGALLVCREGSLAKEKTQTLHKFILLFAVFDEGKSWHSETKNSLMQDRDAASARAWPKMHTVNGYV

SEQ ID NO: 4980 - protein, 262 aa, Homo sapiens
MLEQEEERENARKGGSAAHFQTIIRSCERSIRRIARGKSAPMIQSPPTRPFLQQVFFGNVDSSGIKHNIFNPPIIARYIRLHPTHYSIRSTLRMELMGCDLNSCSMPLGMESKAISDAQITASSYFTNMFATWSPSKARLHLQGRSNAWRPQVNNPKEWLQVDFQKTMKVTGVTTQGVKSLLTSMYVKEFLISSSQDGHQWTLFFQNGKVKVFQGNQDSFTPVVNSLDPPLLTRYLRIHPQSWVHQIALRMEVLGCEAQDLY

SEQ ID NO: 4981 - protein, 63 aa, Homo sapiens
MQIELSTCFFLCLLRFCFSATRRYYLGAVELSWDYMQSDLDFLLECQNLFHSTPQSCTKRLCL

SEQ ID NO: 4982 - protein, 2351 aa, Homo sapiens
MQIELSTCFFLCLLRFCFSATRRYYLGAVELSWDYMQSDLGELPVDARFPPRVPKSFPFNTSVVYKKTLFVEFTDHLFNIAKPRPPWMGLLGPTIQAEVYDTVVITLKNMASHPVSLHAVGVSYWKASEGAEYDDQTSQREKEDDKVFPGGSHTYVWQVLKENGPMASDPLCLTYSYLSHVDLVKDLNSGLIGALLVCREGSLAKEKTQTLHKFILLFAVFDEGKSWHSETKNSLMQDRDAASARAWPKMHTVNGYVNRSLPGLIGCHRKSVYWHVIGMGTTPEVHSIFLEGHTFLVRNHRQASLEISPITFLTAQTLLMDLGQFLLFCHISSHQHDGMEAYVKVDSCPEEPQLRMKNNEEAEDYDDDLTDSEMDVVRFDDDNSPSFIQIRSVAKKHPKTWVHYIAAEEEDWDYAPLVLAPDDRSYKSQYLNNGPQRIGRKYKKVRFMAYTDETFKTREAIQHESGILGPLLYGEVGDTLLIIFKNQASRPYNIYPHGITDVRPLYSRRLPKGVKHLKDFPILPGEIFKYKWTVTVEDGPTKSDPRCLTRYYSSFVNMERDLASGLIGPLLICYKESVDQRGNQIMSDKRNVILFSVFDENRSWYLTENIQRFLPNPAGVQLEDPEFQASNIMHSINGYVFDSLQLSVCLHEVAYWYILSIGAQTDFLSVFFSGYTFKHKMVYEDTLTLFPFSGETVFMSMENPGLWILGCHNSDFRNRGMTALLKVSSCDKNTGDYYEDSYEDISAYLLSKNNAIEPRSFSQNSRHPSTRQKQFNATTIPENDIEKTDPWFAHRTPMPKIQNVSSSDLLMLLRQSPTPHGLSLSDLQEAKYETFSDDPSPGAIDSNNSLSEMTHFRPQLHHSGDMVFTPESGLQLRLNEKLGTTAATELKKLDFKVSSTSNNLISTIPSDNLAAGTDNTSSLGPPSMPVHYDSQLDTTLFGKKSSPLTESGGPLSLSEENNDSKLLESGLMNSQESSWGKNVSSTESGRLFKGKRAHGPALLTKDNALFKVSISLLKTNKTSNNSATNRKTHIDGPSLLIENSPSVWQNILESDTEFKKVTPLIHDRMLMDKNATALRLNHMSNKTTSSKNMEMVQQKKEGPIPPDAQNPDMSFFKMLFLPESARWIQRTHGKNSLNSGQGPSPKQLVSLGPEKSVEGQNFLSEKNKVVVGKGEFTKDVGLKEMVFPSSRNLFLTNLDNLHENNTHNQEKKIQEEIEKKETLIQENVVLPQIHTVTGTKNFMKNLFLLSTRQNVEGSYDGAYAPVLQDFRSLNDSTNRTKKHTAHFSKKGEEENLEGLGNQTKQIVEKYACTTRISPNTSQQNFVTQRSKRALKQFRLPLEETELEKRIIVDDTSTQWSKNMKHLTPSTLTQIDYNEKEKGAITQSPLSDCLTRSHSIPQANRSPLPIAKVSSFPSIRPIYLTRVLFQDNSSHLPAASYRKKDSGVQESSHFLQGAKKNNLSLAILTLEMTGDQREVGSLGTSATNSVTYKKVENTVLPKPDLPKTSGKVELLPKVHIYQKDLFPTETSNGSPGHLDLVEGSLLQGTEGAIKWNEANRPGKVPFLRVATESSAKTPSKLLDPLAWDNHYGTQIPKEEWKSQEKSPEKTAFKKKDTILSLNACESNHAIAAINEGQNKPEIEVTWAKQGRTERLCSQNPPVLKRHQREITRTTLQSDQEEIDYDDTISVEMKKEDFDIYDEDENQSPRSFQKKTRHYFIAAVERLWDYGMSSSPHVLRNRAQSGSVPQFKKVVFQEFTDGSFTQPLYRGELNEHLGLLGPYIRAEVEDNIMVTFRNQASRPYSFYSSLISYEEDQRQGAEPRKNFVKPNETKTYFWKVQHHMAPTKDEFDCKAWAYFSDVDLEKDVHSGLIGPLLVCHTNTLNPAHGRQVTVQEFALFFTIFDETKSWYFTENMERNCRAPCNIQMEDPTFKENYRFHAINGYIMDTLPGLVMAQDQRIRWYLLSMGSNENIHSIHFSGHVFTVRKKEEYKMALYNLYPGVFETVEMLPSKAGIWRVECLIGEHLHAGMSTLFLVYSNKCQTPLGMASGHIRDFQITASGQYGQWAPKLARLHYSGSINAWSTKEPFSWIKVDLLAPMIIHGIKTQGARQKFSSLYISQFIIMYSLDGKKWQTYRGNSTGTLMVFFGNVDSSGIKHNIFNPPIIARYIRLHPTHYSIRSTLRMELMGCDLNSCSMPLGMESKAISDAQITASSYFTNMFATWSPSKARLHLQGRSNAWRPQVNNPKEWLQVDFQKTMKVTGVTTQGVKSLLTSMYVKEFLISSSQDGHQWTLFFQNGKVKVFQGNQDSFTPVVNSLDPPLLTRYLRIHPQSWVHQIALRMEVLGCEAQDLY

SEQ ID NO: 4983 - protein, 216 aa, Homo sapiens
MRIQDPGKVFFGNVDSSGIKHNIFNPPIIARYIRLHPTHYSIRSTLRMELMGCDLNSCSMPLGMESKAISDAQITASSYFTNMFATWSPSKARLHLQGRSNAWRPQVNNPKEWLQVDFQKTMKVTGVTTQGVKSLLTSMYVKEFLISSSQDGHQWTLFFQNGKVKVFQGNQDSFTPVVNSLDPPLLTRYLRIHPQSWVHQIALRMEVLGCEAQDLY

SEQ ID NO: 4984 - protein, 461 aa, Homo sapiens
MQRVNMIMAESPGLITICLLGYLLSAECTVFLDHENANKILNRPKRYNSGKLEEFVQGNLERECMEEKCSFEEAREVFENTERTTEFWKQYVDGDQCESNPCLNGGSCKDDINSYECWCPFGFEGKNCELDVTCNIKNGRCEQFCKNSADNKVVCSCTEGYRLAENQKSCEPAVPFPCGRVSVSQTSKLTRAETVFPDVDYVNSTEAETILDNITQSTQSFNDFTRVVGGEDAKPGQFPWQVVLNGKVDAFCGGSIVNEKWIVTAAHCVETGVKITVVAGEHNIEETEHTEQKRNVIRIIPHHNYNAAINKYNHDIALLELDEPLVLNSYVTPICIADKEYTNIFLKFGSGYVSGWGRVFHKGRSALVLQYLRVPLVDRATCLRSTKFTIYNNMFCAGFHEGGRDSCQGDSGGPHVTEVEGTSFLTGIISWGEECAMKGKYGIYTKVSRYVNWIKEKTKLT

SEQ ID NO: 4985 - protein, 423 aa, Homo sapiens
MQRVNMIMAESPGLITICLLGYLLSAECTVFLDHENANKILNRPKRYNSGKLEEFVQGNLERECMEEKCSFEEAREVFENTERTTEFWKQYVDVTCNIKNGRCEQFCKNSADNKVVCSCTEGYRLAENQKSCEPAVPFPCGRVSVSQTSKLTRAETVFPDVDYVNSTEAETILDNITQSTQSFNDFTRVVGGEDAKPGQFPWQVVLNGKVDAFCGGSIVNEKWIVTAAHCVETGVKITVVAGEHNIEETEHTEQKRNVIRIIPHHNYNAAINKYNHDIALLELDEPLVLNSYVTPICIADKEYTNIFLKFGSGYVSGWGRVFHKGRSALVLQYLRVPLVDRATCLRSTKFTIYNNMFCAGFHEGGRDSCQGDSGGPHVTEVEGTSFLTGIISWGEECAMKGKYGIYTKVSRYVNWIKEKTKLT

SEQ ID NO: 4986 - protein, 38 aa, Homo sapiens
LTQVLRAVLSACTWVSRKGDLQRMKQTHKGKRTFSQDG

SEQ ID NO: 4987 - protein, 128 aa, Homo sapiens
MAFTGKFEMESEKNYDEFMKLLGISSDVIEKARNFKIVTEVQQDGQDFTWSQHYSGGHTMTNKFTVGKESNIQTMGGKTFKATVQMEGGKLVVNFPNYHQTSEIVGDKLVEVSTIGGVTYERVSKRLA

SEQ ID NO: 4988 - protein, 177 aa, Homo sapiens
MKTVTMMMVVEMQALTQVLRAVLSACTWVSRKGDLQRMKQTHKGKPPSSMAFTGKFEMESEKNYDEFMKLLGISSDVIEKARNFKIVTEVQQDGQDFTWSQHYSGGHTMTNKFTVGKESNIQTMGGKTFKATVQMEGGKLVVNFPNYHQTSEIVGDKLVEVSTIGGVTYERVSKRLA

SEQ ID NO: 4989 - protein, 67 aa, Homo sapiens
MAEPDYIEDDNPELIRPQKLINPVKTSRNHQDLHRELLMNQKRGLAPQNKPELQKVMEKRKRDQVIK

SEQ ID NO: 4990 - protein, 84 aa, Homo sapiens
MAEPDYIEDDNPELIRPQKLINPVKTSRNHQDLHRELLMNQKRGLAPQNKPELQKVMEKRKRDQVIKQKEEEAQKKKSDLEIEL

SEQ ID NO: 4991 - protein, 90 aa, Homo sapiens
MAEPDYIEDDNPELIRPQKLINPVKTSRNHQDLHRELLMNQKRGLAPQNKPELQKVMEKRKRDQVIKQKEEEAQKKKSDLEIELLKRQQK

SEQ ID NO: 4992 - protein, 93 aa, Homo sapiens
MAEPDYIEDDNPELIRPQKLINPVKTSRNHQDLHRELLMNQKRGLAPQNKPELQKVMEKRKRDQVIKQKEEEAQKKKSDLEIELLKRQQKLEQ

SEQ ID NO: 4993 - protein, 101 aa, Homo sapiens
MAEPDYIEDDNPELIRPQKLINPVKTSRNHQDLHRELLMNQKRGLAPQNKPELQKVMEKRKRDQVIKQKEEEAQKKKSDLEIELLKRQQKLEQLELEKQKL

SEQ ID NO: 4994 - protein, 125 aa, Homo sapiens
MAEPDYIEDDNPELIRPQKLINPVKTSRNHQDLHRELLMNQKRGLAPQNKPELQKVMEKRKRDQVIKQKEEEAQKKKSDLEIELLKRQQKLEQLELEKQKLQEEQENAPEFVKVKGNLRRTGQEV

SEQ ID NO: 4995 - protein, 126 aa, Homo sapiens
MAEPDYIEDDNPELIRPQKLINPVKTSRNHQDLHRELLMNQKRGLAPQNKPELQKVMEKRKRDQVIKQKEEEAQKKKSDLEIELLKRQQKLEQLELEKQKLQEEQENAPEFVKVKGNLRRTGQEVA

SEQ ID NO: 4996 - protein, 128 aa, Homo sapiens
MAEPDYIEDDNPELIRPQKLINPVKTSRNHQDLHRELLMNQKRGLAPQNKPELQKVMEKRKRDQVIKQKEEEAQKKKSDLEIELLKRQQKLEQLELEKQKLQEEQENAPEFVKVKGNLRRTGQEVAQA

SEQ ID NO: 4997 - protein, 131 aa, Homo sapiens
MAEPDYIEDDNPELIRPQKLINPVKTSRNHQDLHRELLMNQKRGLAPQNKPELQKVMEKRKRDQVIKQKEEEAQKKKSDLEIELLKRQQKLEQLELEKQKLQEEQENAPEFVKVKGNLRRTGQEVAQAQES

SEQ ID NO: 4998 - protein, 131 aa, Homo sapiens; identical to SEQ ID NO: 4997

SEQ ID NO: 4999 - protein, 131 aa, Homo sapiens; identical to SEQ ID NO: 4997

SEQ ID NO: 5000 - protein, 131 aa, Homo sapiens; identical to SEQ ID NO: 4997

SEQ ID NO: 5001 - protein, 131 aa, Homo sapiens; identical to SEQ ID NO: 4997

SEQ ID NO: 5002 - protein, 131 aa, Homo sapiens; identical to SEQ ID NO: 4997

SEQ ID NO: 5003 - protein, 131 aa, Homo sapiens; identical to SEQ ID NO: 4997

SEQ ID NO: 5004 - protein, 131 aa, Homo sapiens; identical to SEQ ID NO: 4997

SEQ ID NO: 5005 - protein, 131 aa, Homo sapiens; identical to SEQ ID NO: 4997

SEQ ID NO: 5006 - protein, 131 aa, Homo sapiens; identical to SEQ ID NO: 4997

SEQ ID NO: 5007 - protein, 131 aa, Homo sapiens; identical to SEQ ID NO: 4997

SEQ ID NO: 5008 - protein, 51 aa, Homo sapiens
MAEPDYIEDDNPELIRPQKLINPVKTSRNHQDLHRELLMNQKRILVWLEIH

SEQ ID NO: 5009 - protein, 306 aa, Homo sapiens
MSTWKARLTKRLKSPSRSMHPFPCSALLACFGNTRESASFNQSGVADTHSTVRVQPVAKAGRQPRHPSAEGAPEKRQDSSTHAERNGSANRNSSHRTAAQPAETPEDVPGSLDDGADCEAVVFHASIPRPSIIDTPKEEEFREEPKCLELEQKMTSDSPPEDIDHKDSYLITRSIMAEPDYIEDDNPELIRPQKLINPVKTSRNHQDLHRELLMNQKRGLAPQNKPELQKVMEKRKRDQVIKQKEEEAQKKKSDLEIELLKRQQKLEQLELEKQKLQEEQENAPEFVKVKGNLRRTGQEVAQAQES

SEQ ID NO: 5010 - protein, 160 aa, Homo sapiens
MSTWKARLTKRLKSPSRSMHPFPCSALLACFGNTRESASFNQSGVADTHSTVRVQPVAKAGRQPRHPSAEGAPEKRQDSSTHAERNGSANRNSSHRTAAQPAETPEDVPGSLDDGADCEAVVFHASIPRPSIIDTPKEEEFREEPKCLELEQKMTSGECS

SEQ ID NO: 5011 - protein, 251 aa, Homo sapiens
MAQGRVAHLIEWKGWSKPSDSPAALESAFSSYSDLSEGEQEARFAAGVAEQFAIAEAKLRAWSSVDGEDSTDDSYDEDFAGGMDTDMAGQLPLGPHLQDLFTGHRFSRPVRQGSVEPESDCSQTVSPDTLCSSLCSLEDGLLGSPARLASQLLGDELLLAKLPPSRESAFRSLGPLEAQDSLYNSPLTEGWLLPSRSLWVEPSLKGPCPAGLVLCFIHLSIVSKSSSFFLKTEGFWSVFSVGSSLLWEALE

SEQ ID NO: 5012 - protein, 335 aa, Homo sapiens
MFLATLSFLLPFAHPFGTVSCEYMLGSPLSSLAQVNLSPFSHPKVHMDPNYCHPSTSLHLCSLAWSFTRLLHPPLSPGISQVVKDHVTKPTAMAQGRVAHLIEWKGWSKPSDSPAALESAFSSYSDLSEGEQEARFAAGVAEQFAIAEAKLRAWSSVDGEDSTDDSYDEDFAGGMDTDMAGQLPLGPHLQDLFTGHRFSRPVRQGSVEPESDCSQTVSPDTLCSSLCSLEDGLLGSPARLASQLLGDELLLAKLPPSRESAFRSLGPLEAQDSLYNSPLTESCLSPAEEEPAPCKDCQPLCPPLTGSWERQRQASDLASSGVVSLDEDEAEPEEQ

SEQ ID NO: 5013 - protein, 123 aa, Homo sapiens
MLPKSRRALTIQEIAALARSSLHGISQVVKDHVTKPTAMAQGRVAHLIEWKGWSKPSDSPAALESAFSSYSDLSEGEQEARFAAGVAEQFAIAEAKLRAWSSVDGEDSTDDSYDEDFAGGMDT

SEQ ID NO: 5014 - protein, 232 aa, Homo sapiens
MLPKSRRALTIQEIAALARSSLHGISQVVKDHVTKPTAMAQGRVAHLIEWKGWSKPSDSPAALESAFSSYSDLSEGEQEARFAAGVAEQFAIAEAKLRAWSSVDGEDSTDDSYDEDFAGGMDTDMAGQLPLGPHLQDLFTGHRFSRPVRQGSVEPESDCSQTVSPDTLCSSLCSLEDGLLGSPARLASQLLGDELLLAKLPPSRESAFRSLGPLEAQDSLYNSPLTESCLSP

SEQ ID NO: 5015 - protein, 281 aa, Homo sapiens
MLPKSRRALTIQEIAALARSSLHGISQVVKDHVTKPTAMAQGRVAHLIEWKGWSKPSDSPAALESAFSSYSDLSEGEQEARFAAGVAEQFAIAEAKLRAWSSVDGEDSTDDSYDEDFAGGMDTDMAGQLPLGPHLQDLFTGHRFSRPVRQGSVEPESDCSQTVSPDTLCSSLCSLEDGLLGSPARLASQLLGDELLLAKLPPSRESAFRSLGPLEAQDSLYNSPLTESCLSPAEEEPAPCKDCQPLCPPLTGSWERQRQASDLASSGVVSLDEDEAEPEEQ

SEQ ID NO: 5016 - protein, 281 aa, Homo sapiens; identical to SEQ ID NO: 5015

SEQ ID NO: 5017 - protein, 281 aa, Homo sapiens; identical to SEQ ID NO: 5015

SEQ ID NO: 5018 - protein, 366 aa, Homo sapiens
MPMISVLGKMFLWQREGPGGRWTCQTSRRVSSDPAWAVEWIELPRGLSLSSLGSARTLRGWSRSSRPSSVDSQDLPEVNVGDTVAMLPKSRRALTIQEIAALARSSLHGISQVVKDHVTKPTAMAQGRVAHLIEWKGWSKPSDSPAALESAFSSYSDLSEGEQEARFAAGVAEQFAIAEAKLRAWSSVDGEDSTDDSYDEDFAGGMDTDMAGQLPLGPHLQDLFTGHRFSRPVRQGSVEPESDCSQTVSPDTLCSSLCSLEDGLLGSPARLASQLLGDELLLAKLPPSRESAFRSLGPLEAQDSLYNSPLTESCLSPAEEEPAPCKDCQPLCPPLTGSWERQRQASDLASSGVVSLDEDEAEPEEQ

SEQ ID NO: 5019 - protein, 359 aa, Homo sapiens
MPMISVLGKMFLWQREGPGGRWTCQTSRRVSSDPAWAVEWIELPRGLSLSSLGSARTLRGWSRSSRPSSVDSQDLPEVNVGDTVAMLPKSRRALTIQEIAALARSSLHGISQVVKDHVTKPTAMAQGRVAHLIEWKGWSKPSDSPAALESAFSSYSDLSEGEQEARFAAGVAEQFAIAEAKLRAWSSVDGEDSTDDSYDEDFAGGMDTDMAGQLPLGPHLQDLFTGHRFSRPVRQGSVEPESDCSQTVSPDTLCSSLCSLEDGLLGSPARLASQLLGDELLLAKLPPSRESAFRSLGPLEAQDSLYNSPLTESCLSPAEEEPAPCKDCQPLCPPLTGSWERQRQASDLGLAPALPEPMG

SEQ ID NO: 5020 - protein, 890 aa, Homo sapiens
MSRSATLLLCLLGCHVWKAVTKTLREPGAGAQEVTLKVHISDASTHQPVADALIEIFTNQASIASGTSGTDGVAFIKFQYKLGSQLIVTASKHAYVPNSAPWKPIRLPVFSSLSLGLLPERSATLMVYEDVVQIVSGFQGARPQPRVHFQRRALRLPENTSYSDLTAFLTAASSPSEVDSFPYLRGLDGNGTGNSTRHDLTPVTAVSVHLLSSNGTPVLVDGPIYVTVPLATQSSLRHNAYVAAWRFDQKLGTWLKSGLGLVHQEGSQLTWTYIAPQLGYWVAAMSPPIPGPVVTQDITTYHTVFLLAILGGMAFILLVLLCLLLYYCRRKCLKPRQHHRKLQLPAGLESSKRDQSTSMSHINLLFSRRASEFPGPLSVTSHGRPEAPGTKELMSGVHLEMMSPGGEGDLHTPMLKLSYSTSQEFSSREELLSCKEEDKSQISFDNLTPSGTLGKDYHKSVEVFPLKARKSMEREGYESSGNDDYRGSYNTVLSQPLFEKQDREGPASTGSKLTIQEHLYPAPSSPEKEQLLDRRPTECMMSRSVDHLERPTSFPRPGQLICCSSVDQVNDSVYRKVLPALVIPAHYMKLPGDHSYVSQPLVVPADQQLEIERLQAELSNPHAGIFPHPSSQIQPQPLSSQAISQQHLQDAGTREWSPQNASMSESLSIPASLNDAALAQMNSEVQLLTEKALMELGGGKPLPHPRAWFVSLDGRSNAHVRHSYIDLQRAGRNGSNDASLDSGVDMNEPKSARKGRGDALSLQQNYPPVQEHQQKEPRAPDSTAYTQLVYLDDVEQSGSECGTTVCTPEDSALRCLLEGSSRRSGGQLPSLQEETTRRTADAPSEPAASPHQRRSAHEEEEDDDDDDQGEDKKSPWQKREERPLMAFNIK

SEQ ID NO: 5021 - protein, 198 aa, Homo sapiens
MSRSATLLLCLLGCHVWKAVTKTLREPGAGAQEVTLKVHISDASTHQPVADALIEIFTNQASIASGTSGTDGVAFIKFQYKLGSQLIVTASKHAYVPNSAPWKPIRLPVFSSLSLGLLPERSATLMVYEDVVQIVSGFQGNSTRHDLTPVTAVSVHLLSSNGTPVLVDGPIYVTVPLATQSSLRHNAYVAAWRFDQKL

SEQ ID NO: 5022 - protein, 826 aa, Homo sapiens
MARLCRRVPCTLLLGLAVVLLKARLVPAAARAELSRSDLSLIQQQQQQQQQQQQQQKQLEEAEEERTEVPGATSTLTVPVSVFMLKVQVNDIISRQYLSQAVVEVFVNYTKTNSTVTKSNGAVLIKVPYKLGLSLTIIAYKDGYVLTPLPWKTRRMPIYSSVTLSLFPQSQANIWLFEDTVLITGKLADAKSQPSVQFSKALIKLPDNHHISNVTGYLTVLQQFLKVDNFLHTTGITLNKPGFENIELTPLAAICVKIYSGGKELKVNGSIQVSLPLLRLNDISAGDRIPAWTFDMNTGAWVNHGRGMVKEHNNHLIWTYDAPHLGYWIAAPLPGTRGSGINEDSKDITAYHTVFLTAILGGTIVIVIGFFAVLLCYCRDKCGTPQKRERNITKLEVLKRDQTTSTTHINHISTVKVALKAEDKSQLFNAKNSSYSPQKKEPSKAETEERVSMVKTRDDFKIYNEDVSFLSVNQNNYSRNPTQSLEPNVGSKQPKHINNNLSSSLGDAQDEKRYLTGNEEAYGRSHIPEQLMHIYSQPIAILQTSDLFSTPEQLHTAKSATLPRKGQLVYGQLMEPVNRENFTQTLPKMPIHSHAQPPDAREEDIILEGQQSLPSQASDWSRYSSSLLESVSVPGTLNEAVVMTPFSSELQGISEQTLLELSKGKPSPHPRAWFVSLDGKPVAQVRHSFIDLKKGKRTQSNDTSLDSGVDMNELHSSRKLEREKTFIKSMHQPKILYLEDLDLSSSESGTTVCSPEDPALRHILDGGSGVIMEHPGEESPGRKSTVEDFEANTSPTKRRGRPPLAKRDSKTNIWKKREERPLIPIN

SEQ ID NO: 5023 - protein, 238 aa, Homo sapiens
MARLCRRVPCTLLLGLAVVLLKARLVPAAARAELSRSDLSLIQQQQQQQQQQQQQQKQLEEAEEERTEVPGATSTLTVPVSVFMLKVQVNDIISRQYLSQAVVEVFVNYTKTNSTVTKSNGAVLIKVPYKLGLSLTIIAYKDGYVLTPLPWKTRRMPIYSSVTLSLFPQSQANIWLFEDTVLITGKLADAKSQPSVQFSKALIKLPDNHHISNVTGYLTVLQQFLKVDNFLHTTGITQ

SEQ ID NO: 5024 - protein, 306 aa, Homo sapiens
MKKDEPPLDFPDTLEGFEYAFNEKGQLRHIKTGEPFVFNYREDLHRWNQKRYEALGEIITKYVYELLEKDCNLKKVSIPEGYGVIVLNPNENYIEVEKPKIHVQSSSDSSDEPAEKRERKDKVSKETKKRRDFYEKYRNPQREKEMMQLYIRENGSPEEHAIYVWDHFIAQAAAENVFFVAHSYGGLAFVELMIQREADVKNKVTAVALTDSVHNVWHQEAGKTIREWMRENCCNWVSSSEPLDTSVESMLPDCPRVSAGTDRHELTSWKSFPSIFKFFTEASEAKTSSLKPAVTRRSHRIKHEEL

SEQ ID NO: 5025 - protein, 370 aa, Homo sapiens
MKKDEPPLDFPDTLEGFEYAFNEKGQLRHIKTGEPFVFNYREDLHRWNQKRYEALGEIITKYVYELLEKDCNLKKVSIPVDATESEPKSFIFMSEDALTNPQKLMVLIHGSGVVRAGQWARRLIINEDLDSGTQIPFIKRAVAEGYGVIVLNPNENYIEVEKPKIHVQSSSDSSDEPAEKRERKDKVSKETKKRRDFYEKYRNPQREKEMMQLYIRENGSPEEHAIYVWDHFIAQAAAENVFFVAHSYGGLAFVELMIQREADVKNKVTAVALTDSVHNVWHQEAGKTIREWMRENCCNWVSSSEPLDTSVESMLPDCPRVSAGTDRHELTSWKSFPSIFKFFTEASEAKTSSLKPAVTRRSHRIKHEEL

SEQ ID NO: 5026 - protein, 269 aa, Homo sapiens
MNRLLIFLIPWKDLNMLLMKIITKYVYELLEKDCNLKKVSIPEGYGVIVLNPNENYIEVEKPKIHVQSSSDSSDEPAEKRERKDKVSKETKKRRDFYEKYRNPQREKEMMQLYIRENGSPEEHAIYVWDHFIAQAAAENVFFVAHSYGGLAFVELMIQREADVKNKVTAVALTDSVHNVWHQEAGKTIREWMRENCCNWVSSSEPLDTSVESMLPDCPRVSAGTDRHELTSWKSFPSIFKFFTEASEAKTSSLKPAVTRRSHRIKHEEL

SEQ ID NO: 5027 - protein, 305 aa, Homo sapiens
MNRLLIFLIPWKDLNMLLMKIITKYVYELLEKDCNLKKVSIPVDATESEPKSFIFMSEDALTNPQKLMVLIHGSGVVRAGQWARRLIINEDLDSGTQIPFIKRAVAEGYGVIVLNPNENYIEVEKPKIHVQSSSDSSDEPAEKRERKDKVSKETKKRRDFYEKYRNPQREKEMMQLYIRENGSPEEHAIYVWDHFIAQAAAENVFFVAHSYGGLAFVELMIQREADVKNKVTAVALTDSVHNVWHQEAGKTIREWMRENCCNWVSSSEPLDTSVESMLPDCPRVSAGFSCCQMQSHEDLLLCFLL

SEQ ID NO: 5028 - protein, 416 aa, Homo sapiens
MSISLSSLILLPIWINMAQIQQGGPDEKEKTTALKDLLSRIDLDELMKKDEPPLDFPDTLEGFEYAFNEKGQLRHIKTGEPFVFNYREDLHRWNQKRYEALGEIITKYVYELLEKDCNLKKVSIPVDATESEPKSFIFMSEDALTNPQKLMVLIHGSGVVRAGQWARRLIINEDLDSGTQIPFIKRAVAEGYGVIVLNPNENYIEVEKPKIHVQSSSDSSDEPAEKRERKDKVSKETKKRRDFYEKYRNPQREKEMMQLYIRENGSPEEHAIYVWDHFIAQAAAENVFFVAHSYGGLAFVELMIQREADVKNKVTAVALTDSVHNVWHQEAGKTIREWMRENCCNWVSSSEPLDTSVESMLPDCPRVSAGTDRHELTSWKSFPSIFKFFTEASEAKTSSLKPAVTRRSHRIKHEEL

SEQ ID NO: 5029 - protein, 36 aa, Homo sapiens
AAAAAFGESAGQVGGAAEADVRGAEPPPCLLRGPLF

SEQ ID NO: 5030 - protein, 76 aa, Homo sapiens
MDQEPVGGVERGEAVAASGAAAAAAFGESAGQMSNERGFENVELGVIGKKKKVPRRVIHFVSGETMEEYSTDEDEV

SEQ ID NO: 5031 - protein, 213 aa, Homo sapiens
MDQEPVGGVERGEAVAASGAAAAAAFGESAGQMSNERGFENVELGVIGKKKKVPRRVIHFVSGETMEEYSTDEDEVDGLEKKDVLPTVDPTKLTWGPYLWFYMLRAATSTLSVCDFLGEKIASVLGISTPKYQYAIDEYYRMKKEEEEEEEENRMSEEAEKQYQQNKLQTDSIVQTDQPETVISSSFVNVNFEMEGDSEVIMESKQNPVSVPP

SEQ ID NO: 5032 - protein, 213 aa, Homo sapiens; identical to SEQ ID NO: 5031

SEQ ID NO: 5033 - protein, 236 aa, Homo sapiens
MEVGLPAITLFLTSASSPVVATTMDQEPVGGVERGEAVAASGAAAAAAFGESAGQMSNERGFENVELGVIGKKKKVPRRVIHFVSGETMEEYSTDEDEVDGLEKKDVLPTVDPTKLTWGPYLWFYMLRAATSTLSVCDFLGEKIASVLGISTPKYQYAIDEYYRMKKEEEEEEEENRMSEEAEKQYQQNKLQTDSIVQTDQPETVISSSFVNVNFEMEGDSEVIMESKQNPVSVPP

SEQ ID NO: 5034 - protein, 89 aa, Homo sapiens
MEVGLPAITLFLTSASSPVVATTMDQEPVGGVERGEAVAASGAAAAAAFGESAGQNLTLLPRLKFMARSRLAATSTSRVQAILLPQPPV

SEQ ID NO: 5035 - protein, 140 aa, Homo sapiens
MSNERGFENVELGVIGKKKKVPRRVIHFVSGETMEEYSTDEDEVDGLEKKDVLPTVDPTKLTWGPYLWFYMLRAATSTLSVCDFLGEKIASVLGISTPKYQYAIDEYYRMKKEEEEEEEENRMSEEAEKQYQQNKLQTDS

SEQ ID NO: 5036 - protein, 39 aa, Homo sapiens
  SITE 1: note = misc_feature - Xaa can be any naturally occurring amino acid
XAFGESAGQEIKGSKKLSHGPKGNVDVRTAIAKFYLKDE

SEQ ID NO: 5037 - protein, 7 aa, Homo sapiens
  SITE 1: note = misc_feature - Xaa can be any naturally occurring amino acid
XLRGPLF

SEQ ID NO: 5038 - protein, 49 aa, Homo sapiens
  SITE 1: note = misc_feature - Xaa can be any naturally occurring amino acid
XNKLQTDSIVQTDQPETVISSSFVNVNFEMEGDSEVIMESKQNPVSVPP

SEQ ID NO: 5039 - protein, 173 aa, Homo sapiens
MHWKMLLLLLLYYNAEASMCHRWSRAVLFPAAHRPKRSSSLPLNPVLQTSLEEVELLYEFLLAELEISPDLQISIKDEELASLRKASDFRTVCNNVIPKSIPDIRRLSASLSSHPGILKKEDFERTVLTLAYTAYRTALSHGHQKDIWAQSLVSLFQALRHDLMRSSQPGVPP

SEQ ID NO: 5040 - protein, 173 aa, Homo sapiens; identical to SEQ ID NO: 5039

SEQ ID NO: 5041 - protein, 173 aa, Homo sapiens; identical to SEQ ID NO: 5039

SEQ ID NO: 5042 - protein, 78 aa, Homo sapiens
MLLSAVCVMLNLAGSILSCQNAQLVNSLEGCQLIKFDSVEVCVCCELQHQSSGCSNLGETLKLNPLQENCNAVRLTLK

SEQ ID NO: 5043 - protein, 539 aa, Homo sapiens
MPPAGGPRAPRPAALPRSLSRLRECPGRSRIVLALGATQMALGCLIVAVSFAALALTTSARVRHSCPFWAGFSVLLSGLIGVVSWKRPLSLVITFFMLLSAVCVMLNLAGSILSCQNAQLVNSLEGCQLIKFDSVEVCVCCELQHQSSGCSNLGETLKLNPLQENCNAVRLTLKDLLFSVCALNVLSTIVCALATAMCCMQMVSSDVLQMFLPQRSHPANPTCVTPHGTVLHQTLDFDEFIPPLPPPPYYPPEYTCTPSTEAQRGLHLDFAPSPFGTLYDVAINSPGLLYPAELPPPYEAVVGQPPASQVTSIGQQVAESSSGDPNTSAGFSTPVPADSTSLLVSEGTATPGSSPSPDGPVGAPAPSEPALPPGHVSPEDPGMGSQVQPGPGRVSRSTSDPTLCTSSMAGDASSHRPSCSQDLEAGLSEAVPGSASMSRSATAACRAQLSPAGDPDTWKTDQRPTPEPFPATSKERPRSLVDSKAYADARVLVAKFLEHSHCALPTEAQHMVGAMRLAVTNEERLEEEAVFGADVLDQV

SEQ ID NO: 5044 - protein, 575 aa, Homo sapiens
MASWLRRKLRGKRRPVIAFCLLMILSAMAVTRFPPQRPSAGPDPGPMEPQGVTGAPATHIRQALSSSRRQRARNMGFWRSRALPRNSILVCAEEQGHRARVDRSRESPGGDLRHPGRVRRDITLSGHPRLSTQHVVLLREDEVGDPGTKDLGHPQHGSPIQETQSEVVTLVSPLPGSDMAALPAWRATSGLTLWPHTAEGRDLLGAENRALTGGQQAEDPTLASGAHQWPGSVEKLQGSVWCDAETLLSSSRTGGQAPPWLTDHDVQMLRLLAQGEVVDKARVPAHGQVLQVGFSTEAALQDLSSPRLSQLCSQGLCGLIKRPGDLPEVLSFHVDRVLGLRRSLPAVARRFHSPLLPYRYTDGGARPVIWWAPDVQHLSDPDEDQNSLALGWLQYQALLAHSCNWPGQAPCPGIHHTEWARLALFDFLLQVHDRLDRYCCGFEPEPSDPCVEERLREKCQNPAELRLVHILVRSSDPSHLVYIDNAGNLQHPEDKLNFRLLEGIDGFPESAVKVLASGCLQNMLLKSLQMDPVFWESQGGAQGLKQVLQTLEQRGQVLLGHIQKHNLTLFRDEDP

SEQ ID NO: 5045 - protein, 575 aa, Homo sapiens; identical to SEQ ID NO: 5044

SEQ ID NO: 5046 - protein, 140 aa, Homo sapiens
MVHDRLDRYCCGFEPEPSDPCVEERLREKCQNPAELRLVHILVRSSDPSHLVYIDNAGNLQHPEDKLNFRLLEGIDGFPESAVKVLASGCLQNMLLKSLQMDPVFWESQGGAQGLKQVLQTLEQRGQVLLGHIQKHNLTL

SEQ ID NO: 5047 - protein, 133 aa, Homo sapiens [sequence omitted]

SEQ ID NO: 5048 - protein, 133 aa, Homo sapiens [sequence omitted]

SEQ ID NO: 5049 - protein, 52 aa, Homo sapiens [sequence omitted]

SEQ ID NO: 5050 - protein, 87 aa, Homo sapiens
MMSKRYLQKATKGKLLIIIFIVTLWGKVVSSANHHKAHHVKTGTCEVVALHRCCNKNKIEERSQTVKCSCFPGQVAGTTRAAPSCVD

SEQ ID NO: 5051 - protein, 110 aa, Homo sapiens
MMSKRYLQKATKGKLLIIIFIVTLWGKVVSSANHHKAHHVKTGTCEVVALHRCCNKNKIEERSQTVKCSCFPGQVAGTTRAAPSCVDASIVEQKWWCHMQPCLEGEECKV

SEQ ID NO: 5052 - protein, 34 aa, Homo sapiens
MQPCLEGEECKVLPDRKGWSCSSGNKVKTTRVTH

SEQ ID NO: 5053 - protein, 131 aa, Homo sapiens
MSKRYLQKATKGKLLIIIFIVTLWGKVVSSANHHKAHHVKTGTCEVVALHRCCNKNKIEERSQTVKCSCFPGQVAGTTRAAPSCVDASIVEQKWWCHMQPCLEGEECKVLPDRKGWSCSSGNKVKTTRANV

SEQ ID NO: 5054 - protein, 131 aa, Homo sapiens
MSKRYLQKATKGKLLIIIFIVTLWGKVVSSANHHKAHHVKTGTCEVVALHRCCNKNKIEERSQTVKCSCFPGQVAGTTRAAPSCVDASIVEQKWWCHMQPCLEGEECKVLPDRKGWSCSSGNKVKTTRVTH

SEQ ID NO: 5055 - protein, 131 aa, Homo sapiens; identical to SEQ ID NO: 5054

SEQ ID NO: 5056 - protein, 49 aa, Homo sapiens
MSKRYLQKATKGKLLIIIFIVTLWGKVVSSANHHKGNPLTQEKSSDPQG

SEQ ID NO: 5057 - protein, 101 aa, Homo sapiens
MVTPITRMSKRYLQKATKGKLLIIIFIVTLWGKVVSSANHHKAHHVKTGTCEVVALHRCCNKNKIEERSQTVKCSCFPGQVAGTTRAAPSCVDASIVEQKW

SEQ ID NO: 5058 - protein, 133 aa, Homo sapiens
MSERVERNWSTGGWLLALCLAWLWTHLTLAALQPPTATVLVQQGTCEVIAAHRCCNRNRIEERSQTVKCSCFSGQVAGTTRAKPSCVDASIVLQRWWCQMEPCLPGEECKVLPDLSGWSCSSGHKVKTTKVTR

SEQ ID NO: 5059 - protein, 169 aa, Homo sapiens
MSERVERNWSTGGWLLALCLAWLWTHLTLAALQPPTATVLVQQGTCEVIAAHRCCNRNRIEERSQTVKCSCFSGQVAGTTRAKPSCVDDLLLAAHCARRDPRAALRLLLPQPPSSCRDGGVRWSPACRGRSVRCSRTCRDGAAAVDTKSKPPRSHDSSWGSRPGQERLD

SEQ ID NO: 5060 - protein, 58 aa, Homo sapiens
MRSPRMRVCAKSVLLSHWLFLAYVLMVCCKLMSASSQHLRGHAGHHQIKQGTCEVVAV

SEQ ID NO: 5061 - protein, 77 aa, Homo sapiens
MRSPRMRVCAKSVLLSHWLFLAYVLMVCCKLMSASSQHLRGHAGHHQIKQGTCEVVAVHRCCNKNRIEERSQTVKCS

SEQ ID NO: 5062 - protein, 140 aa, Homo sapiens
MRSPRMRVCAKSVLLSHWLFLAYVLMVCCKLMSASSQHLRGHAGHHQIKQGTCEVVAVHRCCNKNRIEERSQTVKCSCFPGQVAGTTRAQPSCVEASIVIQKWWCHMNPCLEGEDCKVLPDYSGWSCSSGNKVKTTKVTR

SEQ ID NO: 5063 - protein, 181 aa, Homo sapiens
MAPSPRTGSRQDATALPSMSSTFWAFMILASLLIAYCSQLAAGTCEIVTLDRDSSQPRRTIARQTARCACRKGQIAGTTRARPACVDARIIKTKQWCDMLPCLEGEGCDLLINRSGWTCTQPGGRIKTTTSPSKPPKRAPPGIPSCRQRAGGSLGSRDLRTSLLCQGSHLADRRRWLRPSQ

SEQ ID NO: 5064 - protein, 132 aa, Homo sapiens
MAPSPRTGSRQDATALPSMSSTFWAFMILASLLIAYCSQLAAGTCEIVTLDRDSSQPRRTIARQTARCACRKGQIAGTTRARPACVDARIIKTKQWCDMLPCLEGEGCDLLINRSGWTCTQPGGRIKTTTVS

SEQ ID NO: 5065 - protein, 125 aa, Homo sapiens
MQLLKALWALAGAALCCFLVLVIHAQFLKEGQLAAGTCEIVTLDRDSSQPRRTIARQTARCACRKGQIAGTTRARPACVDARIIKTKQWCDMLPCLEGEGCDLLINRSGWTCTQPGGRIKTTTVS

SEQ ID NO: 5066 - protein, 53 aa, Homo sapiens
MYHHREWPARIIKTKQWCDMLPCLEGEGCDLLINRSGWTCTQPGGRIKTTTVS

SEQ ID NO: 5067 - protein, 145 aa, Homo sapiens
MFTSPSEGKPGNMDRHHYEMFTKFGDDGFLIHLDNARGFGRHSHDEISILSPLSQCCMIKKKTLLHLQLLAQADYRLSDVMRESLLEDQLSPVLTEPHLLALDRRLQTILRTVEGCIVAHGQQSVIVDGPVEQLAPDSGQANLTS

SEQ ID NO: 5068 - protein, 541 aa, Homo sapiens
MPGLRRDRLLTLLLLGALLSADLYFHLWPQVQRQLRPRERPRGCPCTGRASSLARDSAAAASDPGTIVHNFSRTEPRTEPAGGSHSGSSSKLQALFAHPLYNVPEEPPLLGAEDSLLASQEALRYYRRKVARWNRRHKMYREQMNLTSLDPPLQLRLEASWVQFHLGINRHGLYSRSSPVVSKLLQDMRHFPTISADYSQDEKALLGACDCTQIVKPSGVHLKLVLRFSDFGKAMFKPMRQQRDEETPVDFFYFIDFQRHNAEIAAFHLDRILDFRRVPPTVGRIVNVTKEILEVTKNEILQSVFFVSPASNVCFFAKCPYMCKTEYAVCGNPHLLEGSLSAFLPSLNLAPRLSVPNPWIRSYTLAGKEEWEVNPLYCDTVKQIYPYNNSQRLLNVIDMAIFDFLIGNMDRHHYEMFTKFGDDGFLIHLDNARGFGRHSHDEISILSPLSQCCMIKKKTLLHLQLLAQADYRLSDVMRESLLEDQLSPVLTEPHLLALDRRLQTILRTVEGCIVAHGQQSVIVDGPVEQLAPDSGQANLTS

SEQ ID NO: 5069 - protein, 21 aa, Homo sapiens
QRHNAEIAAFHLDREYGPAPL

SEQ ID NO: 5070 - protein, 127 aa, Homo sapiens
  SITE 1: note = misc_feature - Xaa can be any naturally occurring amino acid
XFHLWPQVQRQLRPRERPRGCPCTGRASSLARDSAAAASDPGTIVHNFSRTEPRTEPAGGSHSGSSSKLQALFAHPLYNVPEEPPLLGAEDSLLASQEALRYYRRKVARWNRPQFLLLKGRGGVCDP

SEQ ID NO: 5071 - protein, 584 aa, Homo sapiens
MKMMLVRRFRVLILMVFLVACALHIALDLLPRLERRGARPSGEPGCSCAQPAAEVAAPGWAQVRGRPGEPPAASSAAGDAGWPNKHTLRILQDFSSDPSSNLSSHSLEKLPPAAEPAERALRGRDPGALRPHDPAHRPLLRDPGPRRSESPPGPGGDASLLARLFEHPLYRVAVPPLTEEDVLFNVNSDTRLSPKAAENPDWPHAGAEGAEFLSPGEAAVDSYPNWLKFHIGINRYELYSRHNPAIEALLHDLSSQRITSVAMKSGGTQLKLIMTFQNYGQALFKPMKQTREQETPPDFFYFSDYERHNAEIAAFHLDRILDFRRVPPVAGRMVNMTKEIRDVTRDKKLWRTFFISPANNICFYGECSYYCSTEHALCGKPDQIEGSLAAFLPDLSLAKRKTWRNPWRRSYHKRKKAEWEVDPDYCEEVKQTPPYDSSHRILDVMDMTIFDFLMGNMDRHHYETFEKFGNETFIIHLDNGRGFGKYSHDELSILVPLQQCCRIRKSTYLRLQLLAKEEYKLSLLMAESLRGDQVAPVLYQPHLEALDRRLRVVLKAVRDCVERNGLHSVVDDDLDTEHRAASAR

SEQ ID NO: 5072 - protein, 218 aa, Homo sapiens
MGMWSIGAGALGAAALALLLANTDVFLSKPQKAALEYLEDIDLKTLEKEPRTFKAKELWEKNGAVIMAVRRPGCFLCREEAADLSSLKSMLDQLGVPLYAVVKEHIRTEVKDFQPYFKGEIFLDEKKKFYGPQRRKMMFMGFIRLGVWYNFFRAWNGGFSGNLEGEGFILGGVFVVGSGKQGILLEHREKEFGDKVNLLSVLEAAKMIKPQTLASEKK

SEQ ID NO: 5073 - protein, 229 aa, Homo sapiens
MSFLQDPSFFTMGMWSIGAGALGAAALALLLANTDVFLSKPQKAALEYLEDIDLKTLEKEPRTFKAKELWEKNGAVIMAVRRPGCFLCREEAADLSSLKSMLDQLGVPLYAVVKEHIRTEVKDFQPYFKGEIFLDEKKKFYGPQRRKMMFMGFIRLGVWYNFFRAWNGGFSGNLEGEGFILGGVFVVGSGKQGILLEHREKEFGDKVNLLSVLEAAKMIKPQTLASEKK

SEQ ID NO: 5074 - protein, 229 aa, Homo sapiens; identical to SEQ ID NO: 5073

SEQ ID NO: 5075 - protein, 229 aa, Homo sapiens; identical to SEQ ID NO: 5073

SEQ ID NO: 5076 - protein, 229 aa, Homo sapiens; identical to SEQ ID NO: 5073

SEQ ID NO: 5077 - protein, 229 aa, Homo sapiens; identical to SEQ ID NO: 5073

SEQ ID NO: 5078 - protein, 425 aa, Homo sapiens
MMPSESGAERRDRAAAQVGTAAATAVATAAPAGGGPDPEALSAFPGRHLSGLSWPQVKRLDALLSEPIPIHGRGNFPTLSVQPRQIVQVVRSTLEEQGLHVHSVRLHGSAASHVLHPESGLGYKDLDLVFRVDLRSEASFQLTKAVVLACLLDFLPAGVSRAKITPLTLKEAYVQKLVKVCTDSDRWSLISLSNKSGKNVELKFVDSVRRQFEFSIDSFQIILDSLLLFGQCSSTPMSEAFHPTVTGESLYGDFTEALEHLRHRVIATRSPEEIRGGGLLKYCHLLVRGFRPRPSTDVRALQRYMCSRFFIDFPDLVEQRRTLERYLEAHFGGADAARRYACLVTLHRVVNESTVCLMNHERRQTLDLIAALALQALAEQGPAATAALAWRPPGTDGVVPATVNYYVTPVQPLLAHAYPTWLPCN

SEQ ID NO: 5079 - protein, 113 aa, Homo sapiens
MISTRYRRRRDAPRGPGRCPPHPTRPRGPGRKRGAAGSPGAAPSASRRPEFPKPLRVLPWRERGRGGREWPMSLRSPLPTSACGWGESGRRAGPGSLRSSDRTERARCSLRPR

SEQ ID NO: 5080 - protein, 225 aa, Homo sapiens
MLLTLAGGALFFPGLFALCTWALRRSQPGWSRTDCVMISTRLVSSVHAVLATGSGIVIIRSCDDVITGRHWLAREYVWFLIPYMIYDSYAMYLCEWCRTRDQNRAPSLTLRNFLSRNRLMITHHAVILFVLVPVAQLKQQHTLLYKVNGILTLATFLSCRILLFPFMYWSYGRQQGLSLLQVPFSIPFYCNVANAFLVAPQIYWFCLLCRKAVRLFDTPQAKKDG

SEQ ID NO: 5081 - protein, 257 aa, Homo sapiens
MLLTLAGGALFFPGLFALCTWALRRSQPGWSRTDCVMISTRLVSSVHAVLATGSGIVIIRSCDDVITGRHWLAREYVWFLIPYMIYDSYAMYLCEWCRTRDQNRAPSLTLRNFLSRNRLMITHHAVILFVLVPVAQRLRGDLGDFFVGCIFTAELSTPFVSLGRVLIQLKQQHTLLYKVNGILTLATFLSCRILLFPFMYWSYGRQQGLSLLQVPFSIPFYCNVANAFLVAPQIYWFCLLCRKAVRLFDTPQAKKDG

SEQ ID NO: 5082 - protein, 69 aa, Homo sapiens
MLLTLAGGALFFPGLFALCTWALRRSQPGWSRTDCVMISTRLVSSVHAVLATGSGIVIIRSCDDVITGS

SEQ ID NO: 5083 - protein, 149 aa, Homo sapiens
MLLTLAGGALFFPGLFALCTWALRRSQPGWSRTDCVMISTRYRRRRDAPRGPGRCPPHPTRPRGPGRKRGAAGSPGAAPSASRRPEFPKPLRVLPWRERGRGGREWPMSLRSPLPTSACGWGESGRRAGPGSLRSSDRTERARCSLRPR

SEQ ID NO: 5084 - protein, 38 aa, Homo sapiens
  SITE 1: note = misc_feature - Xaa can be any naturally occurring amino acid
XATGSGIVIIRSCDDVITGRGSGETLGTSLSAASSRQN

SEQ ID NO: 5085 - protein, 252 aa, Homo sapiens
GQGIAAALIHLPSTGNKHWRPRSPEASTDCCWLHQATGSGSVTQAGVQWYDLGSLQPLPPRFKRFSCLSLPSSWDYRSSWELPDLQEGKIQAISDSDGVNYPWYGNTTETCTIVGPTKRDSKFIISMNDNFYPSVTWAVPVSESNVAKLTNIYRDQSFTTWLVATNTSTNDMIILQTLHWRMQLSIEVNPNRPLGQRARLREPIAQDQPKILSKNEPIPPSALVKPNANDAQVLMWRPKYGQPLVVIPPKHR

SEQ ID NO: 5086 - protein, 283 aa, Homo sapiens
MPGFFCDCWPSLEIRALLYAMGCIQSIGGKARVFREGITVIDVKASIDPVPTSIDESSSVVLRYRTPHFRASAQVVMPPIPKKETWVVGWIQACSHMEFYNQYGEQGMSSWELPDLQEGKIQAISDSDGVNYPWYGNTTETCTIVGPTKRDSKFIISMNDNFYPSVTWAVPVSESNVAKLTNIYRDQSFTTWLVATNTSTNDMIILQTLHWRMQLSIEVNPNRPLGQRARLREPIAQDQPKILSKNEPIPPSALVKPNANDAQVLMWRPKYGQPLVVIPPKHR

SEQ ID NO: 5087 - protein, 280 aa, Homo sapiens
MTSYILISFVLLIGVGCIEKDQSCPVFGGRKRLHLLFVGGQLRQVRMLRGSPEASTDCCWLHQATGSGSVTQAGVQWYDLGSLQPLPPRFKRFSCLSLPSSWDYRSSWELPDLQEGKIQAISDSDGVNYPWYGNTTETCTIVGPTKRDSKFIISMNDNFYPSVTWAVPVSESNVAKLTNIYRDQSFTTWLVATNTSTNDMIILQTLHWRMQLSIEVNPNRPLGQRARLREPIAQDQPKILSKNEPIPPSALVKPNANDAQVLMWRPKYGQPLVVIPPKHR

SEQ ID NO: 5088 - protein, 160 aa, Homo sapiens
MQRVSGLLSWTLSRVLWLSGLSEPGAARQPRIMEEKALEVYDLIRTIRDPEKPNTLEELEVVSESCVEVQEINEEEYLVIIRFTPTVPHCSLATLIGLCLRVKLQRCLPFKHKLEIYISEGTHSTEEDINKQINDKERVAAAMENPNLREIVEQCVLEPD

SEQ ID NO: 5089 - protein, 130 aa, Homo sapiens
MQRVSGLLSWTLSRVLWLSGLSEPGAARQPRIMEEKALEVYDLIRTIRDPEKPNTLEELEVVSESCVEVQEINEEEYLVIIRFTPTVPHCSLATLIGLCLRVKLQRCLPFKHKLEIYISEGTHSTEEDSK

SEQ ID NO: 5090 - protein, 102 aa, Homo sapiens
MQRVSGLLSWTLSRVLWLSGLSEPGAARQPRIMEEKALEVYDLIRTIRDPEKPNTLEELEVVSESCVEVQEINEEEYLVIIRFTPTVPHCSLATLIVGNLHF

SEQ ID NO: 5091 - protein, 102 aa, Homo sapiens; identical to SEQ ID NO: 5090

SEQ ID NO: 5092 - protein, 69 aa, Homo sapiens
MQRVSGLLSWTLSRVLWLSGLSEPGAARQPRIMEEKALEVYGWNAMAGSRLTATSAFWFQVILLPQSPK

SEQ ID NO: 5093 - protein, 186 aa, Homo sapiens
MAAWGKKHAGKDPVRDECEERNRFTETREEDVTDEHGEREPFAETDEHTGANTKKPEDTAEDLTAKRKRMKMDKTCSKTKNKSKHALRKKQLKRQKRDYIHSLKLLNVLEEYITDEQKEEEEEEGEEEELIRIFQEQQKKWQQYRSVRRERLKEMKLLRDQFVKALEDFEDLCDRVFSDEDSELDN

SEQ ID NO: 5094 - protein, 186 aa, Homo sapiens; identical to SEQ ID NO: 5093

SEQ ID NO: 5095 - protein, 90 aa, Homo sapiens
MKAKKAHPRVEYNKTSGNAFEEQFSLPTKVRGSPLASQDNQPRILWAGGLPRPSWRLNLWRPGGRSMQERIQSVMNVRKETVLQKQGRKM

SEQ ID NO: 5096 - protein, 226 aa, Homo sapiens
MPGFLSFLSVSLRSPGSGIASSFPGQPATDPVGRRAAKAQLEAQFMAAWGKKHAGKDPVRDECEERNRFTETREEDVTDEHGEREPFAETDEHTGANTKKPEDTAVGANNFKNYPVHIGVSSEQHILLDCSLSRQKRDYIHSLKLLNVLEEYITDEQKEEEEEEGEEEELIRIFQEQQKKWQQYRSVRRERLKEMKLLRDQFVKALEDFEDLCDRVFSDEDSELDN

SEQ ID NO: 5097 - protein, 25 aa, Homo sapiens
KERCQYYTASFSDYAKYYALVCYGE

SEQ ID NO: 5098 - protein, 155 aa, Homo sapiens
MCIVLRPSRVHNSEENTMRALTLKDILNGTFSYKTFFPNWISGQEYLHQSADNNIVLYNIETGQSYTILSNRTMKSVNASNYGLSPDRQFVYLESDYSKLWRYSYTATYYIYDLSNGEFVRGNELPRPIQYLCWSPVGSKLAYVYQNNIYLKQRP

SEQ ID NO: 5099 - protein, 121 aa, Homo sapiens
MCIVLRPSRVHNSEENTMRALTLKDILNGTFSYKTFFPNWISGQEYLHQSADNNIVLYNIETGQSYTILSNRTMKSVNASNYGLSPDRQFVYLESDYSKLWRYSYTATYYIYDLSNGKWQL

SEQ ID NO: 5100 - protein, 760 aa, Homo sapiens
MKTWVKIVFGVATSAVLALLVMCIVLRPSRVHNSEENTMRALTLKDILNGTFSYKTFFPNWISGQEYLHQSADNNIVLYNIETGQSYTILSNRTMKSVNASNYGLSPDRQFVYLESDYSKLWRYSYTATYYIYDLSNGEFVRGNELPRPIQYLCWSPVGSKLAYVYQNNIYLKQRPGDPPFQITFNGRENKIFNGIPDWVYEEEMLATKYALWWSPNGKFLAYAEFNDTDIPVIAYSYYGDEQYPRTINIPYPKAGAKNPVVRIFIIDTTYPAYVGPQEVPVPAMIASSDYYFSWLTWVTDERVCLQWLKRVQNVSVLSICDFREDWQTWDCPKTQEHIEESRTGWAGGFFVSTPVFSYDAISYYKIFSDKDGYKHIHYIKDTVENAIQITSGKWEAINIFRVTQDSLFYSSNEFEEYPGRRNIYRISIGSYPPSKKCVTCHLRKERCQYYTASFSDYAKYYALVCYGPGIPISTLHDGRTDQEIKILEENKELENALKNIQLPKEEIKKLEVDEITLWYKMILPPQFDRSKKYPLLIQVYGGPCSQSVRSVFAVNWISYLASKEGMVIALVDGRGTAFQGDKLLYAVYRKLGVYEVEDQITAVRKFIEMGFIDEKRIAIWGWSYGGYVSSLALASGTGLFKCGIAVAPVSSWEYYASVYTERFMGLPTKDDNLEHYKNSTVMARAEYFRNVDYLLIHGTADDNVHFQNSAQIAKALVNAQVDFQAMWYSDQNHGLSGLSTNHLYTHMTHFLKQCFSLSD

SEQ ID NO: 5101 - protein, 735 aa, Homo sapiens
MKTWVKIVFGVATSAVLALLVMCIVLRPSRVHNSEENTMRALTLKDILNGTFSYKTFFPNWISGQEYLHQSADNNIVLYNIETGQSYTILSNRTMLWRYSYTATYYIYDLSNGEFVRGNELPRPIQYLCWSPVGSKLAYVYQNNIYLKQRPGDPPFQITFNGRENKIFNGIPDWVYEEEMLATKYALWWSPNGKFLAYAEFNDTDIPVIAYSYYGDEQYPRTINIPYPKAGAKNPVVRIFIIDTTYPAYVGPQEVPVPAMIASSDYYFSWLTWVTDERVCLQWLKRVQNVSVLSICDFREDWQTWDCPKTQEHIEESRTGWAGGFFVSTPVFSYDAISYYKIFSDKDGYKHIHYIKDTVENAIQITSGKWEAINIFRVTQDSLFYSSNEFEEYPGRRNIYRISIGSYPPSKKCVTCHLRKERCQYYTASFSDYAKYYALVCYGPGIPISTLHDGRTDQEIKILEENKELENALKNIQLPKEEIKKLEVDEITLWYKMILPPQFDRSKKYPLLIQVYGGPCSQSVRSVFAVNWISYLASKEGMVIALVDGRGTAFQGDKLLYAVYRKLGVYEVEDQITAVRKFIEMGFIDEKRIAIWGWSYGGYVSSLALASGTGLFKCGIAVAPVSSWEYYASVYTERFMGLPTKDDNLEHYKNSTVMARAEYFRNVDYLLIHGTADDNVHFQNSAQIAKALVNAQVDFQAMWYSDQNHGLSGLSTNHLYTHMTHFLKQCFSLSD

SEQ ID NO: 5102 - protein, 759 aa, Homo sapiens
MTWVKIVFGVATSAVLALLVMCIVLRPSRVHNSEENTMRALTLKDILNGTFSYKTFFPNWISGQEYLHQSADNNIVLYNIETGQSYTILSNRTMKSVNASNYGLSPDRQFVYLESDYSKLWRYSYTATYYIYDLSNGEFVRGNELPRPIQYLCWSPVGSKLAYVYQNNIYLKQRPGDPPFQITFNGRENKIFNGIPDWVYEEEMLATKYALWWSPNGKFLAYAEFNDTDIPVIAYSYYGDEQYPRTINIPYPKAGAKNPVVRIFIIDTTYPAYVGPQEVPVPAMIASSDYYFSWLTWVTDERVCLQWLKRVQNVSVLSICDFREDWQTWDCPKTQEHIEESRTGWAGGFFVSTPVFSYDAISYYKIFSDKDGYKHIHYIKDTVENAIQITSGKWEAINIFRVTQDSLFYSSNEFEEYPGRRNIYRISIGSYPPSKKCVTCHLRKERCQYYTASFSDYAKYYALVCYGPGIPISTLHDGRTDQEIKILEENKELENALKNIQLPKEEIKKLEVDEITLWYKMILPPQFDRSKKYPLLIQVYGGPCSQSVRSVFAVNWISYLASKEGMVIALVDGRGTAFQGDKLLYAVYRKLGVYEVEDQITAVRKFIEMGFIDEKRIAIWGWSYGGYVSSLALASGTGLFKCGIAVAPVSSWEYYASVYTERFMGLPTKDDNLEHYKNSTVMARAEYFRNVDYLLIHGTADDNVHFQNSAQIAKALVNAQVDFQAMWYSDQNHGLSGLSTNHLYTHMTHFLKQCFSLSD

SEQ ID NO: 5103 - protein, 47 aa, Homo sapiens
  SITE 1: note = misc_feature - Xaa can be any naturally occurring amino acid
XYTERFMGLPTKDDNLEHYKNSTVMARAEYFRNVDYLLIHGTADGEV

SEQ ID NO: 5104 - protein, 86 aa, Homo sapiens
MLGIWTLLPLVLTSVARLSSKSVNAQVTDINSKGLELRKTVTTVETQNLEGLHHDGQFCHKPCPPDVNMESSRNAHSPATPSAKRK

SEQ ID NO: 5105 - protein, 103 aa, Homo sapiens
MLGIWTLLPLVLTSVARLSSKSVNAQVTDINSKGLELRKTVTTVETQNLEGLHHDGQFCHKPCPPDVNMESSRNAHSPATPSAKRKDPDLTWGGFVFFFCQFH

SEQ ID NO: 5106 - protein, 132 aa, Homo sapiens
MLGIWTLLPLVLTSVARLSSKSVNAQVTDINSKGLELRKTVTTVETQNLEGLHHDGQFCHKPCPPGERKARDCTVNGDEPDCVPCQEGKEYTDKAHFSSKCRRCRLCDEGHDVNMESSRNAHSPATPSAKRK

SEQ ID NO: 5107 - protein, 149 aa, Homo sapiens
MLGIWTLLPLVLTSVARLSSKSVNAQVTDINSKGLELRKTVTTVETQNLEGLHHDGQFCHKPCPPGERKARDCTVNGDEPDCVPCQEGKEYTDKAHFSSKCRRCRLCDEGHDVNMESSRNAHSPATPSAKRKDPDLTWGGFVFFFCQFH

SEQ ID NO: 5108 - protein, 149 aa, Homo sapiens; identical to SEQ ID NO: 5107

SEQ ID NO: 5109 - protein, 335 aa, Homo sapiens
MLGIWTLLPLVLTSVARLSSKSVNAQVTDINSKGLELRKTVTTVETQNLEGLHHDGQFCHKPCPPGERKARDCTVNGDEPDCVPCQEGKEYTDKAHFSSKCRRCRLCDEGHGLEVEINCTRTQNTKCRCKPNFFCNSTVCEHCDPCTKCEHGIIKECTLTSNTKCKEEGSRSNLGWLCLLLLPIPLIVWVKRKEVQKTCRKHRKENQGSHESPTLNPETVAINLSDVDLSKYITTIAGVMTLSQVKGFVRKNGVNEAKIDEIKNDNVQDTAEQKVQLLRNWHQLHGKKEAYDTLIKDLKKANLCTLAEKIQTIILKDITSDSENSNFRNEIQSLV

SEQ ID NO: 5110 - protein, 233 aa, Homo sapiens [sequence omitted]

SEQ ID NO: 5111 - protein, 244 aa, Homo sapiens
MLGIWTLLPLVLTSVARLSSKSVNAQVTDINSKGLELRKTVTTVETQNLEGLHHDGQFCHKPCPPGERKARDCTVNGDEPDCVPCQEGKEYTDKAHFSSKCRRCRLCDEGHGLEVEINCTRTQNTKCRCKPNFFCNSTVCEHCDPCTKCEHGIIKECTLTSNTKCKEEGSRSNLGWLCLLLLPIPLIVWVKRKEVQKTCRKHRKENQGSHESPTLNPMESCSIAQAGVQGCNHGSLQPQSPGLK

SEQ ID NO: 5112 - protein, 220 aa, Homo sapiens
MLGIWTLLPLVLTSVARLSSKSVNAQVTDINSKGLELRKTVTTVETQNLEGLHHDGQFCHKPCPPGERKARDCTVNGDEPDCVPCQEGKEYTDKAHFSSKCRRCRLCDEGHGLEVEINCTRTQNTKCRCKPNFFCNSTVCEHCDPCTKCEHGIIKECTLTSNTKCKEEGSRSNLGWLCLLLLPIPLIVWVKRKEVQKTCRKHRKENQGSHESPTLNPMLT

SEQ ID NO: 5113 - protein, 314 aa, Homo sapiens
MLGIWTLLPLVLTSVARLSSKSVNAQVTDINSKGLELRKTVTTVETQNLEGLHHDGQFCHKPCPPGERKARDCTVNGDEPDCVPCQEGKEYTDKAHFSSKCRRCRLCDEGHGLEVEINCTRTQNTKCRCKPNFFCNSTVCEHCDPCTKCEHGIIKECTLTSNTKCKEEVKRKEVQKTCRKHRKENQGSHESPTLNPETVAINLSDVDLSKYITTIAGVMTLSQVKGFVRKNGVNEAKIDEIKNDNVQDTAEQKVQLLRNWHQLHGKKEAYDTLIKDLKKANLCTLAEKIQTIILKDITSDSENSNFRNEIQSLV

SEQ ID NO: 5114 - protein, 119 aa, Homo sapiens
LSKKPLEEKPSQPYSARESLSEVQSLSSFQSESCDDNASIVTVMHLVNAVVDTVSTEESLAAPDLSKPRGYHWDTSDWMPSVPLPDIQEFPNYEVIDEQTPLYSADPNAIDTDYYPGGY

SEQ ID NO: 5115 - protein, 4588 aa, Homo sapiens
MGRHLALLLLLLLLFQHFGDSDGSQRLEQTPLQFTHLEYNVTVQENSAAKTYVGHPVKMGVYITHPAWEVRYKIVSGDSENLFKAEEYILGDFCFLRIRTKGGNTAILNREVKDHYTLIVKALEKNTNVEARTKVRVQVLDTNDLRPLFSPTSYSVSLPENTAIRTSIARVSATDADIGTNGEFYYSFKDRTDMFAIHPTSGVIVLTGRLDYLETKLYEMEILAADRGMKLYGSSGISSMAKLTVHIEQANECAPVITAVTLSPSELDRDPAYAIVTVDDCDQGANGDIASLSIVAGDLLQQFRTVRSFPGSKEYKVKAIGGIDWDSHPFGYNLTLQAKDKGTPPQFSSVKVIHVTSPQFKAGPVKFEKDVYRAEISEFAPPNTPVVMVKAIPAYSHLRYVFKSTPGKAKFSLNYNTGLISILEPVKRQQAAHFELEVTTSDRKASTKVLVKVLGANSNPPEFTQTAYKAAFDENVPIGTTVMSLSAVDPDEGENGYVTYSIANLNHVPFAIDHFTGAVSTSENLDYELMPRVYTLRIRASDWGLPYRREVEVLATITLNNLNDNTPLFEKINCEGTIPRDLGVGEQITTVSAIDADELQLVQYQIEAGNELDFFSLNPNSGVLSLKRSLMDGLGAKVSFHSLRITATDGENFATPLYINITVAASHKLVNLQCEETGVAKMLAEKLLQANKLHNQGEVEDIFFDSHSVNAHIPQFRSTLPTGIQVKENQPVGSSVIFMNSTDLDTGFNGKLVYAVSGGNEDSCFMIDMETGMLKILSPLDRETTDKYTLNITVYDLGIPQKAAWRLLHVVVVDANDNPPEFLQESYFVEVSEDKEVHSEIIQVEATDKDLGPNGHVTYSIVTDTDTFSIDSVTGVVNIARPLDRELQHEHSLKIEARDQAREEPQLFSTVVVKVSLEDVNDNPPTFIPPNYRVKVREDLPEGTVIMWLEAHDPDLGQSGQVRYSLLDHGEGNFDVDKLSGAVRIVQQLDFEKKQVYNLTVRAKDKGKPVSLSSTCYVEVEVVDVNENLHPPVFSSFVEKGTVKEDAPVGSLVMTVSAHDEDARRDGEIRYSIRDGSGVGVFKIGEETGVIETSDRLDRESTSHYWLTVFATDQGVVPLSSFIEIYIEVEDVNDNAPQTSEPVYYPEIMENSPKDVSVVQIEAFDPDSSSNDKLMYKITSGNPQGFFSIHPKTGLITTTSRKLDREQQDEHILEVTVTDNGSPPKSTIARVIVKILDENDNKPQFLQKFYKIRLPEREKPDRERNARREPLYHVIATDKDEGPNAEISYSIEDGNEHGKFFIEPKTGVVSSKRFSAAGEYDILSIKAVDNGRPQKSSTTRLHIEWISKPKPSLEPISFEESFFTFTVMESDPVAHMIGVISVEPPGIPLWFDITGGNYDSHFDVDKGTGTIIVAKPLDAEQKSNYNLTVEATDGTTTILTQVFIKVIDTNDHRPQFSTSKYEVVIPEDTAPETEILQISAVDQDEKNKLIYTLQSSRDPLSLKKFRLDPATGSLYTSEKLDHEAVHQHTLTVMVRDQDVPVKRNFARIVVNVSDTNDHAPWFTASSYKGRVYESAAVGSVVLQVTALDKDKGKNAEVLYSIESGNIGNSFMIDPVLGSIKTAKELDRSNQAEYDLMVKATDKGSPPMSEITSVRIFVTIADNASPKFTSKEYSVELSETVSIGSFVGMVTAHSQSSVVYEIKDGNTGDAFDINPHSGTIITQKALDFETLPIYTLIIQGTNMAGLSTNTTVLVHLQDENDNAPVFMQAEYTGLISESASINSVVLTDRNVPLVIRAADADKDSNALLVYHIVEPSVHTYFAIDSSTGAIHTVLSLDYEETSIFHFTVQVHDMGTPRLFAEYAANVTVHVIDINDCPPVFAKPLYEASLLLPTYKGVKVITVNATDADSSAFSQLIYSITEGNIGEKFSMDYKTGALTVQNTTQLRSRYELTVRASDGRFAGLTSVKINVKESKESHLKFTQDVYSAVVKENSTEAETLAVITAIGNPINEPLFYHILNPDRRFKISRTSGVLSTTGTPFDREQQEAFDVVVEVTEEHKPSAVAHVVVKVIVEDQNDNAPVFVNLPYYAVVKVDTEVGHVIRYVTAVDRDSGRNGEVHYYLKEHHEHFQIGPLGEISLKKQFELDTLNKEYLVTVVAKDGGNPAFSAEVIVPITVMNKAMPVFEKPFYSAEIAESIQVHSPVVHVQANSPEGLKVFYSITDGDPFSQFTINFNTGVINVIAPLDFEAHPAYKLSIRATDSLTGAHAEVFVDIIVDDINDNPPVFAQQSYAVTLSEASVIGTSVVQVRATDSDSEPNRGISYQMFGNHSKSHDHFHVDSSTGLISLLRTLDYEQSRQHTIFVRAVDGGMPTLSSDVIVTVDVTDLNDNPPLFEQQIYEARISEHAPHGHFVTCVKAYDADSSDIDKLQYSILSGNDHKHFVIDSATGIITLSNLHRHALKPFYSLNLSVSDGVFRSSTQVHVTVIGGNLHSPAFLQNEYEVELAENAPLHTLVMEVKTTDGDSGIYGHVTYHIVNDFAKDRFYINERGQIFTLEKLDRETPAEKVISVRLMAKDAGGKVAFCTVNVILTDDNDNAPQFRATKYEVNIGSSAAKGTSVVKVLASDADEGSNADITYAIEADSESVKENLEINKLSGVITTKESLIGLENEFFTFFVRAVDNGSPSKESVVLVYVKILPPEMQLPKFSEPFYTFTVSEDVPIGTEIDLIRAEHSGTVLYSLVKGNTPESNRDESFVIDRQSGRLKLEKSLDHETTKWYQFSILARCTQDDHEMVASVDVSIQVKDANDNSPVFESSPYEAFIVENLPGGSRVIQIRASDADSGTNGQVMYSLDQSQSVEVIESFAINMETGWITTLKELDHEKRDNYQIKVVASDHGEKIQLSSTAIVDVTVTDVNDSPPRFTAEIYKGTVSEDDPQGGVIAILSTTDADSEEINRQVTYFITGGDPLGQFAVETIQNEWKVYVKKPLDREKRDNYLLTITATDGTFSSKAIVEVKVLDANDNSPVCEKTLYSDTIPEDVLPGKLIMQISATDADIRSNAEITYTLLGSGAEKFKLNPDTGELKTSTPLDREEQAVYHLLVRATDGGGRFCQASIVLTLEDVNDNAPEFSADPYAITVFENTEPGTLLTRVQATDADAGLNRKILYSLIDSADGQFSINELSGIIQLEKPLDRELQAVYTLSLKAVDQGLPRRLTATGTVIVSVLDINDNPPVFEYREYGATVSEDILVGTEVLQVYAASRDIEANAEITYSIISGNEHGKFSIDSKTGAVFIIENLDYESSHEYYLTVEATDGGTPSLSDVATVNVNVTDINDNTPVFSQDTYTTVISEDAVLEQSVITVMADDADGPSNSHIHYSIIDGNQGSSFTIDPVRGEVKVTKLLDRETISGYTLTVQASDNGSPPRVNTTTVNIDVSDVNDNAPVFSRGNYSVIIQENKPVGFSVLQLVVTDEDSSHNGPPFFFTIVTGNDEKAFEVNPQGVLLTSSAIKRKEKDHYLLQVKVADNGKPQLSSLTYIDIRVIEESIYPPAILPLEIFITSSGEEYSGGVIGKIHATDQDVYDTLTYSLDPQMDNLFSVSSTGGKLIAHKKLDIGQYLLNVSVTDGKFTTVADITVHIRQVTQEMLNHTIAIRFANLTPEEFVGDYWRNFQRALRNILGVRRNDIQIVSLQSSEPHPHLDVLLFVEKPGSAQISTKQLLHKINSSVTDIEEIIGVRILNVFQKLCAGLDCPWKFCDEKVSVDESVMSTHSTARLSFVTPRHHRAAVCLCKEGRCPPVHHGCEDDPCPEGSECVSDPWEEKHTCVCPSGRFGQCPGSSSMTLTGNSYVKYRLTENENKLEMKLTMRLRTYSTHAVVMYARGTDYSILEIHHGRLQYKFDCGSGPGIVSVQSIQVNDGQWHAVALEVNGNYARLVLDQVHTASGTAPGTLKTLNLDNYVFFGGHIRQQGTRHGRSPQVGNGFRGCMDSIYLNGQELPLNSKPRSYAHIEESVDVSPGCFLTATEDCASNPCQNGGVCNPSPAGGYYCKCSALYIGTHCEISVNPCSSKPCLYGGTCVVDNGGFVCQCRGLYTGQRCQLSPYCKDEPCKNGGTCFDSLDGAVCQCDSGFRGERCQSDIDECSGNPCLHGALCENTHGSYHCNCSHEYRGRHCEDAAPNQYVSTPWNIGLAEGIGIVVFVAGIFLLVVVFVLCRKMISRKKKHQAEPKDKHLGPATAFLQRPYFDSKLNKNIYSDIPPQVPVRPISYTPSIPSDSRNNLDRNSFEGSAIPEHPEFSTFNPESVHGHRKAVAVCSVAPNLPPPPPSNSPSDSDSIQKPSWDFDYDTKVVDLDPCLSKKPLEEKPSQPYSARESLSEVQSLSSFQSESCDDNGYHWDTSDWMPSVPLPDIQEFPNYEVIDEQTPLYSADPNAIDTDYYPGGYDIESDFPPPPEDFPAADELPPLPPEFSNQFESIHPPRDMPAAGSLGSSSRNRQRFNLNQYLPNFYPLDMSEPQTKGTGENSTCREPHAPYPPGYQRHFEAPAVESMPMSVYASTASCSDVSACCEVESEVMMSDYESGDDGHFEEVTIPPLDSQQHTEV

SEQ ID NO: 5116 - protein, 488 aa, Homo sapiens
MGRHLALLLLLLLLFQHFGDSDGSQRLEQTPLQFTHLEYNVTVQENSAAKTYVGHPVKMGVYITHPAWEVRYKIVSGDSENLFKAEEYILGDFCFLRIRTKGGNTAILNREVKDHYTLIVKALEKNTNVEARTKVRVQVLDTNDLRPLFSPTSYSVSLPENTAIRTSIARVSATDADIGTNGEFYYSFKDRTDMFAIHPTSGVIVLTGRLDYLETKLYEMEILAADRGMKLYGSSGISSMAKLTVHIEQANECAPVITAVTLSPSELDRDPAYAIVTVDDCDQGANGDIASLSIVAGDLLQQFRTVRSFPGSKEYKVKAIGGIDWDSHPFGYNLTLQAKDKGTPPQFSSVKVIHVTSPQFKAGPVKFEKDVYRAEISEFAPPNTPVVMVKAIPAYSHLRYVFKSTPGKAKFSLNYNTGLISILEPVKRQQAAHFELEVTTSDRKASTKVLVKVLGANSNPPEFTQTAYKAAFDENVPIGTTVMSLSAV

SEQ ID NO: 5117 - protein, 4590 aa, Homo sapiens
MGRHLALLLLLLLLFQHFGDSDGSQRLEQTPLQFTHLEYNVTVQENSAAKTYVGHPVKMGVYITHPAWEVRYKIVSGDSENLFKAEEYILGDFCFLRIRTKGGNTAILNREVKDHYTLIVKALEKNTNVEARTKVRVQVLDTNDLRPLFSPTSYSVSLPENTAIRTSIARVSATDADIGTNGEFYYSFKDRTDMFAIHPTSGVIVLTGRLDYLETKLYEMEILAADRGMKLYGSSGISSMAKLTVHIEQANECAPVITAVTLSPSELDRDPAYAIVTVDDCDQGANGDIASLSIVAGDLLQQFRTVRSFPGSKEYKVKAIGGIDWDSHPFGYNLTLQAKDKGTPPQFSSVKVIHVTSPQFKAGPVKFEKDVYRAEISEFAPPNTPVVMVKAIPAYSHLRYVFKSTPGKAKFSLNYNTGLISILEPVKRQQAAHFELEVTTSDRKASTKVLVKVLGANSNPPEFTQTAYKAAFDENVPIGTTVMSLSAVDPDEGENGYVTYSIANLNHVPFAIDHFTGAVSTSENLDYELMPRVYTLRIRASDWGLPYRREVEVLATITLNNLNDNTPLFEKINCEGTIPRDLGVGEQITTVSAIDADELQLVQYQIEAGNELDFFSLNPNSGVLSLKRSLMDGLGAKVSFHSLRITATDGENFATPLYINITVAASHKLVNLQCEETGVAKMLAEKLLQANKLHNQGEVEDIFFDSHSVNAHIPQFRSTLPTGIQVKENQPVGSSVIFMNSTDLDTGFNGKLVYAVSGGNEDSCFMIDMETGMLKILSPLDRETTDKYTLNITVYDLGIPQKAAWRLLHVVVVDANDNPPEFLQESYFVEVSEDKEVHSEIIQVEATDKDLGPNGHVTYSIVTDTDTFSIDSVTGVVNIARPLDRELQHEHSLKIEARDQAREEPQLFSTVVVKVSLEDVNDNPPTFIPPNYRVKVREDLPEGTVIMWLEAHDPDLGQSGQVRYSLLDHGEGNFDVDKLSGAVRIVQQLDFEKKQVYNLTVRAKDKGKPVSLSSTCYVEVEVVDVNENLHPPVFSSFVEKGTVKEDAPVGSLVMTVSAHDEDARRDGEIRYSIRDGSGVGVFKIGEETGVIETSDRLDRESTSHYWLTVFATDQGVVPLSSFIEIYIEVEDVNDNAPQTSEPVYYPEIMENSPKDVSVVQIEAFDPDSSSNDKLMYKITSGNPQGFFSIHPKTGLITTTSRKLDREQQDEHILEVTVTDNGSPPKSTIARVIVKILDENDNKPQFLQKFYKIRLPEREKPDRERNARREPLYHVIATDKDEGPNAEISYSIEDGNEHGKFFIEPKTGVVSSKRFSAAGEYDILSIKAVDNGRPQKSSTTRLHIEWISKPKPSLEPISFEESFFTFTVMESDPVAHMIGVISVEPPGIPLWFDITGGNYDSHFDVDKGTGTIIVAKPLDAEQKSNYNLTVEATDGTTTILTQVFIKVIDTNDHRPQFSTSKYEVVIPEDTAPETEILQISAVDQDEKNKLIYTLQSSRDPLSLKKFRLDPATGSLYTSEKLDHEAVPAHLTVMVRDQDVPVKRNFARIVVNVSDTNDHAPWFTASSYKGRVYESAAVGSVVLQVTALDKDKGKNAEVLYSIESGTFGNIGNSFMIDPVLGSIKTAKELDRSNQAEYDLMVKATDKGSPPMSEITSVRIFVTIADNASPKFTSKEYSVELSETVSIGSFVGMVTAHSQSSVVYEIKDGNTGDAFDINPHSGTIITQKALDFETLPIYTLIIQGTNMAGLSTNTTVLVHLQDENDNAPVFMQAEYTGLISESASINSVVLTDRNVPLVIRAADADKDSNALLVYHIVEPSVHTYFAIDSSTGAIHTVLSLDYEETSIFHFTVQVHDMGTPRLFAEYAANVTVHVIDINDCPPVFAKPLYEASLLLPTYKGVKVITVNATDADSSAFSQLIYSITEGNIGEKFSMDYKTGALTVQNTTQLRSRYELTVRASDGRFAGLTSVKINVKESKESHLKFTQDVYSAVVKENSTEAETLAVITAIGNPINEPLFYHILNPDRRFKISRTSGVLSTTGTPFDREQQEAFDVVVEVTEEHKPSAVAHVVVKVIVEDQNDNAPVFVNLPYYAVVKVDTEVGHVIRYVTAVDRDSGRNGEVHYYLKEHHEHFQIGPLGEISLKKQFELDTLNKEYLVTVVAKDGGNPAFSAEVIVPITVMNKAMPVFEKPFYSAEIAESIQVHSPVVHVQANSPEGLKVFYSITDGDPFSQFTINFNTGVINVIAPLDFEAHPAYKLSIRATDSLTGAHAEVFVDIIVDDINDNPPVFAQQSYAVTLSEASVIGTSVVQVRATDSDSEPNRGISYQMFGNHSKSHDHFHVDSSTGLISLLRTLDYEQSRQHTIFVRAVDGGMPTLSSDVIVTVDVTDLNDNPPLFEQQIYEARISEHAPHGHFVTCVKAYDADSSDIDKLQYSILSGNDHKHFVIDSATGIITLSNLHRHALKPFYSLNLSVSDGVFRSSTQVHVTVIGGNLHSPAFLQNEYEVELAENAPLHTLVMEVKTTDGDSGIYGHVTYHIVNDFAKDRFYINERGQIFTLEKLDRETPAEKVISVRLMAKDAGGKVAFCTVNVILTDDNDNAPQFRATKYEVNIGSSAAKGTSVVKVLASDADEGSNADITYAIEADSESVKENLEINKLSGVITTKESLIGLENEFFTFFVRAVDNGSPSKESVVLVYVKILPPEMQLPKFSEPFYTFTVSEDVPIGTEIDLIRAEHSGTVLYSLVKGNTPESNRDESFVIDRQSGRLKLEKSLDHETTKWYQFSILARCTQDDHEMVASVDVSIQVKDANDNSPVFESSPYEAFIVENLPGGSRVIQIRASDADSGTNGQVMYSLDQSQSVEVIESFAINMETGWITTLKELDHEKRDNYQIKVVASDHGEKIQLSSTAIVDVTVTDVNDSPPRFTAEIYKGTVSEDDPQGGVIAILSTTDADSEEINRQVTYFITGGDPLGQFAVETIQNEWKVYVKKPLDREKRDNYLLTITATDGTFSSKAIVEVKVLDANDNSPVCEKTLYSDTIPEDVLPGKLIMQISATDADIRSNAEITYTLLGSGAEKFKLNPDTGELKTSTPLDREEQAVYHLLVRATDGGGRFCQASIVLTLEDVNDNAPEFSADPYAITVFENTEPGTLLTRVQATDADAGLNRKILYSLIDSADGQFSINELSGIIQLEKPLDRELQAVYTLSLKAVDQGLPRRLTATGTVIVSVLDINDNPPVFEYREYGATVSEDILVGTEVLQVYAASRDIEANAEITYSIISGNEHGKFSIDSKTGAVFIIENLDYESSHEYYLTVEATDGGTPSLSDVATVNVNVTDINDNTPVFSQDTYTTVISEDAVLEQSVITVMADDADGPSNSHIHYSIIDGNQGSSFTIDPVRGEVKVTKLLDRETISGYTLTVQASDNGSPPRVNTTTVNIDVSDVNDNAPVFSRGNYSVIIQENKPVGFSVLQLVVTDEDSSHNGPPFFFTIVTGNDEKAFEVNPQGVLLTSSAIKRKEKDHYLLQVKVADNGKPQLSSLTYIDIRVIEESIYPPAILPLEIFITSSGEEYSGGVIGKIHATDQDVYDTLTYSLDPQMDNLFSVSSTGGKLIAHKKLDIGQYLLNVSVTDGKFTTVADITVHIRQVTQEMLNHTIAIRFANLTPEEFVGDYWRNFQRALRNILGVRRNDIQIVSLQSSEPHPHLDVLLFVEKPGSAQISTKQLLHKINSSVTDIEEIIGVRILNVFQKLCAGLDCPWKFCDEKVSVDESVMSTHSTARLSFVTPRHHRAAVCLCKEGRCPPVHHGCEDDPCPEGSECVSDPWEEKHTCVCPSGRFGQCPGSSSMTLTGNSYVKYRLTENENKLEMKLTMRLRTYSTHAVVMYARGTDYSILEIHHGRLQYKFDCGSGPGIVSVQSIQVNDGQWHAVALEVNGNYARLVLDQVHTASGTAPGTLKTLNLDNYVFFGGHIRQQGTRHGRSPQVGNGFRGCMDSIYLNGQELPLNSKPRSYAHIEESVDVSPGCFLTATEDCASNPCQNGGVCNPSPAGGYYCKCSALYIGTHCEISVNPCSSKPCLYGGTCVVDNGGFVCQCRGLYTGQRCQLSPYCKDEPCKNGGTCFDSLDGAVCQCDSGFRGERCQSDIDECSGNPCLHGALCENTHGSYHCNCSHEYRGRHCEDAAPNQYVSTPWNIGLAEGIGIVVFVAGIFLLVVVFVLCRKMISRKKKHQAEPKDKHLGPATAFLQRPYFDSKLNKNIYSDIPPQVPVRPISYTPSIPSDSRNNLDRNSFEGSAIPEHPEFSTFNPESVHGHRKAVAVCSVAPNLPPPPPSNSPSDSDSIQKPSWDFDYDTKVVDLDPCLSKKPLEEKPSQPYSARESLSEVQSLSSFQSESCDDNGYHWDTSDWMPSVPLPDIQEFPNYEVIDEQTPLYSADPNAIDTDYYPGGYDIESDFPPPPEDFPAADELPPLPPEFSNQFESIHPPRDMPAAGSLGSSSRNRQRFNLNQYLPNFYPLDMSEPQTKGTGENSTCREPHAPYPPGYQRHFEAPAVESMPMSVYASTASCSDVSACCEVESEVMMSDYESGDDGHFEEVTIPPLDSQQHTEV

SEQ ID NO: 5118 - protein, 52 aa, Homo sapiens
MTMAVIVRNKEKKVIFEFSGQISGSSFRSHFPPLPYSILFVVHTFLSHLELS

SEQ ID NO: 5119 - protein, 368 aa, Homo sapiens
  SITE 1: note = misc_feature - Xaa can be any naturally occurring amino acid
XDSKLNKNIYSDIPPQVPVRPISYTPSIPSDSRNNLDRNSFEGSAIPEHPEFSTFNPESVHGHRKAVAVCSVAPNLPPPPPSNSPSDSDSIQKPSWDFDYDTKVVDLDPCLSKKPLEEKPSQPYSARESLSEVQSLSSFQSESCDDNESLAAPDLSKPRGYHWDTSDWMPSVPLPDIQEFPNYEVIDEQTPLYSADPNAIDTDYYPGGYDIESDFPPPPEDFPAADELPPLPPEFSNQFESIHPPRDMPAAGSLGSSSRNRQRFNLNQYLPNFYPLDMSEPQTKGTGENSTCREPHAPYPPGYQRHFEAPAVESMPMSVYASTASCSDVSACCEVESEVMMSDYESGDDGHFEEVTIPPLDSQQHTEV

SEQ ID NO: 5120 - protein, 285 aa, Homo sapiens
  SITE 1: note = misc_feature - Xaa can be any naturally occurring amino acid
XSTTEALFASVEDYILVRGVSLVHTAKMNPVRMAEHALTVWMAPFVSVIRVLGEKGVRVISTSALETLACTGPSVRTRTAPITATAATSTGDVTARMLRPTTKVVDLDPCLSKKPLEEKPSQPYSARESLSEVQSLSSFQSESCDDNGYHWDTSDWMPSVPLPDIQEFPNYEVIDEQTPLYSADPNAIDTDYYPGGYDIESDFPPPPEDFPAADELPPLPPEFSNQFESIHPPRDMPAAGSLGSSSRNRQRFNLNQYLPNFYPLDMSEPQTKGTGENSTCREPHA

SEQ ID NO: 5121 - protein, 92 aa, Homo sapiens
ALLAAGGRGVPGPPPQLRVPTPSASRSLRVSEPRGLGVRALPCAAPPDCQRRGLGDAPLPHGQLRSSSPPRPGDLFQNRIPPPLKHTVLPQS

SEQ ID NO: 5122 - protein, 181 aa, Homo sapiens
CRMVQEQCCHSQLEELHCATGISLANEQDRCATPHGDNASLEATFVKRCCHCCLLGRAAQAQGQSCEYSLMVGYQCGQVFQACCVKSQETGDLDVGGLQETGGGPCKQQCRDTGDEVVCSCFVGYQLLSDGVSCEDVNECITGSHSCRLGESCINTVGSFRCQRDSSCGTGYELTEDNSCK

SEQ ID NO: 5123 - protein, 60 aa, Homo sapiens
DITEGNLRDSFDIIKRYMDGMTVAPLLNCHILKDLQSWEMKTVASAILDSDLYSEHFQSS

SEQ ID NO: 5124 - protein, 65 aa, Homo sapiens
MATHQKDCSLPYATESKECRMVQEQCCHSQLEELHCATGISLANEQDRCATPHGDNASLEATFVK

SEQ ID NO: 5125 - protein, 139 aa, Homo sapiens
MATHQKDCSLPYATESKECRMVQEQCCHSQLEELHCATGISLANEQDRCATPHGDNASLEATFVKRCCHCCLLGRAAQAQGQSCEYSLMVGYQCGQVFQACCVKSQETGDLDVGGLQETDKIIEVEEEQEDPYLNDRCR

SEQ ID NO: 5126 - protein, 721 aa, Homo sapiens
MERAAPSRRVPLPLLLLGGLALLAAGVDADVLLEACCADGHRMATHQKDCSLPYATESKECRAVGLASLCQDLNGAWAVWKVGRASQAEGTASARAQRRGMVQEQCCHSQLEELHCATGISLANEQDRCATPHGDNASLEATFVKRCCHCCLLGRAAQAQGQSCEYSLMVGYQCGQVFQACCVKSQETGDLDVGGLQETDKIIEVEEEQEDPYLNDRCRGGGPCKQQCRDTGDEVVCSCFVGYQLLSDGVSCEDVNECITGSHSCRLGESCINTVGSFRCQRDSSCGTGYELTEDNSCKDIDECESGIHNCLPDFICQNTLGSFRCRPKLQCKSGFIQDALGNCIDINECLSISAPCPIGHTCINTEGSYTCQKNVPNCGRGYHLNEEGTRCVDVDECAPPAEPCGKGHRCVNSPGSFRCECKTGYYFDGISRMCVDVNECQRYPGRLCGHKCENTLGSYLCSCSVGFRLSVDGRSCEDINECSSSPCSQECANVYGSYQCYCRRGYQLSDVDGVTCEDIDECALPTGGHICSYRCINIPGSFQCSCPSSGYRLAPNGRNCQDIDECVTGIHNCSINETCFNIQGGFRCLAFECPENYRRSAATRCERLPCHENRECSKLPLRITYYHLSFPTNIQAPAVVFRMGPSSAVPGDSMQLAITGGNEEGFFTTRKVSPHSGVVALTKPVPEPRDLLLTVKMDLSRHGTVSSFVAKLFIFVSAEL

SEQ ID NO: 5127 - protein, 683 aa, Homo sapiens
MERAAPSRRVPLPLLLLGGLALLAAGVDADVLLEACCADGHRMATHQKDCSLPYATESKECRMVQEQCCHSQLEELHCATGISLANEQDRCATPHGDNASLEATFVKRCCHCCLLGRAAQAQGQSCEYSLMVGYQCGQVFQACCVKSQETGDLDVGGLQETDKIIEVEEEQEDPYLNDRCRGGGPCKQQCRDTGDEVVCSCFVGYQLLSDGVSCEDVNECITGSHSCRLGESCINTVGSFRCQRDSSCGTGYELTEDNSCKDIDECESGIHNCLPDFICQNTLGSFRCRPKLQCKSGFIQDALGNCIDINECLSISAPCPIGHTCINTEGSYTCQKNVPNCGRGYHLNEEGTRCVDVDECAPPAEPCGKGHRCVNSPGSFRCECKTGYYFDGISRMCVDVNECQRYPGRLCGHKCENTLGSYLCSCSVGFRLSVDGRSCEDINECSSSPCSQECANVYGSYQCYCRRGYQLSDVDGVTCEDIDECALPTGGHICSYRCINIPGSFQCSCPSSGYRLAPNGRNCQDIDECVTGIHNCSINETCFNIQGGFRCLAFECPENYRRSAATRCERLPCHENRECSKLPLRITYYHLSFPTNIQAPAVVFRMGPSSAVPGDSMQLAITGGNEEGFFTTRKVSPHSGVVALTKPVPEPRDLLLTVKMDLSRHGTVSSFVAKLFIFVSAEL

SEQ ID NO: 5128 - protein, 703 aa, Homo sapiens
MERAAPSRRVPLPLLLLGGLALLAAGVDADVLLEACCADGHRMATHQKDCSLPYATESKECRMVQEQCCHSQLEELHCATGISLANEQDRCATPHGDNASLEATFVKRCCHCCLLGRAAQAQGQSCEYSLMVGYQCGQVFQACCVKSQETGDLDVGGLQETDKIIEVEEEQEDPYLNDRCRGGGPCKQQCRDTGDEVVCSCFVGYQLLSDGVSCEDVNECITGSHSCRLGESCINTVGSFRCQRDSSCGTGYELTEDNSCKDIDECESGIHNCLPDFICQNTLGSFRCRPKLQCKSGFIQDALGNCIDINECLSISAPCPIGHTCINTEGSYTCQKNVPNCGRGYHLNEEGTRCVDVDECAPPAEPCGKGHRCVNSPGSFRCECKTGYYFDGISRMCVDVNECQRYPGRLCGHKCENTLGSYLCSCSVGFRLSVDGRSCEDINECSSSPCSQECANVYGSYQCYCRRGYQLSDVDGVTCEDIDECALPTGGHICSYRCINIPGSFQCSCPSSGYRLAPNGRNCQDIDECVTGIHNCSINETCFNIQGGFRCLAFECPENYRRSAATLQQEKTDTVRCIKSCRPNDVTCVFDPVHTISHTVISLPTFREFTRPEEIIFLRAITPPHPASQANIIFDITEGNLRDSFDIIKRYMDGMTVGVVRQVRPIVGPFHAVLKLEMNYVVGGVVSHRNVVNVHIFVSEYWF

SEQ ID NO: 5129 - protein, 566 aa, Homo sapiens
MERAAPSRRVPLPLLLLGGLALLAAGVDADVLLEACCADGHRMATHQKDCSLPYATESKECRMVQEQCCHSQLEELHCATGISLANEQDRCATPHGDNASLEATFVKRCCHCCLLGRAAQAQGQSCEYSLMVGYQCGQVFQACCVKSQETGDLDVGGLQETDKIIEVEEEQEDPYLNDRCRGGGPCKQQCRDTGDEVVCSCFVGYQLLSDGVSCEDVNECITGSHSCRLGESCINTVGSFRCQRDSSCGTGYELTEDNSCKDIDECESGIHNCLPDFICQNTLGSFRCRPKLQCKSGFIQDALGNCIDINECLSISAPCPIGHTCINTEGSYTCQKNVPNCGRGYHLNEEGTRCVDVDECAPPAEPCGKGHRCVNSPGSFRCECKTGYYFDGISRMCVDVNECQRYPGRLCGHKCENTLGSYLCSCSVGFRLSVDGRSCEDINECSSSPCSQECANVYGSYQCYCRRGYQLSDVDGVTCEDIDECALPTGGHICSYRCINIPGSFQCSCPSSGYRLAPNGRNCQDIDECVTGIHNCSINETCFNIQGGFRCLAFECPENYRRSAAT

SEQ ID NO: 5130 - protein, 601 aa, Homo sapiens
MERAAPSRRVPLPLLLLGGLALLAAGVDADVLLEACCADGHRMATHQKDCSLPYATESKECRMVQEQCCHSQLEELHCATGISLANEQDRCATPHGDNASLEATFVKRCCHCCLLGRAAQAQGQSCEYSLMVGYQCGQVFQACCVKSQETGDLDVGGLQETDKIIEVEEEQEDPYLNDRCRGGGPCKQQCRDTGDEVVCSCFVGYQLLSDGVSCEDVNECITGSHSCRLGESCINTVGSFRCQRDSSCGTGYELTEDNSCKDIDECESGIHNCLPDFICQNTLGSFRCRPKLQCKSGFIQDALGNCIDINECLSISAPCPIGHTCINTEGSYTCQKNVPNCGRGYHLNEEGTRCVDVDECAPPAEPCGKGHRCVNSPGSFRCECKTGYYFDGISRMCVDVNECQRYPGRLCGHKCENTLGSYLCSCSVGFRLSVDGRSCEDINECSSSPCSQECANVYGSYQCYCRRGYQLSDVDGVTCEDIDECALPTGGHICSYRCINIPGSFQCSCPSSGYRLAPNGRNCQDIDECVTGIHNCSINETCFNIQGGFRCLAFECPENYRRSAATQKSKKGRQNTPAGSSKEDCRVLPWKQGLEDTHLDA

SEQ ID NO: 5131 - protein, 172 aa, Homo sapiens
MERAAPSRRVPLPLLLLGGLALLAAGVDADVLLEACCADGHRMATHQKDCSLPYATESKECRMVQEQCCHSQLEELHCATGISLANEQDRCATPHGDNASLEATFVKRCCHCCLLGRAAQAQGQSCEYSLMVGYQCGQVFQACCVKSQETGDLDVGGLQETGGGPCKQQCRD

SEQ ID NO: 5132 - protein, 189 aa, Homo sapiens
MNSYTRGSRRPSAKAASPAASVTSRVSPSGPGVPVDADVLLEACCADGHRMATHQKDCSLPYATESKECRMVQEQCCHSQLEELHCATGISLANEQDRCATPHGDNASLEATFVKRCCHCCLLGRAAQAQGQSCEYSLMVGYQCGQVFQACCVKSQETGDLDVGGLQETDKIIEVEEEQEDPYLNDRCR

SEQ ID NO: 5133 - protein, 183 aa, Homo sapiens
  SITE 1: note = misc_feature - Xaa can be any naturally occurring amino acid
XKRCCHCCLLGRAAQAQGQSCEYSLMVGYQCGQVFQACCVKSQETGDLDVGGLQETDKIIEVEEEQEDPYLNDRCRGGGPCKQQCRDTGDEVVCSCFVGYQLLSDGVSCEDVNECITGSHSCRLGESCINTVGSFRCQRDSSCGTGYELTEDNSCKEYSGILPLPTQATVQEWLYTRCSRQLY

SEQ ID NO: 5134 - protein, 159 aa, Homo sapiens
MVLLWEPAGAWLALGLALALGPSVAAAAPRQDCTGVECPPLENCIEEALEPGACCATCVQQGCACEGYQYYDCLQGGFVRGRVPAGQSYFVDFGSTECSCPPGGGKISCQFMLCPELPPNCIEAVVVADSCPQCGQVGCVHAGHKYAAGHTVHLPPCRA

SEQ ID NO: 5135 - protein, 1184 aa, Homo sapiens
MVLLWEPAGAWLALGLALALGPSVAAAAPRQDCTGVECPPLENCIEEALEPGACCATCVQQGCACEGYQYYDCLQGGFVRGRVPAGQSYFVDFGSTECSCPPGGGKISCQFMLCPELPPNCIEAVVVADSCPQCGQVGCVHAGHKYAAGHTVHLPPCRACHCPDAGGELICYQLPGCHGNFSDAEEGDPERHYEDPYSYDQEVAEVEAATALGGEVQAGAVQAGAGGPPAALGGGSQPLSTIQAPPWPAVLPRPTAAAALGPPAPVQAKARRVTEDSEEEEEEEEEREEMAVTEQLAAGGHRGLDGLPTTAPAGPSLPIQEERAEAGARAEAGARPEENLILDAQATSRSTGPEGVTHAPSLGKAALVPTQAVPGSPRDPVKPSPHNILSTSLPDAAWIPPTREVPRKPQVLPHSHVEEDTDPNSVHSIPRSSPEGSTKDLIETCCAAGQQWAIDNDECLEIPESGTEDNVCRTAQRHCCVSYLQEKSCMAGVLGAKEGETCGAEDNDSCGISLYKQCCDCCGLGLRVRAEGQSCESNPNLGYPCNHVMLSCCEGEEPLIVPEVRRPPEPAAAPRRVSEAEMAGREALSLGTEAELPNSLPGDDQDECLLLPGELCQHLCINTVGSYHCACFPGFSLQDDGRTCRPEGHPPQPEAPQEPALKSEFSQVASNTIPLPLPQPNTCKDNGPCKQVCSTVGGSAICSCFPGYAIMADGVSCEDINECVTDLHTCSRGEHCVNTLGSFHCYKALTCEPGYALKDGECEDVDECAMGTHTCQPGFLCQNTKGSFYCQARQRCMDGFLQDPEGNCVDINECTSLSEPCRPGFSCINTVGSYTCQRNPLICARGYHASDDGTKCVDVNECETGVHRCGEGQVCHNLPGSYRCDCKAGFQRDAFGRGCIDVNECWASPGRLCQHTCENTLGSYRCSCASGFLLAADGKRCEDVNECEAQRCSQECANIYGSYQCYCRQGYQLAEDGHTCTDIDECAQGAGILCTFRCLNVPGSYQCACPEQGYTMTANGRSCKDVDECALGTHNCSEAETCHNIQGSFRCLRFECPPNYVQVSKTKCERTTCHDFLECQNSPARITHYQLNFQTGLLVPAHIFRIGPAPAFTGDTIALNIIKGNEEGYFGTRRLNAYTGVVYLQRAVLEPRDFALDVEMKLWRQGSVTTFLAKMHIFFTTFAL

SEQ ID NO: 5136 - protein, 1231 aa, Homo sapiens
MVLLWEPAGAWLALGLALALGPSVAAAAPRQDCTGVECPPLENCIEEALEPGACCATCVQQGCACEGYQYYDCLQGGFVRGRVPAGQSYFVDFGSTECSCPPGGGKISCQFMLCPELPPNCIEAVVVADSCPQCGQVGCVHAGHKYAAGHTVHLPPCRACHCPDAGGELICYQLPGCHGNFSDAEEGDPERHYEDPYSYDQEVAEVEAATALGGEVQAGAVQAGAGGPPAALGGGSQPLSTIQAPPWPAVLPRPTAAAALGPPAPVQAKARRVTEDSEEEEEEEEEREEMAVTEQLAAGGHRGLDGLPTTAPAGPSLPIQEERAEAGARAEAGARPEENLILDAQATSRSTGPEGVTHAPSLGKAALVPTQAVPGSPRDPVKPSPHNILSTSLPDAAWIPPTREVPRKPQVLPHSHVEEDTDPNSVHSIPRSSPEGSTKDLIETCCAAGQQWAIDNDECLEIPESGTEDNVCRTAQRHCCVSYLQEKSCMAGVLGAKEGETCGAEDNDSCGISLYKQCCDCCGLGLRVRAEGQSCESNPNLGYPCNHVMLSCCEGEEPLIVPEVRRPPEPAAAPRRVSEAEMAGREALSLGTEAELPNSLPGDDQDECLLLPGELCQHLCINTVGSYHCACFPGFSLQDDGRTCRPEGHPPQPEAPQEPALKSEFSQVASNTIPLPLPQPNTCKDNGPCKQVCSTVGGSAICSCFPGYAIMADGVSCEDQDECLMGAHDCSRRQFCVNTLGSFYCVNHTVLCADGYILNAHRKCVDINECVTDLHTCSRGEHCVNTLGSFHCYKALTCEPGYALKDGECEDVDECAMGTHTCQPGFLCQNTKGSFYCQARQRCMDGFLQDPEGNCVDINECTSLSEPCRPGFSCINTVGSYTCQRNPLICARGYHASDDGTKCVDVNECETGVHRCGEGQVCHNLPGSYRCDCKAGFQRDAFGRGCIDVNECWASPGRLCQHTCENTLGSYRCSCASGFLLAADGKRCEDVNECEAQRCSQECANIYGSYQCYCRQGYQLAEDGHTCTDIDECAQGAGILCTFRCLNVPGSYQCACPEQGYTMTANGRSCKDVDECALGTHNCSEAETCHNIQGSFRCLRFECPPNYVQVSKTKCERTTCHDFLECQNSPARITHYQLNFQTGLLVPAHIFRIGPAPAFTGDTIALNIIKGNEEGYFGTRRLNAYTGVVYLQRAVLEPRDFALDVEMKLWRQGSVTTFLAKMHIFFTTFAL

SEQ ID NO: 5137 - protein, 1231 aa, Homo sapiens; identical to SEQ ID NO: 5136

SEQ ID NO: 5138 - protein, 109 aa, Homo sapiens
  SITE 1: note = misc_feature - Xaa can be any naturally occurring amino acid
XIDECAQGAGILCTFRCLNVPGSYQCACPEQGYTMTANGRSCKDVDECALGTHNCSEAETCHNIQGSFRCLRFECPPNYVQVSKTWCVPTQAPSGSLHGGPRPWRVPCG

SEQ ID NO: 5139 - protein, 101 aa, Homo sapiens
  SITE 1: note = misc_feature - Xaa can be any naturally occurring amino acid
XVDECALGTHNCSEAETCHNIQGSFRCLRFECPPNYVQVSKTKCERTKWKLARWATAVAGALWVRLGDDLRTRDTRPCWGSWTPLDDPSPKLTFHFMFHCD

SEQ ID NO: 5140 - protein, 44 aa, Homo sapiens
MPGIKRILTVTILALCLPSPGNAQAQCTNGFDLDRQSGQCLASL

SEQ ID NO: 5141 - protein, 489 aa, Homo sapiens
MPGIKRILTVTILALCLPSPGNAQAQCTNGFDLDRQSGQCLDGVSLSSPRLECNGAISAHCNLCLPGSSDSSASASQVAGITDIDECRTIPEACRGDMMCVNQNGGYLCIPRTNPVYRGPYSNPYSTPYSGPYPAAAPPLSAPNYPTISRPLICRFGYQMDESNQCVDVDECATDSHQCNPTQICINTEGGYTCSCTDGYWLLEGQCLDIDECRYGYCQQLCANVPGSYSCTCNPGFTLNEDGRSCQDVNECATENPCVQTCVNTYGSFICRCDPGYELEEDGVHCSDMDECSFSEFLCQHECVNQPGTYFCSCPPGYILLDDNRSCQDINECEHRNHTCNLQQTCYNLQGGFKCIDPIRCEEPYLRISDNRCMCPAENPGCRDQPFTILYRDMDVVSGRSVPADIFQMQATTRYPGAYYIFQIKSGNEGREFYMRQTGPISATLVMTRPIKGPREIQLDLEMITVNTVINFRGSSVIRLRIYVSQYPF

SEQ ID NO: 5142 - protein, 91 aa, Homo sapiens
MPGIKRILTVTILALCLPSPGNAQAQCTNGFDLDRQSGQCLDIDECRTIPEACRGDMMCVNQNGGYLCIPRTNPVYRGPYSNPYSTPYSGP

SEQ ID NO: 5143 - protein, 448 aa, Homo sapiens
MPGIKRILTVTILALCLPSPGNAQAQCTNGFDLDRQSGQCLDIDECRTIPEACRGDMMCVNQNGGYLCIPRTNPVYRGPYSNPYSTPYSGPYPAAAPPLSAPNYPTISRPLICRFGYQMDESNQCVDVDECATDSHQCNPTQICINTEGGYTCSCTDGYWLLEGQCLDIDECRYGYCQQLCANVPGSYSCTCNPGFTLNEDGRSCQDVNECATENPCVQTCVNTYGSFICRCDPGYELEEDGVHCSDMDECSFSEFLCQHECVNQPGTYFCSCPPGYILLDDNRSCQDINECEHRNHTCNLQQTCYNLQGGFKCIDPIRCEEPYLRISDNRCMCPAENPGCRDQPFTILYRDMDVVSGRSVPADIFQMQATTRYPGAYYIFQIKSGNEGREFYMRQTGPISATLVMTRPIKGPREIQLDLEMITVNTVINFRGSSVIRLRIYVSQYPF

SEQ ID NO: 5144 - protein, 35 aa, Homo sapiens
MPGIKRILTVTILALCLPSPGNAQQQERWTPVCQP

SEQ ID NO: 5145 - protein, 453 aa, Homo sapiens
MRSGNCRQRYMILTVTILALCLPSPGNAQAQCTNGFDLDRQSGQCLDIDECRTIPEACRGDMMCVNQNGGYLCIPRTNPVYRGPYSNPYSTPYSGPYPAAAPPLSAPNYPTISRPLICRFGYQMDESNQCVDVDECATDSHQCNPTQICINTEGGYTCSCTDGYWLLEGQCLDIDECRYGYCQQLCANVPGSYSCTCNPGFTLNEDGRSCQDVNECATENPCVQTCVNTYGSFICRCDPGYELEEDGVHCSDMDECSFSEFLCQHECVNQPGTYFCSCPPGYILLDDNRSCQDINECEHRNHTCNLQQTCYNLQGGFKCIDPIRCEEPYLRISDNRCMCPAENPGCRDQPFTILYRDMDVVSGRSVPADIFQMQATTRYPGAYYIFQIKSGNEGREFYMRQTGPISATLVMTRPIKGPREIQLDLEMITVNTVINFRGSSVIRLRIYVSQYPF

SEQ ID NO: 5146 - protein, 261 aa, Homo sapiens
AGSARTLGTARGGHGAGKGLSPTALLPARVASCARSQKAWPLCIIDVNECELYGQEGRPRLCMHACVNTPGSYRCTCPGGYRTLADGKSCEDVDECVGLQPVCPQGTTCINTGGSFQCVSPECPEGSGNVSYVKTSPFQCERNPCPMDSRPCRHLPKTISFHYLSLPSNLKTPITLFRMATASAPGRAGPNSLRFGIVGGNSRGHFVMQRSDRQTGDLILVQNLEGPQTLEVDVDMSEYLDRSFQANHVSKVTIFVSPYDF

SEQ ID NO: 5147 - protein, 305 aa, Homo sapiens
MVPSSPRALFLLLLILACPEPRASQNCLSKQQLLSAIRQLQQLLKGQETRFAEGIRHMKSRLAALQNSVGRVGPDALPVSCPALNTPADGRKFGSKYLVDHEVHFTCNPGFRLVGPSSVVCLPNGTWTGEQPHCRDVDECVGLQPVCPQGTTCINTGGSFQCVSPECPEGSGNVSYVKTSPFQCERNPCPMDSRPCRHLPKTISFHYLSLPSNLKTPITLFRMATASAPGRAGPNSLRFGIVGGNSRGHFVMQRSDRQTGDLILVQNLEGPQTLEVDVDMSEYLDRSFQANHVSKVTIFVSPYDF

SEQ ID NO: 5148 - protein, 439 aa, Homo sapiens
MVPSSPRALFLLLLILACPEPRASQNCLSKQQLLSAIRQLQQLLKGQETRFAEGIRHMKSRLAALQNSVGRVGPDALPVSCPALNTPADGRKFGSKYLVDHEVHFTCNPGFRLVGPSSVVCLPNGTWTGEQPHCRGISECSSQPCQNGGTCVEGVNQYRCICPPGRTGNRCQHQAQTAAPEGSVAGDSAFSRAPRCAQVERAQHCSCEAGFHLSGAAGDSVCQDVNECELYGQEGRPRLCMHACVNTPGSYRCTCPGGYRTLADGKSCEDVDECVGLQPVCPQGTTCINTGGSFQCVSPECPEGSGNVSYVKTSPFQCERNPCPMDSRPCRHLPKTISFHYLSLPSNLKTPITLFRMATASAPGRAGPNSLRFGIVGGNSRGHFVMQRSDRQTGDLILVQNLEGPQTLEVDVDMSEYLDRSFQANHVSKVTIFVSPYDF

SEQ ID NO: 5149 - protein, 366 aa, Homo sapiens
MVPSSPRALFLLLLILACPEPRASQNCLSKQQLLSAIRQLQQLLKGQETRFAEGIRHMKSRLAALQNSVGRVGPDALPVSCPALNTPADGRKFGSKYLVDHEVHFTCNPGFRLVGPSSVVCLPNGTWTGEQPHCRGISECSSQPCQNGGTCVEGVNQYRCICPPGRTGNRCQHQAQTAAPEGSVAGDSAFSRAPRCAQVERAQHCSCEAGFHLSGAAGDSVCQDVNECELYGQEGRPRLCMHACVNTPGSYRCTCPGGYRTLADGKSCEDVDECVGLQPVCPQGTTCINTGGSFQCVSPECPEGSGNVSYVKTSPLTWRGLRRWRWTSTCRNTWTAPSRPTTCPRSPSLYPPMTSEGTQGHWGVES

SEQ ID NO: 5150 - protein, 393 aa, Homo sapiens
MVPSSPRALFLLLLILACPEPRASQNCLSKQQLLSAIRQLQQLLKGQETRFAEGIRHMKSRLAALQNSVGRVGPDALPVSCPALNTPADGRKFGSKYLVDHEVHFTCNPGFRLVGPSSVVCLPNGTWTGEQPHCRGISECSSQPCQNGGTCVEGVNQYRCICPPGRTGNRCQHQAQTDVNECELYGQEGRPRLCMHACVNTPGSYRCTCPGGYRTLADGKSCEDVDECVGLQPVCPQGTTCINTGGSFQCVSPECPEGSGNVSYVKTSPFQCERNPCPMDSRPCRHLPKTISFHYLSLPSNLKTPITLFRMATASAPGRAGPNSLRFGIVGGNSRGHFVMQRSDRQTGDLILVQNLEGPQTLEVDVDMSEYLDRSFQANHVSKVTIFVSPYDF

SEQ ID NO: 5151 - protein, 273 aa, Homo sapiens
RFAEGIRHMKSRLAALQNSVGRVGPDALPGISECSSQPCQNGGTCVEGVNQYRCICPPGRTGNRCQHQAQTAAPEGSVAGDSAFSRAPRCAQVERAQHCSCEAGFHLSGAAGDSVCQDVNECELYGQEGRPRLCMHACVNTPGSYRCTCPGGYRTLADGKSCEDVDECVGLQPVCPQGTTCINTGGSFQCVSPECPEGSGNVSYVKTSPFQCERNPCPMDSRPCRHLPKTISFHYLSLPSNLKTPITLFRMATASAPGRAGPNSLRFGIVGGN

SEQ ID NO: 5152 - protein, 55 aa, Homo sapiens
MRRGRLLEIALGFTVLLASYTSHGADANLEAGNVKETRASRAKRRGGGGHDALKG

SEQ ID NO: 5153 - protein, 302 aa, Homo sapiens
MRRGRLLEIALGFTVLLASYTSHGADANLEAGNVKETRASRAKRRGGGGHDALKGPNVCGSRYNAYCCPGWKTLPGGNQCIVPICRHSCGDGFCSRPNMCTCPSGQIAPSCGSRSIQHCNIRCMNGGSCSDDHCLCQKGYIGTHCGQPVCESGCLNGGRCVAPNRCACTYGFTGPQCERDYRTGPCFTVISNQMCQGQLSGIVCTKTLCCATTSMNVKLEHTTVANMLYVPIQQEASNVAAVPGGLEMALSALIWTNVPMEPICAASMQTARIPWDLTAVCARKDTQVMASLVQTLMSALRT

SEQ ID NO: 5154 - protein, 2871 aa, Homo sapiens
MRRGRLLEIALGFTVLLASYTSHGADANLEAGNVKETRASRAKRRGGGGHDALKGPNVCGSRYNAYCCPGWKTLPGGNQCIVPICRHSCGDGFCSRPNMCTCPSGQIAPSCGSRSIQHCNIRCMNGGSCSDDHCLCQKGYIGTHCGQPVCESGCLNGGRCVAPNRCACTYGFTGPQCERDYRTGPCFTVISNQMCQGQLSGIVCTKTLCCATVGRAWGHPCEMCPAQPHPCRRGFIPNIRTGACQDVDECQAIPGLCQGGNCINTVGSFECKCPAGHKLNEVSQKCEDIDECSTIPGICEGGECTNTVSSYFCKCPPGFYTSPDGTRCIDVRPGYCYTALTNGRCSNQLPQSITKMQCCCDAGRCWSPGVTVAPEMCPIRATEDFNKLCSVPMVIPGRPEYPPPPLGPIPPVLPVPPGFPPGPQIPVPRPPVEYLYPSREPPRVLPVNVTDYCQLVRYLCQNGRCIPTPGSYRCECNKGFQLDLRGECIDVDECEKNPCAGGECINNQGSYTCQCRAGYQSTLTRTECRDIDECLQNGRICNNGRCINTDGSFHCVCNAGFHVTRDGKNCEDMDECSIRNMCLNGMCINEDGSFKCICKPGFQLASDGRYCKDINECETPGICMNGRCVNTDGSYRCECFPGLAVGLDGRVCVDTHMRSTCYGGYKRGQCIKPLFGAVTKSECCCASTEYAFGEPCQPCPAQNSAEYQALCSSGPGMTSAGSDINECALDPDICPNGICENLRGTYKCICNSGYEVDSTGKNCVDINECVLNSLLCDNGQCRNTPGSFVCTCPKGFIYKPDLKTCEDIDECESSPCINGVCKNSPGSFICECSSESTLDPTKTICIETIKGTCWQTVIDGRCEININGATLKSQCCSSLGAAWGSPCTLCQVDPICGKGYSRIKGTQCEDIDECEVFPGVCKNGLCVNTRGSFKCQCPSGMTLDATGRICLDIRLETCFLRYEDEECTLPIAGRHRMDACCCSVGAAWGTEECEECPMRNTPEYEELCPRGPGFATKEITNGKPFFKDINECKMIPSLCTHGKCRNTIGSFKCRCDSGFALDSEERNCTDIDECRISPDLCGRGQCVNTPGDFECKCDEGYESGFMMMKNCMDIDECQRDPLLCRGGVCHNTEGSYRCECPPGHQLSPNISACIDINECELSAHLCPNGRCVNLIGKYQCACNPGYHSTPDRLFCVDIDECSIMNGGCETFCTNSEGSYECSCQPGFALMPDQRSCTDIDECEDNPNICDGGQCTNIPGEYRCLCYDGFMASEDMKTCVDVNECDLNPNICLSGTCENTKGSFICHCDMGYSGKKGKTGCTDINECEIGAHNCGKHAVCTNTAGSFKCSCSPGWIGDGIKCTDLDECSNGTHMCSQHADCKNTMGSYRCLCKEGYTGDGFTCTDLDECSENLNLCGNGQCLNAPGGYRCECDMGFVPSADGKACEDIDECSLPNICVFGTCHNLPGLFRCECEIGYELDRSGGNCTDVNECLDPTTCISGNCVNTPGSYICDCPPDFELNPTRVGCVDTRSGNCYLDIRPRGDNGDTACSNEIGVGVSKASCCCSLGKAWGTPCEMCPAVNTSEYKILCPGGEGFRPNPITVILEDIDECQELPGLCQGGKCINTFGSFQCRCPTGYYLNEDTRVCDDVNECETPGICGPGTCYNTVGNYTCICPPDYMQVNGGNNCMDMRRSLCYRNYYADNQTCDGELLFNMTKKMCCCSYNIGRAWNKPCEQCPIPSTDEFATLCGSQRPGFVIDIYTGLPVDIDECREIPGVCENGVCINMVGSFRCECPVGFFYNDKLLVCEDIDECQNGPVCQRNAECINTAGSYRCDCKPGYRFTSTGQCNDRNECQEIPNICSHGQCIDTVGSFYCLCHTGFKTNDDQTMCLDINECERDACGNGTCRNTIGSFNCRCNHGFILSHNNDCIDVDECASGNGNLCRNGQCINTVGSFQCQCNEGYEVAPDGRTCVDINECLLEPRKCAPGTCQNLDGSYRCICPPGYSLQNEKCEDIDECVEEPEICALGTCSNTEGSFKCLCPEGFSLSSSGRRCQDLRMSYCYAKFEGGKCSSPKSRNHSKQECCCALKGEGWGDPCELCPTEPDEAFRQICPYGSGIIVGPDDSAVDMDECKEPDVCKHGQCINTDGSYRCECPFGYILAGNECVDTDECSVGNPCGNGTCKNVIGGFECTCEEGFEPGPMMTCEDINECAQNPLLCAFRCVNTYGSYECKCPVGYVLREDRRMCKDEDECEEGKHDCTEKQMECKNLIGTYMCICGPGYQRRPDGEGCVDENECQTKPGICENGRCLNTRGSYTCECNDGFTASPNQDECLDNREGYCFTEVLQNMCQIGSSNRNPVTKSECCCDGGRGWGPHCEICPFQGTVAFKKLCPHGRGFMTNGADIDECKVIHDVCRNGECVNDRGSYHCICKTGYTPDITGTSCVDLNECNQAPKPCNFICKNTEGSYQCSCPKGYILQEDGRSCKDLDECATKQHNCQFLCVNTIGGFTCKCPPGFTQHHTSCIDNNECTSDINLCGSKGICQNTPGSFTCECQRGFSLDQTGSSCEDVDECEGNHRCQHGCQNIIGGYRCSCPQGYLQHYQWNQCVDENECLSAHICGGASCHNTLGSYKCMCPAGFQYEQFSGGCQDINECGSAQAPCSYGCSNTEGGYLCGCPPGYFRIGQGHCVSGMGMGRGNPEPPVSGEMDDNSLSPEACYECKINGYPKRGRKRRSTNETDASNIEDQSETEANVSLASWDVEKTAIFAFNISHVSNKVRILELLPALTTLTNHNRYLIESGNEDGFFKINQKEGISYLHFTKKKPVAGTYSLQISSTPLYKKKELNQLEDKYDKDYLSGELGDNLKMKIQVLLH

SEQ ID NO: 5155 - protein, 853 aa, Homo sapiens
  SITE 1: note = misc_feature - Xaa can be any naturally occurring amino acid
XLGKAWGTPCEMCPAVNTSEYKILCPGGEGFRPNPITVILEDIDECQELPGLCQGGKCINTFGSFQCRCPTGYYLNEDTRVCDDVNECETPGICGPGTCYNTVGNYTCICPPDYMQVNGGNNCMDMRRSLCYRNYYADNQTCDGELLFNMTKKMCCCSYNIGRAWNKPCEQCPIPSTDEFATLCGSQRPGFVIDIYTGLPVDIDECREIPGVCENGVCINMVGSFRCECPVGFFYNDKLLVCEDIDECQNGPVCQRNAECINTAGSYRCDCKPGYRFTSTGQCNDRNECQEIPNICSHGQCIDTVGSFYCLCHTGFKTNDDQTMCLDINECERDACGNGTCRNTIGSFNCRCNHGFILSHNNDCIDVDECASGNGNLCRNGQCINTVGSFQCQCNEGYEVAPDGRTCVDINECLLEPRKCAPGTCQNLDGSYRCICPPGYSLQNEKCEDIDECVEEPEICALGTCSNTEGSFKCLCPEGFSLSSSGRRCQDLRMSYCYAKFEGGKCSSPKSRNHSKQECCCALKGEGWGDPCELCPTEPDEAFRQICPYGSGIIVGPDDSAVDMDECKEPDVCKHGQCINTDGSYRCECPFGYILAGNECVDTDECSVGNPCGNGTCKNVIGGFECTCEEGFEPGPMMTCEDINECAQNPLLCAFRCVNTYGSYECKCPVGYVLREDRRMCKDEDECEEGKHDCTEKQMECKNLIGTYMCICGPGYQRRPDGEGCVDENECQTKPGICENGRCLNTRGSYTCECNDGFTASPNQDECLDVILSLLLLSPAFPSCFFSPRTIGKGTASQRCYKTCVRSAPATGTPSPNRNAAVTEGEAGVPTVRSALSRGLWLSRNSVPMAEDS

SEQ ID NO: 5156 - protein, 1473 aa, Homo sapiens
MGRRRRLCLQLYFLWLGCVVLWAQGTAGQPQPPPPKPPRPQPPPQQVRSATAGSEGGFLAPEYREEGAAVASRVRRRGQQDVLRGPNVCGSRFHSYCCPGWKTLPGGNQCIVLQQCSVRCMNGGTCADDHCQCQKGYIGTYCGQPVCENGCQNGGRCIGPNRCACVYGFTGPQCERDYRTGPCFTQVNNQMCQGQLTGIVCTKTLCCATIGRAWGHPCEMCPAQPQPCRRGFIPNIRTGACQDVDECQAIPGICQGGNCINTVGSFECRCPAGHKQSETTQKCEDIDECSIIPGICETGECSNTVGSYFCVCPRGYVTSTDGSRCIDQRTGMCFSGLVNGRCAQELPGRMTKMQCCCEPGRCWGIGTIPEACPVRGSEEYRRLCMDGLPMGGIPGSAGSRPGGTGGNGFAPSGNGNGYGPGGTGFIPIPGGNGFSPGVGGAGVGAGGQGPIITGLTILNQTIDICKHHANLCLNGRCIPTVSSYRCECNMGYKQDANGDCIDVDECTSNPCTNGDCVNTPGSYYCKCHAGFQRTPTKQACIDIDECIQNGVLCKNGRCVNTDGSFQCICNAGFELTTDGKNCVDHDECTTTNMCLNGMCINEDGSFKCICKPGFVLAPNGRYCTDVDECQTPGICMNGHCINSEGSFRCDCPPGLAVGMDGRVCVDTHMRSTCYGGIKKGVCVRPFPGAVTKSECCCANPDYGFGEPCQPCPAKNSAEFHGLCSSGVGITVDGRDINECALDPDICANGICENLRGSYRCNCNSGYEPDASGRNCIDIDECLVNRLLCDNGLCRNTPGSYSCTCPPGYVFRTETETCEDINECESNPCVNGACRNNLGSFNCECSPGSKLSSTGLICIDSLKGTCWLNIQDSRCEVNINGATLKSECCATLGAAWGSPCERCELDTACPRGLARIKGVTCEDVNECEVFPGVCPNGRCVNSKGSFHCECPEGLTLDGTGRVCLDIRMEQCYLKWDEDECIHPVPGKFRMDACCCAVGAAWGTECEECPKPGTKEYETLCPRGAGFANRGDVLTGRPFYKDINECKAFPGMCTYGKCRNTIGSFKCRCNSGFALDMEERNCTDIDECRISPDLCGSGICVNTPGSFECECFEGYESGFMMMKNCMDIDECERNPLLCRGGTCVNTEGSFQCDCPLGHELSPSREDCVDINECSLSDNLCRNGKCVNMIGTYQCSCNPGYQATPDRQGCTDIDECMIMNGGCDTQCTNSEGSYECSCSEGYALMPDGRSCADIDECENNPDICDGGQCTNIPGEYRCLCYDGFMASMDMKTCIDVNECDLNSNICMFGECENTKGSFICHCQLGYSVKKGTTGCTDVDECEIGAHNCDMHASCLNIPGSFKCSCREGWIGNGIKCIDLDECSNGTHQCSINAQCVNTPGSYRCACSEGFTGDGFTCSDVDECAENINLCENGQCLNVPGAYRCECEMGFTPASDSRSCQGGSPGFQLIFKLDQPQ

SEQ ID NO: 5157 - protein, 2912 aa, Homo sapiens
MGRRRRLCLQLYFLWLGCVVLWAQGTAGQPQPPPPKPPRPQPPPQQVRSATAGSEGGFLAPEYREEGAAVASRVRRRGQQDVLRGPNVCGSRFHSYCCPGWKTLPGGNQCIVPICRNSCGDGFCSRPNMCTCSSGQISSTCGSKSIQQCSVRCMNGGTCADDHCQCQKGYIGTYCGQPVCENGCQNGGRCIGPNRCACVYGFTGPQCERDYRTGPCFTQVNNQMCQGQLTGIVCTKTLCCATIGRAWGHPCEMCPAQPQPCRRGFIPNIRTGACQDVDECQAIPGICQGGNCINTVGSFECRCPAGHKQSETTQKCEDIDECSIIPGICETGECSNTVGSYFCVCPRGYVTSTDGSRCIDQRTGMCFSGLVNGRCAQELPGRMTKMQCCCEPGRCWGIGTIPEACPVRGSEEYRRLCMDGLPMGGIPGSAGSRPGGTGGNGFAPSGNGNGYGPGGTGFIPIPGGNGFSPGVGGAGVGAGGQGPIITGLTILNQTIDICKHHANLCLNGRCIPTVSSYRCECNMGYKQDANGDCIDVDECTSNPCTNGDCVNTPGSYYCKCHAGFQRTPTKQACIDIDECIQNGVLCKNGRCVNTDGSFQCICNAGFELTTDGKNCVDHDECTTTNMCLNGMCINEDGSFKCICKPGFVLAPNGRYCTDVDECQTPGICMNGHCINSEGSFRCDCPPGLAVGMDGRVCVDTHMRSTCYGGIKKGVCVRPFPGAVTKSECCCANPDYGFGEPCQPCPAKNSAEFHGLCSSGVGITVDGRDINECALDPDICANGICENLRGSYRCNCNSGYEPDASGRNCIDIDECLVNRLLCDNGLCRNTPGSYSCTCPPGYVFRTETETCEDINECESNPCVNGACRNNLGSFNCECSPGSKLSSTGLICIDSLKGTCWLNIQDSRCEVNINGATLKSECCATLGAAWGSPCERCELDTACPRGLARIKGVTCEDVNECEVFPGVCPNGRCVNSKGSFHCECPEGLTLDGTGRVCLDIRMEQCYLKWDEDECIHPVPGKFRMDACCCAVGAAWGTECEECPKPGTKEYETLCPRGAGFANRGDVLTGRPFYKDINECKAFPGMCTYGKCRNTIGSFKCRCNSGFALDMEERNCTDIDECRISPDLCGSGICVNTPGSFECECFEGYESGFMMMKNCMDIDECERNPLLCRGGTCVNTEGSFQCDCPLGHELSPSREDCVDINECSLSDNLCRNGKCVNMIGTYQCSCNPGYQATPDRQGCTDIDECMIMNGGCDTQCTNSEGSYECSCSEGYALMPDGRSCADIDECENNPDICDGGQCTNIPGEYRCLCYDGFMASMDMKTCIDVNECDLNSNICMFGECENTKGSFICHCQLGYSVKKGTTGCTDVDECEIGAHNCDMHASCLNIPGSFKCSCREGWIGNGIKCIDLDECSNGTHQCSINAQCVNTPGSYRCACSEGFTGDGFTCSDVDECAENINLCENGQCLNVPGAYRCECEMGFTPASDSRSCQDIDECSFQNICVFGTCNNLPGMFHCICDDGYELDRTGGNCTDIDECADPINCVNGLCVNTPGRYECNCPPDFQLNPTGVGCVDNRVGNCYLKFGPRGDGSLSCNTEIGVGVSRSSCCCSLGKAWGNPCETCPPVNSTEYYTLCPGGEGFRPNPITIILEDIDECQELPGLCQGGNCINTFGSFQCECPQGYYLSEDTRICEDIDECFAHPGVCGPGTCYNTLGNYTCICPPEYMQVNGGHNCMDMRKSFCYRSYNGTTCENELPFNVTKRMCCCTYNVGKAWNKPCEPCPTPGTADFKTICGNIPGFTFDIHTGKAVDIDECKEIPGICANGVCINQIGSFRCECPTGFSYNDLLLVCEDIDECSNGDNLCQRNADCINSPGSYRCECAAGFKLSPNGACVDRNECLEIPNVCSHGLCVDLQGSYQCICHNGFKASQDQTMCMDVDECERHPCGNGTCKNTVGSYNCLCYPGFELTHNNDCLDIDECSSFFGQVCRNGRCFNEIGSFKCLCNEGYELTPDGKNCIDTNECVALPGSCSPGTCQNLEGSFRCICPPGYEVKSENCIDINECDEDPNICLFGSCTNTPGGFQCLCPPGFVLSDNGRRCFDTRQSFCFTNFENGKCSVPKAFNTTKAKCCCSKMPGEGWGDPCELCPKDDEVAFQDLCPYGHGTVPSLHDTREDVNECLESPGICSNGQCINTDGSFRCECPMGYNLDYTGVRCVDTDECSIGNPCGNGTCTNVIGSFECNCNEGFEPGPMMNCEDINECAQNPLLCAFRCMNTFGSYECTCPIGYALREDQKMCKDLDECAEGLHDCESRGMMCKNLIGTFMCICPPGMARRPDGEGCVDENECRTKPGICENGRCVNIIGSYRCECNEGFQSSSSGTECLDNRQGLCFAEVLQTICQMASSSRNLVTKSECCCDGGRGWGHQCELCPLPGTAQYKKICPHGPGYTTDGRDIDECKVMPNLCTNGQCINTMGSFRCFCKVGYTTDISGTSCIDLDECSQSPKPCNYICKNTEGSYQCSCPRGYVLQEDGKTCKDLDECQTKQHNCQFLCVNTLGGFTCKCPPGFTQHHTACIDNNECGSQPSLCGAKGICQNTPGSFSCECQRGFSLDATGLNCEDVDECDGNHRCQHGCQNILGGYRCGCPQGYIQHYQWNQCVDENECSNPNACGSASCYNTLGSYKCACPSGFSFDQFSSACHDVNECSSSKNPCNYGCSNTEGGYLCGCPPGYYRVGQGHCVSGMGFNKGQYLSLDTEVDEENALSPEACYECKINGYSKKDSRQKRSIHEPDPTAVEQISLESVDMDSPVNMKFNLSHLGSKEHILELRPAIQPLNNHIRYVISQGNDDSVFRIHQRNGLSYLHTAKKKLMPGTYTLEITSIPLYKKKELKKLEESNEDDYLLGELGEALRMRLQIQLY

SEQ ID NO: 5158 - protein, 341 aa, Homo sapiens
MGRRRRLCLQLYFLWLGCVVLWAQGTAGQPQPPPPKPPRPQPPPQQVRSATAGSEGGFLAPEYREEGAAVASRVRRRGQQDVLRGPNVCGSRFHSYCCPGWKTLPGGNQCIVPICRNSCGDGFCSRPNMCTCSSGQISSTCGSKSIQQCSVRCMNGGTCADDHCQCQKGYIGTYCGQPVCENGCQNGGRCIGPNRCACVYGFTGPQCERDYRTGPCFTQVNNQMCQGQLTGIVCTKTLCCATIGRAWGHPCEMCPAQPQPCRRGFIPNIRTGACQDVDECQAIPGICQGGNCINTVGSFECRCPAGHKQSETTQKCEVHVDKAQAGARCPCVILPSRLYLR

SEQ ID NO: 5159 - protein, 2912 aa, Homo sapiens; identical to SEQ ID NO: 5157

SEQ ID NO: 5160 - protein, 2911 aa, Homo sapiens
MGRRRRLCLQLYFLWLGCVVLWAQGTAGQPQPPPPKPPRPQPPPQQVRSATAGSEGGFLAPEYREEGAAVASRVRRRGQQDVLRGPNVCGSRFHSYCCPGWKTLPGGNQCIVPICRNSCGDGFCSRPNMCTCSSGQISSTCGSKSIQQCSVRCMNGGTCADDHCQCQKGYIGTYCGQPVCENGCQNGGRCITQPCACVYGFTGPQCERDYRTGPCFTQVNNQMCQGQLTGIVCTKTLCCATIGRAWGHPCEMCPAQPQPCRRGFIPNIRTGACQDVDECQAIPGICQGGNCINTVGSFECRCPAGHKQSETTQKCEDIDECSIIPGICETGECSNTVGSYFCVCPRGYVTSTDGSRCIDQRTGMCFSGLVNGRCAQELPGRMTKMQCCCEPGRCWGIGTIPEACPVRGSEEYRRLCMDGLPMGGIPGSAGSRPGGTGGNGFAPSGNGNGYGPGGTGFIPIPGGNGFSPGVGGAGVGAGGQGPIITGLTILNQTIDICKHHANLCLNGRCIPTVSSYRCECNMGYKQDANGDCIDVDECTSNPCTNGDCVNTPGSYYCKCHAGFQRTPTKQACIDIDECIQNGVLCKNGRCVNTDGSFQCICNAGFELTTDGKNCVDHDECTTTNMCLNGMCINEDGSFKCICKPGFVLAPNGRYCTDVDECQTPGICMNGHCINSEGSFRCDCPPGLAVGMDGRVCVDTHMRSTCYGGIKKGVCVRPFPGAVTKSECCCANPDYGFGEPCQPCPAKNSAEFHGLCSSGVGITVDGRDINECALDPDICANGICENLRGSYRCNCNSGYEPDASGRNCIDIDECLVNRLLCDNGLCRNTPGSYSCTCPPGYVFRTETETCEDINECESNPCVNGACRNNLGSFNCECSPGSKLSSTGLICIDSLKGTCWLNIQDSRCEVNINGATLKSECCATLGAAWGSPCERCELDTACPRGLARIKGVTCEDVNECEVFPGVCPNGRCVNSKGSFHCECPEGLTLDGTGRVCLDIRMEQCYLKWDEDECIHPVPGKFRMDACCCAVGAAWGTECEECPKPGTKEYETLCPRGAGFANRGDVLTGRPFYKDINECKAFPGMCTYGKCRNTIGSFKCRCNSGFALDMEERNCTDIDECRISPDLCGSGICVNTPGSFECECFEGYESGFMMMKNCMDIDECERNPLLCRGGTCVNTEGSFQCDCPLGHELSPSREDCVDINECSLSDNLCRNGKCVNMIGTYQCSCNPGYQATPDRQGCTDIDECMIMNGGCDTQCTNSEGSYECSCSEGYALMPDGRSCADIDECENNPDICDGGQCTNIPGEYRCLCYDGFMASMDMKTCIDVNECDLNSNICMFGECENTKGSFICHCQLGYSVKKGTTGCTDVDECEIGAHNCDMHASCLNIPGSFKCSCREGWIGNGIKCIDLDECSNGTHQCSINAQCVNTPGSYRCACSEGFTGDGFTCSDVDECAENINLCENGQCLNVPGAYRCECEMGFTPASDSRSCQDIDECSFQNICVFGTCNNLPGMFHCICDDGYELDRTGGNCTDIDECADPINCVNGLCVNTPGRYECNCPPDFQLNPTGVGCVDNRVGNCYLKFGPRGDGSLSCNTEIGVGVSRSSCCCSLGKAWGNPCETCPPVNSTEYYTLCPGGEGFRPNPITIILEDIDECQELPGLCQGGNCINTFGSFQCECPQGYYLSEDTRICEDIDECFAHPGVCGPGTCYNTLGNYTCICPPEYMQVNGGHNCMDMRKSFCYRSYNGTTCENELPFNVTKRMCCCTYNVGKAWNKPCEPCPTPGTADFKTICGNIPGFTFDIHTGKAVDIDECKEIPGICANGVCINQIGSFRCECPTGFSYNDLLLVCEDIDECSNGDNLCQRNADCINSPGSYRCECAAGFKLSPNGACVDRNECLEIPNVCSHGLCVDLQGSYQCICHNGFKASQDQTMCMDVDECERHPCGNGTCKNTVGSYNCLCYPGFELTHNNDCLDIDECSSFFGQVCRNGRCFNEIGSFKCLCNEGYELTPDGKNCIDTNECVALPGSCSPGTCQNLEGSFRCICPPGYEVKSENCIDINECDEDPNICLFGSCTNTPGGFQCLCPPGFVLSDNGRRCFDTRQSFCFTNFENGKCSVPKAFNTTKAKCCCSKMPGEGWGDPCELCPKDDEVAFQDLCPYGHGTVPSLHDTREDVNECLESPGICSNGQCINTDGSFRCECPMGYNLDYTGVRCVDTDECSIGNPCGNGTCTNVIGSFECNCNEGFEPGPMMNCEDINECAQNPLLCAFRCMNTFGSYECTCPIGYALREDQKMCKDLDECAEGLHDCESRGMMCKNLIGTFMCICPPGMARRPDGEGCVDENECRTKPGICENGRCVNIIGSYRCECNEGFQSSSSGTECLDNRQGLCFAEVLQTICQMASSSRNLVTKSECCCDGGRGWGHQCELCPLPGTAQYKKICPHGPGYTTDGRDIDECKVMPNLCTNGQCINTMGSFRCFCKVGYTTDISGTSCIDLDECSQSPKPCNYICKNTEGSYQCSCPRGYVLQEDGKTCKDLDECQTKQHNCQFLCVNTLGGFTCKCPPGFTQHHTACIDNNECGSQPSLCGAKGICQNTPGSFSCECQRGFSLDATGLNCEDVDECDGNHRCQHGCQNILGGYRCGCPQGYIQHYQWNQCVDENECSNPNACGSASCYNTLGSYKCACPSGFSFDQFSSACHDVNECSSSKNPCNYGCSNTEGGYLCGCPPGYYRVGQGHCVSGMGFNKGQYLSLDTEVDEENALSPEACYECKINGYSKKDSRQKRSIHEPDPTAVEQISLESVDMDSPVNMKFNLSHLGSKEHILELRPAIQPLNNHIRYVISQGNDDSVFRIHQRNGLSYLHTAKKKLMPGTYTLEITSIPLYKKKELKKLEESNEDDYLLGELGEALRMRLQIQLY

SEQ ID NO: 5161 - protein, 356 aa, Homo sapiens
MMMKNCMDIDECERNPLLCRGGTCVNTEGSFQCDCPLGHELSPSREDCVDINECSLSDNLCRNGKCVNMIGTYQCSCNPGYQATPDRQGCTDIDECMIMNGGCDTQCTNSEGSYECSCSEGYALMPDGRSCADIDECENNPDICDGGQCTNIPGEYRCLCYDGFMASMDMKTCIDVNECDLNSNICMFGECENTKGSFICHCQLGYSVKKGTTGCTDVDECEIGAHNCDMHASCLNIPGSFKCSCREGWIGNGIKCIDLDECSNGTHQCSINAQCVNTPGSYRCACSEGFTGDGFTCSDVDECAENINLCENGQCLNVPGAYRCECEMGFTPASDSRSCQGGSPGFQLIFKLDQPQ

SEQ ID NO: 5162 - protein, 2809 aa, Homo sapiens
MTLEGLYLARGPLARLLLAWSALLCMAGGQGRWDGALEAAGPGRVRRRGSPGILQGPNVCGSRFHAYCCPGWRTFPGRSQCVVPICRRACGEGFCSQPNLCTCADGTLAPSCGVSRGSGCSVSCMNGGTCRGASCLCQKGYTGTVCGQPICDRGCHNGGRCIGPNRCACVYGFMGPQCERDYRTGPCFGQVGPEGCQHQLTGLVCTKALCCATVGRAWGLPCELCPAQPHPCRRGFIPNIHTGACQDVDECQAVPGLCQGGSCVNMVGSFHCRCPVGHRLSDSSAACEDYRAGACFSVLFGGRCAGDLAGHYTRRQCCCDRGRCWAAGPVPELCPPRGSNEFQQLCAQRLPLLPGHPGLFPGLLGFGSNGMGPPLGPARLNPHGSDARGIPSLGPGNSNIGTATLNQTIDICRHFTNLCLNGRCLPTPSSYRCECNVGYTQDVRGECIDVDECTSSPCHHGDCVNIPGTYHCRCYPGFQATPTRQACVDVDECIVSGGLCHLGRCVNTEGSFQCVCNAGFELSPDGKNCVDHNECATSTMCVNGVCLNEDGSFSCLCKPGFLLAPGGHYCMDIDECQTPGICVNGHCTNTEGSFRCQCLGGLAVGTDGRVCVDTHVRSTCYGAIEKGSCARPFPGTVTKSECCCANPDHGFGEPCQLCPAKDSAEFQALCSSGLGITTDGRDINECALDPEVCANGVCENLRGSYRCVCNLGYEAGASGKDCTDVDECALNSLLCDNGWCQNSPGSYSCSCPPGFHFWQDTEICKDVDECLSSPCVSGVCRNLAGSYTCKCGPGSRLDPSGTFCLDSTKGTCWLKIQESRCEVNLQGASLRSECCATLGAAWGSPCERCEIDPACARGFARMTGVTCDDVNECESFPGVCPNGRCVNTAGSFRCECPEGLMLDASGRLCVDVRLEPCFLRWDEDECGVTLPGKYRMDVCCCSIGAVWGVECEACPDPESLEFASLCPRGLGFASRDFLSGRPFYKDVNECKVFPGLCTHGTCRNTVGSFHCACAGGFALDAQERNCTDIDECRISPDLCGQGTCVNTPGSFECECFPGYESGFMLMKNCMDVDECARDPLLCRGGTCTNTDGSYKCQCPPGHELTAKGTACEDIDECSLSDGLCPHGQCVNVIGAFQCSCHAGFQSTPDRQGCVDINECRVQNGGCDVHCINTEGSYRCSCGQGYSLMPDGRACADVDECEENPRVCDQGHCTNMPGGHRCLCYDGFMATPDMRTCVDVDECDLNPHICLHGDCENTKGSFVCHCQLGYMVRKGATGCSDVDECEVGGHNCDSHASCLNIPGSFSCRCLPGWVGDGFECHDLDECVSQEHRCSPRGDCLNVPGSYRCTCRQGFAGDGFFCEDRDECAENVDLCDNGQCLNAPGGYRCECEMGFDPTEDHRACQDVDECAQGNLCAFGSCENLPGMFRCICNGGYELDRGGGNCTDINECADPVNCINGVCINTPGSYLCSCPQDFELNPSGVGCVDTRAGNCFLETHDRGDSGISCSAEIGVGVTRASCCCSLGRAWGNPCELCPMANTTEYRTLCPGGEGFQPNRITVILEDIDECQELPGLCQGGDCVNTFGSFQCECPPGYHLSEHTRICEDIDECSTHSGICGPGTCYNTLGNYTCVCPAEYLQVNGGNNCMDMRKSVCFRHYNGTCQNELAFNVTRKMCCCSYNIGQAWNRPCEACPTPISPDYQILCGNQAPGFLTDIHTGKPLDIDECGEIPAICANGICINQIGSFRCECPAGFNYNSILLACEDVDECGSRESPCQQNADCINIPGSYRCKCTRGYKLSPGGACVGRNECREIPNVCSHGDCMDTEGSYMCLCHRGFQASADQTLCMDIDECDRQPCGNGTCKNIIGSYNCLCFPGFVVTHNGDCVDFDECTTLVGQVCRFGHCLNTAGSFHCLCQDGFELTADGKNCVDTNECLSLAGTCLPGTCQNLEGSFRCICPPGFQVQSDHCIDIDECSEEPNLCLFGTCTNSPGSFQCLCPPGFVLSDNGHRCFDTRQSFCFTRFEAGKCSVPKAFNTTKTRCCCSKRPGEGWGDPCELCPQEGSAAFQELCPFGHGAVPGPDDSREDVNECAENPGVCTNGVCVNTDGSFRCECPFGYSLDFTGINCVDTDECSVGHPCGQGTCTNVIGGFECACADGFEPGLMMTCEDIDECSLNPLLCAFRCHNTEGSYLCTCPAGYTLREDGAMCRDVDECADGQQDCHARGMECKNLIGTFACVCPPGMRPLPGSGEGCTDDNECHAQPDLCVNGRCVNTAGSFRCDCDEGFQPSPTLTECHDIRQGPCFAEVLQTMCRSLSSSSEAVTRAECCCGGGRGWGPRCELCPLPGTSAYRKLCPHGSGYTAEGRDVDECRMLAHLCAHGECINSLGSFRCHCQAGYTPDATATTCLDMDECSQVPKPCTFLCKNTKGSFLCSCPRGYLLEEDGRTCKDLDECTSRQHNCQFLCVNTVGAFTCRCPPGFTQHHQACFDNDECSAQPGPCGAHGHCHNTPGSFRCECHQGFTLVSSGHGCEDVNECDGPHRCQHGCQNQLGGYRCSCPQGFTQHSQWAQCVDENECALSPPTCGSASCRNTLGGFRCVCPSGFDFDQALGGCQEVDECAGRRGPCSYSCANTPGGFLCGCPQGYFRAGQGHCVSGLGFSPGPQDTPDKEELLSSEACYECKINGLSPRDRPRRSAHRDHQVNLATLDSEALLTLGLNLSHLGRAERILELRPALEGLEGRIRYVIVRGNEQGFFRMHHLRGVSSLQLGRRRPGPGTYRLEVVSHMAGPWGVQPEGQPGPWGQALRLKVQLQLL

SEQ ID NO: 5163 - protein, 2809 aa, Homo sapiens; identical to SEQ ID NO: 5162

SEQ ID NO: 5164 - protein, 2809 aa, Homo sapiens; identical to SEQ ID NO: 5162

SEQ ID NO: 5165 - protein, 171 aa, Homo sapiens
  SITE 1: note = misc_feature - Xaa can be any naturally occurring amino acid
XFTRFEAGKCSVPKAFNTTKTRCCCSKRPGEGWGDPCELCPQEGSDVNECAENPGVCTNGVCVNTDGSFRCECPFGYSLDFTGINCVDTDECSVGHPCGQGTCTNVIGGFECACADGFEPGLMMTCEDIDECSLNPLLCAFRCHNTEGSYLCTCPAGYTLREDGAMCRDVD

SEQ ID NO: 5166 - protein, 188 aa, Homo sapiens
  SITE 1: note = misc_feature - Xaa can be any naturally occurring amino acid
XYQILCGNQAPGFLTDIHTGKPLDVDECGSRESPCQQNADCINIPGSYRCKCTRGYKLSPGGACVGRNECREIPNVCSHGDCMDTEGSYMCLCHRGFQASADQTLCMDIDECDRQPCGNGTCKNIIGSYNCLCFPGFVVTHNGDCVDFDECTTLVGQVCRFGHCLNTAGSFHCLCQDGFELTADGKNC

SEQ ID NO: 5167 - protein, 627 aa, Homo sapiens
MCVPRSGLILSCICLYCGVLLPVLLPNLPFLTCLSMSTLESVTYLPEKGLYCQRLPSSRTHGGTESLKGKNTENMGFYGTLKMIFYKMKRKLDHGSEVRSFSLGKKPCKVSEYTSTTGLVPCSATPTTFGDLRAANGQGQQRRRITSVQPPTGLQEWLKMFQSWSGPEKLLALDELIDSCEPTQVKHMMQVIEPQFQRDFISLLPKELALYVLSFLEPKDLLQAAQTCRYWRILAEDNLLWREKCKEEGIDEPLHIKRRKVIKPGFIHSPWKSAYIRQHRIDTNWRRGELKSPKVLKGHDDHVITCLQFCGNRIVSGSDDNTLKVWSAVTGKCLRTLVGHTGGVWSSQMRDNIIISGSTDRTLKVWNAETGECIHTLYGHTSTVRCMHLHEKRVVSGSRDATLRVWDIETGQCLHVLMGHVAAVRCVQYDGRRVVSGAYDFMVKVWDPETETCLHTLQGHTNRVYSLQFDGIHVVSGSLDTSIRVWDVETGNCIHTLTGHQSLTSGMELKDNILVSGNADSTVKIWDIKTGQCLQTLQGPNKHQSAVTCLQFNKNFVITSSDDGTVKLWDLKTGEFIRNLVTLESGGSGGVVWRIRASNTKLVCAVGSRNGTEETKLLVLDFDVDMK

SEQ ID NO: 5168 - protein, 627 aa, Homo sapiens; identical to SEQ ID NO: 5167

SEQ ID NO: 5169 - protein, 70 aa, Homo sapiens
MNQELLSVGSKRRRTGGSLRGNPSSSQVDEEQMNRVVEEEQQQQLRQQEEEHTARNGEVVGVEPRPGGQN

SEQ ID NO: 5170 - protein, 70 aa, Homo sapiens; identical to SEQ ID NO: 5169

SEQ ID NO: 5171 - protein, 70 aa, Homo sapiens; identical to SEQ ID NO: 5169

SEQ ID NO: 5172 - protein, 158 aa, Homo sapiens
MNQELLSVGSKRRRTGGSLRGNPSSSQVDEEQMNRVVEEEQQQQLRQQEEEHTARNGEVVGVEPRPGGQNDSQQGQLEENNNRFISVDEDSSGNQEEQEEDEEHAGEQDEEDEEEEEMDQESDDFDQSDDSSREDEHTHTNSVTNSSSIVDLPVHQLS

SEQ ID NO: 5173 - protein, 707 aa, Homo sapiens
MNQELLSVGSKRRRTGGSLRGNPSSSQVDEEQMNRVVEEEQQQQLRQQEEEHTARNGEVVGVEPRPGGQNDSQQGQLEENNNRFISVDEDSSGNQEEQEEDEEHAGEQDEEDEEEEEMDQESDDFDQSDDSSREDEHTHTNSVTNSSSIVDLPVHQLSSPFYTKTTKMKRKLDHGSEVRSFSLGKKPCKVSEYTSTTGLVPCSATPTTFGDLRAANGQGQQRRRITSVQPPTGLQEWLKMFQSWSGPEKLLALDELIDSCEPTQVKHMMQVIEPQFQRDFISLLPKELALYVLSFLEPKDLLQAAQTCRYWRILAEDNLLWREKCKEEGIDEPLHIKRRKVIKPGFIHSPWKSAYIRQHRIDTNWRRGELKSPKVLKGHDDHVITCLQFCGNRIVSGSDDNTLKVWSAVTGKCLRTLVGHTGGVWSSQMRDNIIISGSTDRTLKVWNAETGECIHTLYGHTSTVRCMHLHEKRVVSGSRDATLRVWDIETGQCLHVLMGHVAAVRCVQYDGRRVVSGAYDFMVKVWDPETETCLHTLQGHTNRVYSLQFDGIHVVSGSLDTSIRVWDVETGNCIHTLTGHQSLTSGMELKDNILVSGNADSTVKIWDIKTGQCLQTLQGPNKHQSAVTCLQFNKNFVITSSDDGTVKLWDLKTGEFIRNLVTLESGGSGGVVWRIRASNTKLVCAVGSRNGTEETKLLVLDFDVDMK

SEQ ID NO: 5174 - protein, 707 aa, Homo sapiens; identical to SEQ ID NO: 5173

SEQ ID NO: 5175 - protein, 707 aa, Homo sapiens; identical to SEQ ID NO: 5173

SEQ ID NO: 5176 - protein, 176 aa, Homo sapiens
MNQELLSVGSKRRRTGGSLRGNPSSSQVDEEQMNRVVEEEQQQQLRQQEEEHTARNGEVVGVEPRPGGQNDSQQGQLEENNNRFISVDEDSSGNQEEQEEDEEHAGEQDEEDEEEEEMDQESDDFDQSDDSSREDEHTHTNSVTNSSSIVDLPVHQLSSPFYTKTTKVSIFNILLT

SEQ ID NO: 5177 - protein, 589 aa, Homo sapiens
MSKPGKPTLNHGLVPVDLKSAKEPLPHQTVMKIFSISIIAQGLPFCRRRMKRKLDHGSEVRSFSLGKKPCKVSEYTSTTGLVPCSATPTTFGDLRAANGQGQQRRRITSVQPPTGLQEWLKMFQSWSGPEKLLALDELIDSCEPTQVKHMMQVIEPQFQRDFISLLPKELALYVLSFLEPKDLLQAAQTCRYWRILAEDNLLWREKCKEEGIDEPLHIKRRKVIKPGFIHSPWKSAYIRQHRIDTNWRRGELKSPKVLKGHDDHVITCLQFCGNRIVSGSDDNTLKVWSAVTGKCLRTLVGHTGGVWSSQMRDNIIISGSTDRTLKVWNAETGECIHTLYGHTSTVRCMHLHEKRVVSGSRDATLRVWDIETGQCLHVLMGHVAAVRCVQYDGRRVVSGAYDFMVKVWDPETETCLHTLQGHTNRVYSLQFDGIHVVSGSLDTSIRVWDVETGNCIHTLTGHQSLTSGMELKDNILVSGNADSTVKIWDIKTGQCLQTLQGPNKHQSAVTCLQFNKNFVITSSDDGTVKLWDLKTGEFIRNLVTLESGGSGGVVWRIRASNTKLVCAVGSRNGTEETKLLVLDFDVDMK

SEQ ID NO: 5178 - protein, 179 aa, Homo sapiens
MDPKQTTLLCLGDFPMPFISAKSSPVIPLDGSVKIQCQAIREAYLTQLMIIKNSTYREIGRRLKFWNETDPEFVIDHMDANKAGRYQCQYRIGHYRFRYSDTLELVVTDSIHQDYTTQNLIRMAVAGLVLVALLAILVENWHSHTALNKEASADVAEPSWSQQMCQPGLTFARTPSVCK

SEQ ID NO: 5179 - protein, 253 aa, Homo sapiens
MDPKQTTLLCLGDFPMPFISAKSSPVIPLDGSVKIQCQAIREAYLTQLMIIKNSTYREIGRRLKFWNETDPEFVIDHMDANKAGRYQCQYRIGHYRFRYSDTLELVVTGLYGKPFLSADRGLVLMPGENISLTCSSAHIPFDRFSLAKEGELSLPQHQSGEHPANFSLGPVDLNVSGIYRCYDSIHQDYTTQNLIRMAVAGLVLVALLAILVENWHSHTALNKEASADVAEPSWSQQMCQPGLTFARTPSVCK

SEQ ID NO: 5180 - protein, 275 aa, Homo sapiens
MDPKQTTLLCLGDFPMPFISAKSSPVIPLDGSVKIQCQAIREAYLTQLMIIKNSTYREIGRRLKFWNETDPEFVIDHMDANKAGRYQCQYRIGHYRFRYSDTLELVVTGLYGKPFLSADRGLVLMPGENISLTCSSAHIPFDRFSLAKEGELSLPQHQSGEHPANFSLGPVDLNVSGIYRCYGWYNRSPYLWSFPSNALELVVTDSIHQDYTTQNLIRMAVAGLVLVALLAILVENWHSHTALNKEASADVAEPSWSQQMCQPGLTFARTPSVCK

SEQ ID NO: 5181 - protein, 227 aa, Homo sapiens
MDPKQTTLLCLGDFPMPFISAKSSPVIPLDGSVKIQCQAIREAYLTQLMIIKNSTYREIGRRLKFWNETDPEFVIDHMDANKAGRYQCQYRIGHYRFRYSDTLELVVTGLYGKPFLSADRGLVLMPGENISLTCSSAHIPFDRFSLAKEGELSLPQHQSGEHPANFSLGPVDLNVSGIYRCYGWYNRSPYLWSFPSNALELVVTGRYRPVQPCVWVGCPGPCHRAGI

SEQ ID NO: 5182 - protein, 209 aa, Homo sapiens
MDPKQTTLLCLGDFPMPFISAKSSPVIPLDGSVKIQCQAIREAYLTQLMIIKNSTYREIGRRLKFWNETDPEFVIDHMDANKAGRYQCQYRIGHYRFRYSDTLELVVTGLYGKPFLSADRGLVLMPGENISLTCSSAHIPFDRFSLAKEGELSLPQHQSGEHPANFSLGPVDLNVSGIYRLHPPRLHDAELDPHGRGRTGPRGSLGHTG

SEQ ID NO: 5183 - protein, 178 aa, Homo sapiens
MDPKQTTLLCLGLYGKPFLSADRGLVLMPGENISLTCSSAHIPFDRFSLAKEGELSLPQHQSGEHPANFSLGPVDLNVSGIYRCYGWYNRSPYLWSFPSNALELVVTDSIHQDYTTQNLIRMAVAGLVLVALLAILVENWHSHTALNKEASADVAEPSWSQQMCQPGLTFARTPSVCK

SEQ ID NO: 5184 - protein, 191 aa, Homo sapiens
MDPKQTTLLCLVLCLGQRIQAQEGDFPMPFISAKSSPVIPLDGSVKIQCQAIREAYLTQLMIIKNSTYREIGRRLKFWNETDPEFVIDHMDANKAGRYQCQYRIGHYRFRYSDTLELVVTDSIHQDYTTQNLIRMAVAGLVLVALLAILVENWHSHTALNKEASADVAEPSWSQQMCQPGLTFARTPSVCK

SEQ ID NO: 5185 - protein, 265 aa, Homo sapiens
MDPKQTTLLCLVLCLGQRIQAQEGDFPMPFISAKSSPVIPLDGSVKIQCQAIREAYLTQLMIIKNSTYREIGRRLKFWNETDPEFVIDHMDANKAGRYQCQYRIGHYRFRYSDTLELVVTGLYGKPFLSADRGLVLMPGENISLTCSSAHIPFDRFSLAKEGELSLPQHQSGEHPANFSLGPVDLNVSGIYRCYDSIHQDYTTQNLIRMAVAGLVLVALLAILVENWHSHTALNKEASADVAEPSWSQQMCQPGLTFARTPSVCK

SEQ ID NO: 5186 - protein, 287 aa, Homo sapiens
MDPKQTTLLCLVLCLGQRIQAQEGDFPMPFISAKSSPVIPLDGSVKIQCQAIREAYLTQLMIIKNSTYREIGRRLKFWNETDPEFVIDHMDANKAGRYQCQYRIGHYRFRYSDTLELVVTGLYGKPFLSADRGLVLMPGENISLTCSSAHIPFDRFSLAKEGELSLPQHQSGEHPANFSLGPVDLNVSGIYRCYGWYNRSPYLWSFPSNALELVVTDSIHQDYTTQNLIRMAVAGLVLVALLAILVENWHSHTALNKEASADVAEPSWSQQMCQPGLTFARTPSVCK

SEQ ID NO: 5187 - protein, 239 aa, Homo sapiens
MDPKQTTLLCLVLCLGQRIQAQEGDFPMPFISAKSSPVIPLDGSVKIQCQAIREAYLTQLMIIKNSTYREIGRRLKFWNETDPEFVIDHMDANKAGRYQCQYRIGHYRFRYSDTLELVVTGLYGKPFLSADRGLVLMPGENISLTCSSAHIPFDRFSLAKEGELSLPQHQSGEHPANFSLGPVDLNVSGIYRCYGWYNRSPYLWSFPSNALELVVTGRYRPVQPCVWVGCPGPCHRAGI

SEQ ID NO: 5188 - protein, 1642 aa, Homo sapiens
CPPHSHYEACSYGCPLSCGDLPVPEGCESACREGCVCDAGFVLSGDTCVPVGQCGCLHDDRYYPLGQTFYPGPGCDSLCRCREGGEVSCEPSSCGPHETCRPSGGSLGCVAVGSTTCQASGDPHYTTFDGHRFDFMGTCVYVLAQTCGTRPGLHRFAVLQENVAWGNGRVSVTRVITVQVANFTLRLEQRQWKVTVNGVDMKLPVVLANGQIRASQHGSDVVIETDFGLRVAYDLVYYVRVTVPGNYYQLMCGLCGNYNGDPKDDFQKPNGSQAGNANEFGNSWEEVVSDSPCLPPPTCPPGSEGCIPSEECPPELEKKYQKEEFCGLLSSPTGPLSSCHKLVDPQGPLKDCIFDLCLGGGNLSILCSNIHAYVSACQVAGGHVEPWRNETFCPMECPQNSHYELCADTCSLGCSALSAPLQCPDGCAEGCQCDSGFLYNGQACVPIQQCGCYHNGAYYEPEQTVLIDNCRQQCTCHAGKVVVCQEHSCKPGQVCQPSGGILSCVTKDPCHGVTCRPQETCKEQGGQGVCLPNYEATCWLWGDPHYHSFDGRKFDFQGTCNYVLATTGCPGVSTQGLTPFTVTTKNQNRGNPAVSYVRVVTVAALGTNISIHKDEIGKVRVNGVLTALPVSVADGRISVTQGASKALLVADFGLQVSYDWNWRVDVTLPSSYHGAVCGLCGNMDRNPNNDQVFPNGTLAPSIPIWGGSWRAPGWDPLCWDECRGSCPTCPEDRLEQYEGPGFCGPLAPGTGGPFTTCHAHVPPESFFKGCVLDVCMGGGDRDILCKALASYVAACQAAGVVIEDWRAQVGCEITCPENSHYEVCGPPCPASCPSPAPLTTPAVCEGPCVEGCQCDAGFVLSADRCVPLNNGCGCWANGTYHEAGSEFWADGTCSQWCRCGPGGGSLVCTPASCGLGEVCGLLPSGQHGCQPVSTAECQAWGDPHYVTLDGHRFDFQGTCEYLLSAPCHGPPLGAENFTVTVANEHRGSQAVSYTRSVTLQIYNHSLTLSARWPRKLQVDGVFVTLPFQLDSLLHAHLSGADVVVTTTSGLSLAFDGDSFVRLRVPAAYAGSLCGLCGNYNQDPADDLKAVGGKPAGWQVGGAQGCGECVSKPCPSPCTPEQQESFGGPDACGVISATDGPLAPCHGLVPPAQYFQGCLLDACQVQGHPGGLCPAVATYVAACQAAGAQLREWRRPDFCPFQCPAHSHYELCGDSCPGSCPSLSAPEGCESACREGCVCDAGFVLSGDTCVPVGQCGCLHDDRYYPLGQTFYPGPGCDSLCRCREGGEVSCEPSSCGPHETCRPSGGSLGCVAVGSTTCQASGDPHYTTFDGHRFDFMGTCVYVLAQTCGTRPGLHRFAVLQENVAWGNGRVSVTRVITVQVANFTLRLEQRQWKVTVNGVDMKLPVVLANGQIRASQHGSDVVIETDFGLRVAYDLVYYVRVTVPGNYYQLMCGLCGNYNGDPKDDFQKPNGSQAGNANEFGNSWEEVVPDSPCLPPPTCPPGSAGCIPSDKCPPELEKKYQKEEFCGLLSSPTGPLSSCHKLVDPQGPLKDCIFDLCLGGGNLSILCSNIHAYVSACQAAGGHVEPWRNETFCPMECPQNSHYELCADTCSLGCSALSAPLQCPDGCAEGCQCDSGFLYNG

SEQ ID NO: 5189 - protein, 1132 aa, Homo sapiens
MGALWSWWILWAGATLLWGLTQEASVDLKNTGREEFLTAFLQNYQLAYSKAYPRLLISSLSESPASVSILSQADNTSKKVTVRPGESVMVNISAKAEMIGSKIFQHAVVIHSDYAISVQALNAKPDTAELTLLRPIQALGTEYFVLTPPGTSARNVKEFAVVAGAAGASVSVTLKGSVTFNGKFYPAGDVLRVTLQPYNVAQLQSSVDLSGSKVTASSPVAVLSGHSCAQKHTTCNHVVEQLLPTSAWGTHYVVPTLASQSRYDLAFVVASQATKLTYNHGGITGSRGLQAGDVVEFEVRPSWPLYLSANVGIQVLLFGTGAIRNEVTYDPYLVLIPDVAAYCPAYVVKSVPGCEGVALVVAQTKAISGLTIDGHAVGAKLTWEAVPGSEFSYAEVELGTADMIHTAEATTNLGLLTFGLAKAIGYATAADCGRTVLSPVEPSCEGMQCAAGQRCQVVGGKAGCVAESTAVCRAQGDPHYTTFDGRRYDMMGTCSYTMVELCSEDDTLPAFSVEAKNEHRGSRRVSYVGLVTVRAYSHSVSLTRGEVGFVLVDNQRSRLPVSLSEGRLRVYQSGPRAVVELVFGLVVTYDWDCQLALSLPARFQDQVCGLCGNYNGDPADDFLTPDGALAPDAVEFASSWKLDDGDYLCEDGCQNNCPACTPGQAQHYEGDRLCGMLTKLDGPFAVCHDTLDPRPFLEQCVYDLCVVGGERLSLCRGLSAYAQACLELGISVGDWRSPANCPLSCPANSRYELCGPACPTSCNGAAAPSNCSGRPCVEGCVCLPGFVASGGACVPASSCGCTFQGLQLAPGQEVWADELCQRRCTCNGATHQVTCRDKQSCPAGERCSVQNGLLGCYPDRFGTCQGSGDPHYVSFDGRRFDFMGTCTYLLVGSCGQNAALPAFRVLVENEHRGSQTVSYTRAVRVEARGVKVAVRREYPGQVLVDDVLQYLPFQAADGQVQVFRQGRDAVVRTDFGLTVTYDWNARVTAKVPSSYAEALCGLCGNFNGDPADDLALRGGGQAANALAFGNSWQEETRPGCGATEPGDCPKLDSLVAQQLQSKNECGILADPKGPFRECHSKLDPQGAVRDCVYDRCLLPGQSGPLCDALATYAAACQAAGATVHPWRSEELC

SEQ ID NO: 5190 - protein, 3072 aa, Homo sapiens
  SITE 1: note = misc_feature - Xaa can be any naturally occurring amino acid
XLSCPPHSHYEACSYGCPLSCGDLPVPEGCESACREGCVCDAGFVLSGDTCVPVGQCGCLHDDRYYPLGQTFYPGPGCDSLCRCREGGEVSCEPSSCGPHETCRPSGGSLGCVAVGSTTCQASGDPHYTTFDGHRFDFMGTCVYVLAQTCGTRPGLHRFAVLQENVAWGNGRVSVTRVITVQVANFTLRLEQRQWKVTVNGVDMKLPVVLANGQIRASQHGSDVVIETDFGLRVAYDLVYYVRVTVPGNYYQLMCGLCGNYNGDPKDDFQKPNGSQAGNANEFGNSWEEVVSDSPCLPPPTCPPGSEGCIPSEECPPELEKKYQKEEFCGLLSSPTGPLSSCHKLVDPQGPLKDCIFDLCLGGGNLSILCSNIHAYVSACQVAGGHVEPWRNETFCPMECPQNSHYELCADTCSLGCSALSAPLQCPDGCAEGCQCDSGFLYNGQACVPIQQCGCYHNGAYYEPEQTVLIDNCRQQCTCHAGKVVVCQEHSCKPGQVCQPSGGILSCVTKDPCHGVTCRPQETCKEQGGQGVCLPNYEATCWLWGDPHYHSFDGRKFDFQGTCNYVLATTGCPGVSTQGLTPFTVTTKNQNRGNPAVSYVRVVTVAALGTNISIHKDEIGKVRVNGVLTALPVSVADGRISVTQGASKALLVADFGLQVSYDWNWRVDVTLPSSYHGAVCGLCGNMDRNPNNDQVFPNGTLAPSIPIWGGSWRAPGWDPLCWDECRGSCPTCPEDRLEQYEGPGFCGPLAPGTGGPFTTCHAHVPPESFFKGCVLDVCMGGGDRDILCKALASYVAACQAAGVVIEDWRAQVGCEITCPENSHYEVCGPPCPASCPSPAPLTTPAVCEGPCVEGCQCDAGFVLSADRCVPLNNGCGCWANGTYHEAGSEFWADGTCSQWCRCGPGGGSLVCTPASCGLGEVCGLLPSGQHGCQPVSTAECQAWGDPHYVTLDGHRFDFQGTCEYLLSAPCHGPPLGAENFTVTVANEHRGSQAVSYTRSVTLQIYNHSLTLSARWPRKLQVDGVFVTLPFQLDSLLHAHLSGADVVVTTTSGLSLAFDGDSFVRLRVPAAYAGSLCGLCGNYNQDPADDLKAVGGKPAGWQVGGAQGCGECVSKPCPSPCTPEQQESFGGPDACGVISATDGPLAPCHGLVPPAQYFQGCLLDACQVQGHPGGLCPAVATYVAACQAAGAQLREWRRPDFCPFQCPAHSHYELCGDSCPGSCPSLSAPEGCESACREGCVCDAGFVLSGDTCVPVGQCGCLHDDRYYPLGQTFYPGPGCDSLCRCREGGEVSCEPSSCGPHETCRPSGGSLGCVAVGSTTCQASGDPHYTTFDGHRFDFMGTCVYVLAQTCGTRPGLHRFAVLQENVAWGNGRVSVTRVITVQVANFTLRLEQRQWKVTVNGVDMKLPVVLANGQIRASQHGSDVVIETDFGLRVAYDLVYYVRVTVPGNYYQLMCGLCGNYNGDPKDDFQKPNGSQAGNANEFGNSWEEVVPDSPCLPPPTCPPGSAGCIPSDKCPPELEKKYQKEEFCGLLSSPTGPLSSCHKLVDPQGPLKDCIFDLCLGGGNLSILCSNIHAYVSACQAAGGHVEPWRNETFCPMECPQNSHYELCADTCSLGCSALSAPLQCPDGCAEGCQCDSGFLYNGQACVPIQQCGCYHNGVYYEPEQTVLIDNCRQQCTCHVGKVVVCQEHSCKPGQVCQPSGGILSCVTKDPCHGVTCRPQETCKEQGGQGVCLPNYEATCWLWGDPHYHSFDGRKFDFQGTCNYVLATTGCPGVSTQGLTPFTVTTKNQNRGNPAVSYVRVVTVAALGTNISIHKDEIGKVRVNGVLTALPVSVADGRISVAQGASKALLVADFGLQVSYDWNWRVDVTLPSSYHGAVCGLCGNMDRNPNNDQVFPNGTLAPSIPIWGGSWRAPGWDPLCWDECRGSCPTCPEDRLEQYEGPGFCGPLSSGTGGPFTTCHAHVPPESFFKGCVLDVCMGGGDRDILCKALASYVAACQAAGVVIEDWRAQVGCEITCPENSHYEVCGPPCPASCPSPAPLTTPAVCEGPCVEGCQCDAGFVLSADRCVPLNNGCGCWANGTYHEAGSEFWADGTCSQWCRCGPGGGSLVCTPASCGLGEVCGLLPSGQHGCQPVSTAECQAWGDPHYVTLDGHRFDFQGTCEYLLSAPCHGPPLGAENFTVTVANEHRGSQAVSYTRSVTLQIYNHSLTLSARWPRKLQVDGVFVALPFQLDSLLHAHLSGADVVVTTTSGLSLAFDGDSFVRLRVPAAYAASLCGLCGNYNQDPADDLKAVGGKPAGWQVGGAQGCGECVSKPCPSPCTPEQQESFGGPDACGVISATDGPLAPCHGLVPPAQYFQGCLLDACQVQGHPGGLCPAVATYVAACQAAGAQLGEWRRPDFCPLQCPAHSHYELCGDSCPVSCPSLSAPEGCESACREGCVCDAGFVLSGDTCVPVGQCGCLHDGRYYPLGEVFYPGPECERRCECGPGGHVTCQEGAACGPHEECRLEDGVQACHATGCGRCLANGGIHYITLDGRVYDLHGSCSYVLAQVCHPKPGDEDFSIVLEKNAAGDLQRLLVTVAGQVVSLAQGQQVTVDGEAVALPVAVGRVRVTAEGRNMVLQTTKGLRLLFDGDAHLLMSIPSPFRGRLCGLCGNFNGNWSDDFVLPNGSAASSVETFGAAWRAPGSSKGCGEGCGPQGCPVCLAEETAPYESNEACGQLRNPQGPFATCQAVLSPSEYFRQCVYDLCAQKGDKAFLCRSLAAYTAACQAAGVAVKPWRTDSFCPLHCPAHSHYSICTRTCQGSCAALSGLTGCTTRCFEGCECDDRFLLSQGVCIPVQDCGCTHNGRYLPVNSSLLTSDCSERCSCSSSSGLTCQAAGCPPGRVCEVKAEARNCWATRGLCVLSVGANLTTFDGARGATTSPGVYELSSRCPGLQNTIPWYRVVAEVQICHGKTEAVGQVHIFFQDGMVTLTPNKGVWVNGLRVDLPAEKLASVSVSRTPDGSLLVRQKAGVQVWLGANGKVAVIVSNDHAGKLCGACGNFDGDQTNDWHDSQEKPAMEKWRAQDFSPCYG

SEQ ID NO: 5191 - protein, 250 aa, Homo sapiens
MGKWPPWVSVFQEETITLHCEVLHLPGSSSTQWFLNGTATQTSTPSYRITSASVNDSGEYRCQRGLSGRSDPIQLEIHRGWLLLQVSSRVFMEGEPLALRCHAWKDKLVYNVLYYRNGKAFKFFHWNSNLTILKTNISHNGTYHCSGMGKHRYTSAGISQYTVKGLQLPTPVWFHVLFYLAVGIMFLVNTVLWVTIRKELKRKKKWNLEISLDSGHEKKVISSLQEDRHLEEELKCQEQKEEQLQEGVHR

SEQ ID NO: 5192 - protein, 188 aa, Homo sapiens
MWFLTTLLLWGWLLLQVSSRVFMEGEPLALRCHAWKDKLVYNVLYYRNGKAFKFFHWNSNLTILKTNISHNGTYHCSGMGKHRYTSAGISQYTVKGLQLPTPVWFHVLFYLAVGIMFLVNTVLWVTIRKELKRKKKWNLEISLDSGHEKKVISSLQEDRHLEEELKCQEQKEEQLQEGVHRKEPQGAT

SEQ ID NO: 5193 - protein, 224 aa, Homo sapiens
MWFLTTLLLWVPVDGQVDTTKAVITLQPPWVSVFQEETITLHCEVLHLPGSSSTQWFLNGTATQTSTPSYRITSASVNDSGEYRCQRGLSGRSDPIQLEIHRGWLLLQVSSRVFMEGEPLALRCHAWKDKLVYNVLYYRNGKAFKFFHWNSNLTILKTNISHNGTYHCSGMGKHRYTSAGISQYTVKELFPAPVLNASVTSPLLEGNLVTLSCETKLLLQRPGL

SEQ ID NO: 5194 - protein, 224 aa, Homo sapiens; identical to SEQ ID NO: 5193

SEQ ID NO: 5195 - protein, 280 aa, Homo sapiens
MWFLTTLLLWVPVDGQVDTTKAVITLQPPWVSVFQEETITLHCEVLHLPGSSSTQWFLNGTATQTSTPSYRITSASVNDSGEYRCQRGLSGRSDPIQLEIHRGWLLLQVSSRVFMEGEPLALRCHAWKDKLVYNVLYYRNGKAFKFFHWNSNLTILKTNISHNGTYHCSGMGKHRYTSAGISQYTVKGLQLPTPVWFHVLFYLAVGIMFLVNTVLWVTIRKELKRKKKWNLEISLDSGHEKKVISSLQEDRHLEEELKCQEQKEEQLQEGVHRKEPQGAT

SEQ ID NO: 5196 - protein, 225 aa, Homo sapiens
MWFLTTLLLWVPVDGQVVDTTKAVITLQPPWVSVFQEETITLHCEVLHLPGSSSTQWFLNGTATQTSTPSYRITSASVNDSGEYRCQRGLSGRSDPIQLEIHRGWLLLQVSSRVFMEGEPLALRCHAWKDKLVYNVLYYRNGKAFKFFHWNSNLTILKTNISHNGTYHCSGMGKHRYTSAGISQYTVKELFPAPVLNASVTSPLLEGNLVTLSCETKLLLQRPGL

SEQ ID NO: 5197 - protein, 359 aa, Homo sapiens
MAEGTLWQILCVSSDAQPQTFEGVKGADPPTLPPGSFLPGPVLWWGSLARLQTEKSDEVSRKGNWWVTEMGGGAGERLFTSSCLVGLVPLGLRISLVTCPLQCGIMWQLLLPTALLLLVSAGMRTEDLPKAVVFLEPQWYRVLEKDSVTLKCQGAYSPEDNSTQWFHNESLISSQASSYFIDAATVDDSGEYRCQTNLSTLSDPVQLEVHIGWLLLQAPRWVFKEEDPIHLRCHSWKNTALHKVTYLQNGKGRKYFHHNSDFYIPKATLKDSGSYFCRGLFGSKNVSSETVNITITQGLAVSTISSFFPPGYQVSFCLVMVLLFAVDTGLYFSVKTNIRSSTRDWKDHKFKWRKDPQDK

SEQ ID NO: 5198 - protein, 290 aa, Homo sapiens
MGGGAGERLFTSSCLVGLVPLGLRISLVTCPLQCGIMWQLLLPTALLLLVSAGMRTEDLPKAVVFLEPQWYRVLEKDSVTLKCQGAYSPEDNSTQWFHNESLISSQASSYFIDAATVDDSGEYRCQTNLSTLSDPVQLEVHIGWLLLQAPRWVFKEEDPIHLRCHSWKNTALHKVTYLQNGKGRKYFHHNSDFYIPKATLKDSGSYFCRGLFGSKNVSSETVNITITQGLAVSTISSFFPPGYQVSFCLVMVLLFAVDTGLYFSVKTNIRSSTRDWKDHKFKWRKDPQDK

SEQ ID NO: 5199 - protein, 105 aa, Homo sapiens
MWQLLLPTALLLLVSAGMRTDLPKAVVFLEPQWYRVLEKDSVTLKCQGAYSPEDNSTQWFHNESLISSQASSYFIDAATVDDSGEYRCQTNLSTLSDPVQLEVHI

SEQ ID NO: 5200 - protein, 254 aa, Homo sapiens
MWQLLLPTALLLLVSAGMRTEDLPKAVVFLEPQWYRVLEKDSVTLKCQGAYSPEDNSTQWFHNESLISSQASSYFIDAATVDDSGEYRCQTNLSTLSDPVQLEVHIGWLLLQAPRWVFKEEDPIHLRCHSWKNTALHKVTYLQNGKGRKYFHHNSDFYIPKATLKDSGSYFCRGLFGSKNVSSETVNITITQGLAVSTISSFFPPGYQVSFCLVMVLLFAVDTGLYFSVKTNIRSSTRDWKDHKFKWRKDPQDK

SEQ ID NO: 5201 - protein, 254 aa, Homo sapiens; identical to SEQ ID NO: 5200

SEQ ID NO: 5202 - protein, 254 aa, Homo sapiens; identical to SEQ ID NO: 5200

SEQ ID NO: 5203 - protein, 307 aa, Homo sapiens
QTEKSDEVSRKGNWWVTEMGGGAGERLFTSSCLVGLVPLGLRISLVTCPLQCGIMWQLLLPTALLLLVSAGMRTDLPKAVVFLEPQWYRVLEKDSVTLKCQGAYSPEDNSTQWFHNESLISSQASSYFIDAATVDDSGEYRCQTNLSTLSDPVQLEVHIGWLLLQAPRWVFKEEDPIHLRCHSWKNTALHKVTYLQNGKGRKYFHHNSDFYIPKATLKDSGSYFCRGLFGSKNVSSETVNITITQGLAVSTISSFFPPGYQVSFCLVMVLLFAVDTGLYFSVKTNIRSSTRDWKDHKFKWRKDPQDK

SEQ ID NO: 5204 - protein, 211 aa, Homo sapiens
GVPRPQPWALGLLLFLLPGSLGAESHLSLLYHLTAVSSPAPGTPAFWVSGWLGPQQYLSYNSLRGEAEPCGAWVWENQVSWYWEKETTDLRIKEKLFLEAFKALGGKGPYTLQGLLGCELGPDNTSVPTAKFALNGEEFMNFDLKQGTWGGDWPEALAISQRWQQQDKAANKELTFLLFSCPHRLREHLERGRGNLEWKEPKARQIFCAWI

SEQ ID NO: 5205 - protein, 273 aa, Homo sapiens
MGVPRPQPWALGLLLFLLPGSLGAESHLSLLYHLTAVSSPAPGTPAFWVSGWLGPQQYLSYNSLRGEAEPCGAWVWENQVSWYWEKETTDLRIKEKLFLEAFKALGGKEPPSMRLKARPSSPGFSVLTCSAFSFYPPELQLRFLRNGLAAGTGQGDFGPNSDGSFHASSSLTVKSGDEHHYCCIVQHAGLAQPLRVELESPAKSSVLVVGIVIGVLLLTAAAVGGALLWRRMRSGLPAPWISLRGDDTGVLLPTPGEAQDADLKDVNVIPATA

SEQ ID NO: 5206 - protein, 141 aa, Homo sapiens
MGVPRPQPWALGLLLFLLPGSLGAESHLSLLYHLTAVSSPAPGTPAFWVSGWLGPQQYLSYNSLRGEAEPCGAWVWENQVSWYWEKETTDLRIKEKLFLEAFKALGGKGPYTLQGLLGCELGPDNTSVPTAKFALNGEEFM

SEQ ID NO: 5207 - protein, 167 aa, Homo sapiens
MGVPRPQPWALGLLLFLLPGSLGAESHLSLLYHLTAVSSPAPGTPAFWVSGWLGPQQYLSYNSLRGEAEPCGAWVWENQVSWYWEKETTDLRIKEKLFLEAFKALGGKGPYTLQGLLGCELGPDNTSVPTAKFALNGEEFMNFDLKQGTWGGDWPEALAISQRWQQQ

SEQ ID NO: 5208 - protein, 225 aa, Homo sapiens
MGVPRPQPWALGLLLFLLPGSLGAESHLSLLYHLTAVSSPAPGTPAFWVSGWLGPQQYLSYNSLRGEAEPCGAWVWENQVSWYWEKETTDLRIKEKLFLEAFKALGGKGPYTLQGLLGCELGPDNTSVPTAKFALNGEEFMNFDLKQGTWGGDWPEALAISQRWQQQDKAANKELTFLLFSCPHRLREHLERGRGNLEWKDTVSHYVAQAGLELLGSSDSPALVS

SEQ ID NO: 5209 - protein, 365 aa, Homo sapiens
MGVPRPQPWALGLLLFLLPGSLGAESHLSLLYHLTAVSSPAPGTPAFWVSGWLGPQQYLSYNSLRGEAEPCGAWVWENQVSWYWEKETTDLRIKEKLFLEAFKALGGKGPYTLQGLLGCELGPDNTSVPTAKFALNGEEFMNFDLKQGTWGGDWPEALAISQRWQQQDKAANKELTFLLFSCPHRLREHLERGRGNLEWKEPPSMRLKARPSSPGFSVLTCSAFSFYPPELQLRFLRNGLAAGTGQGDFGPNSDGSFHASSSLTVKSGDEHHYCCIVQHAGLAQPLRVELESPAKSSVLVVGIVIGVLLLTAAAVGGALLWRRMRSGLPAPWISLRGDDTGVLLPTPGEAQDADLKDVNVIPATA

SEQ ID NO: 5210 - protein, 365 aa, Homo sapiens; identical to SEQ ID NO: 5209

SEQ ID NO: 5211 - protein, 99 aa, Homo sapiens
MGVPRPQPWALGLLLFLLPGSLGAESPAKSSVLVVGIVIGVLLLTAAAVGGALLWRRMRSGLPAPWISLRGDDTGVLLPTPGEAQDADLKDVNVIPATA

SEQ ID NO: 5212 - protein, 39 aa, Homo sapiens
MNFDLKQGTWGGDWPEALAISQRWQQQDKAANKELTFLL

SEQ ID NO: 5213 - protein, 153 aa, Homo sapiens
WEKETTDLRIKEKLFLEAFKALGGKGPYTLQGLLGCELGPDNTSVPTAKFALNGEEFMNFDLKQGTWGGDWPEALAISQRWQQQDKAANKELTFLLFSCPHRLREHLERGRGNLEWKAPWISLRGDDTGVLLPTPGEAQDADLKDVNVIPATA

SEQ ID NO: 5214 - protein, 189 aa, Homo sapiens
  SITE 1: note = misc_feature - Xaa can be any naturally occurring amino acid
XSSPAPGTPAFWVSGWLGPQQYLSYNSLRGEAEPCGAWVWENQVSWYWEKETTDLRIKEKLFLEAFKALGGKGPYTLQGLLGCELGPDNTSVPTAKFALNGEEFMNFDLKQGTWGGDWPEALAISQRWQQQDKAANKELTFLLFSCPHRLREHLERGRGNLEWKAPSPSTLRSCNFGSCGMGWPLAPAR

SEQ ID NO: 5215 - protein, 141 aa, Homo sapiens
MDFWLWPLYFLPEMESCCVAQDGLELVALSDPPGSASQSAGITVSGALRILPEVKVEGELGGSVTIKCPLPEMHVRIYLCREMAGSGTCGTVVSTTNFIKAEYKGRVTLKQYPRKNLFLVEVTQLTESDSGVYACGAGMNT

SEQ ID NO: 5216 - protein, 278 aa, Homo sapiens
MDFWLWPLYFLPEYEPSWEEQPMPETPKWFHLPYLFQMPAYASSSKFVTRVTTPAQRGKVPPVHHSSPTTQITHRPRVSRASSVAGDKPRTFLPSTTASKISALEGLLKPQTPSYNHHTRLHRQRALDYGSQSGREGQGFHILIPTILGLFLLALLGLVVKRAVERRKALSRRARRLAVRMRALESSQRPRGSPRPRSQNNIYSACPRRARGADAAGTGEAPVPGPGAPLPPAPLQVSESPWLHAPSLKTSCEYVSLYHQPAAMMEDSDSDDYINVPA

SEQ ID NO: 5217 - protein, 125 aa, Homo sapiens
MDFWLWPLYFLPVSGALRILPEVKVEGELGGSVTIKCPLPEMHVRIYLCREMAGSGTCGTVVSTTNFIKAEYKGRVTLKQYPRKNLFLVENTSHHGKSSQCLRLQNGFICPICSRCLHMPVLPNS

SEQ ID NO: 5218 - protein, 147 aa, Homo sapiens
MDFWLWPLYFLPVSGALRILPEVKVEGELGGSVTIKCPLPEMHVRIYLCREMAGSGTCGTVVSTTNFIKAEYKGRVTLKQYPRKNLFLVEVTQLTESDSGVYACGAGMNTDRGKTQKVTLNVHSEYEPSWEEQPMPETPKWFHLPYL

SEQ ID NO: 5219 - protein, 151 aa, Homo sapiens
MDFWLWPLYFLPVSGALRILPEVKVEGELGGSVTIKCPLPEMHVRIYLCREMAGSGTCGTVVSTTNFIKAEYKGRVTLKQYPRKNLFLVEVTQLTESDSGVYACGAGMNTDRGKTQKVTLNVHSEYEPSWEEQPMPETPKWFHLPYLFQMP

SEQ ID NO: 5220 - protein, 390 aa, Homo sapiens
MDFWLWPLYFLPVSGALRILPEVKVEGELGGSVTIKCPLPEMHVRIYLCREMAGSGTCGTVVSTTNFIKAEYKGRVTLKQYPRKNLFLVEVTQLTESDSGVYACGAGMNTDRGKTQKVTLNVHSEYEPSWEEQPMPETPKWFHLPYLFQMPAYASSSKFVTRVTTPAQRGKVPPVHHSSPTTQITHRPRVSRASSVAGDKPRTFLPSTTASKISALEGLLKPQTPSYNHHTRLHRQRALDYGSQSGREGQGFHILIPTILGLFLLALLGLVVKRAVERRKALSRRARRLAVRMRALESSQRPRGSPRPRSQNNIYSACPRRARGADAAGTGEAPVPGPGAPLPPAPLQVSESPWLHAPSLKTSCEYVSLYHQPAAMMEDSDSDDYINVPA

SEQ ID NO: 5221 - protein, 306 aa, Homo sapiens
MDFWLWPLYFLPVSGALRILPEVKVEGELGGSVTIKCPLPEMHVRIYLCREMAGSGTCGTVVSTTNFIKAEYKGRVTLKQYPRKNLFLVEVTQLTESDSGVYACGAGMNTDRGKTQKVTLNVHSEYEPSWEEQPMPETPKWFHLPYLFQMPAYASSSKFVTRVTTPAQRGKVPPVHHSSPTTQITHRPRVSRASSVAGDKPRTFLPSTTASKISALEGLLKPQTPSYNHHTRLHRQSPLQAGPPTGREDARPGELPEAPRVAATALPKQHLQRLPAARSWSGRCRHRGGPRSRPRSAVAPRPAAGV

SEQ ID NO: 5222 - protein, 326 aa, Homo sapiens
MELSGATMARGLAVLLVLFLHIKNLPAQAADTCPEVKVVGLEGSDKLTILRGCPGLPGAPGPKGEAGVIGERGERGLPGAPGKAGPVGPKGDRGEKGMRGEKGDAGQSQSCATGPRNCKDLLDRGYFLSGWHTIYLPDCRPLTVLCDMDTDGGGWTVFQRRMDGSVDFYRDWAAYKQGFGSQLGEFWLGNDNIHALTAQGSSELRVDLVDFEGNHQFAKYKSFKVADEAEKYKLVLGAFVGGSAGNSLTGHNNNFFSTKDQDNDVSSSNCAEKFQGAWWYADCHASNLNGLYLMGPHESYANGINWSAAKGYKYSYKVSEMKVRPA

SEQ ID NO: 5223 - protein, 360 aa, Homo sapiens
MELSGATMARGLAVLLVLFLHIKNLPAQAADTCPEVKVVGLEGSDKLTILRGCPGLPGAPGPKGEAGVIGERGERGLPGAPGKAGPVGPKGDRGEKGMRGEKGDAGQSQSCATGPRNCKDLLDRGYFLSGWHTIYLPDCRPLTVLCDMDTDGGGWTVFQRRMDGSVDFYRDWAAYKQGFGSQTHSHDAHSCPFAPSSVKPPHAHNLTRGRIMFLNMFTLGQKSFTSFNVCFLNTSGFDHFPVSVARQVFPWNLVSREESGPLFSRWHYRCSGRLSDFCEDFPPPVIDTGRSSPPPPSLPHPPMPHSQHFTLLEKGHFGVQKTLTKKGESLVGTFLLPTTAEFMLWAGWLLGRDKHLALTK

SEQ ID NO: 5224 - protein, 313 aa, Homo sapiens
MELDRAVGVLGAATLLLSFLGMAWALQAADTCPEVKMVGLEGSDKLTILRGCPGLPGAPGPKGEAGTNGKRGERGPPGPPGKAGPPGPNGAPGEPQPCLTGPRTCKDLLDRGHFLSGWHTIYLPDCRPLTVLCDMDTDGGGWTVFQRRVDGSVDFYRDWATYKQGFGSRLGEFWLGNDNIHALTAQGTSELRVDLVDFEDNYQFAKYRSFKVADEAEKYNLVLGAFVEGSAGDSLTFHNNQSFSTKDQDNDLNTGNCAVMFQGAWWYKNCHVSNLNGRYLRGTHGSFANGINWKSGKGYNYSYKVSEMKVRPA

SEQ ID NO: 5225 - protein, 275 aa, Homo sapiens
MELDRAVGVLGAATLLLSFLGMAWALQAADTCPGERGPPGPPGKAGPPGPNGAPGEPQPCLTGPRTCKDLLDRGHFLSGWHTIYLPDCRPLTVLCDMDTDGGGWTVFQRRVDGSVDFYRDWATYKQGFGSRLGEFWLGNDNIHALTAQGTSELRVDLVDFEDNYQFAKYRSFKVADEAEKYNLVLGAFVEGSAGDSLTFHNNQSFSTKDQDNDLNTGNCAVMFQGAWWYKNCHVSNLNGRYLRGTHGSFANGINWKSGKGYNYSYKVSEMKVRPA

SEQ ID NO: 5226 - protein, 299 aa, Homo sapiens
MDLLWILPSLWLLLLGGPACLKTQEHPSCPGPRELEASKVVLLPSCPGAPGSPGEKGAPGPQGPPGPPGKMGPKGEPGDPVNLLRCQEGPRNCRELLSQGATLSGWYHLCLPEGRALPVFCDMDTEGGGWLVFQRRQDGSVDFFRSWSSYRAGFGNQESEFWLGNENLHQLTLQGNWELRVELEDFNGNRTFAHYATFRLLGEVDHYQLALGKFSEGTAGDSLSLHSGRPFTTYDADHDSSNSNCAVIVHGAWWYASCYRSNLNGRYAVSEAAAHKYGIDWASGRGVGHPYRRVRMMLR

SEQ ID NO: 5227 - protein, 288 aa, Homo sapiens
MDLLWILPSLWLLLLGGPACLKTQEHPSCPGPRELEASKVVLLPSCPGAPGSPGEKGAPGPQGPPGPPGKMGPKGEPGPRNCRELLSQGATLSGWYHLCLPEGRALPVFCDMDTEGGGWLVFQRRQDGSVDFFRSWSSYRAGFGNQESEFWLGNENLHQLTLQGNWELRVELEDFNGNRTFAHYATFRLLGEVDHYQLALGKFSEGTAGDSLSLHSGRPFTTYDADHDSSNSNCAVIVHGAWWYASCYRSNLNGRYAVSEAAAHKYGIDWASGRGVGHPYRRVRMMLR

SEQ ID NO: 5228 - protein, 429 aa, Homo sapiens
MLPRLLLLICAPLCEPAELFLIASPSHPTEGSPVTLTCKMPFLQSSDAQFQFCFFRDTRALGPGWSSSPKLQIAAMWKEDTGSYWCEAQTMASKVLRSRRSQINVHRVPVADVSLETQPPGGQVMEGDRLVLICSVAMGTGDITFLWYKGAVGLNLQSKTQRSLTAEYEIPSVRESDAEQYYCVAENGYGPSPSGLVSITVRIPVSRPILMLRAPRAQAAVEDVLELHCEALRGSPPILYWFYHEDITLGSRSAPSGGGASFNLSLTEEHSGNYSCEANNGLGAQRSEAVTLNFTVPTGARSNHLTSGVIEGLLSTLGPATVALLFCYGLKRKIGRRSARDPLRSLPSPLPQEFTYLNSPTPGQLQPIYENVNVVSGDEVYSLAYYNQPEQESVAAETLGTHMEDKVSLDIYSRLRKANITDVDYEDAM

SEQ ID NO: 5229 - protein, 366 aa, Homo sapiens
MLPRLLLLICAPLCEPAELFLIASPSHPTEGSPVTLTCKMPFLQSSDAQFQFCFFRDTRALGPGWSSSPKLQIAAMWKEDTGSYWCEAQTMASKVLRSRRSQINVHRVPVADVSLETQPPGGQVMEGDRLVLICSVAMGTGDITFLWYKGAVGLNLQSKTQRSLTAEYEIPSVRESDAEQYYCVAENGYGPSPSGLVSITVRIPVSRPILMLRAPRAQAAVEDVLELHCEALRGSPPILYWFYHEDITLGSRSAPSGGGASFNLSLTEEHSGNYSCEANNGLGAQRSEAVTLNFTGRRSARDPLRSLPSPLPQEFTYLNSPTPGQLQPIYENEPREQSVAVHGRQQHSSEQKAQKPWGHIWRTRFP

SEQ ID NO: 5230 - protein, 428 aa, Homo sapiens
MLPRLLLLICAPLCEPAELFLIASPSHPTEGSPVTLTCKMPFLQSSDAQFQFCFFRDTRALGPGWSSSPKLQIAAMWKEDTGSYWCEAQTMASKVLRSRRSQINVHRVPVADVSLETQPPGGQVMEGDRLVLICSVAMGTGDITFLWYKGAVGLNLQSKTQRSLTAEYEIPSVRESDAEQYYCVAENGYGPSPSGLVSITVRIPVSRPILMLRAPRAQAAVEDVLELHCEALRGSPPILYWFYHEDITLGSRSAPSGGGASFNLSLTEEHSGNYSCEANNGLGAQRSEAVTLNFTVPTGARSNHLTSGVIEGLLSTLGPATVALLFCYGLKRKIGRRSARDPLRSLPSPLPQEFTYLNSPTPGQLQPIYENVNVVSGDEVYSLAYYNQPEQESVAETLGTHMEDKVSLDIYSRLRKANITDVDYEDAM

SEQ ID NO: 5231 - protein, 742 aa, Homo sapiens
MLLWLLLLILTPGREQSGVAPKAVLLLNPPWSTAFKGEKVALICSSISHSLAQGDTYWYHDEKLLKIKHDKIQITEPGNYQCKTRGSSLSDAVHVEFSPDWLILQALHPVFEGDNVILRCQGKDNKNTHQKVYYKDGKQLPNSYNLEKITVNSVSRDNSKYHCTAYRKFYILDIEVTSKPLNIQVQELFLHPVLRASSSTPIEGSPMTLTCETQLSPQRPDVQLQFSLFRDSQTLGLGWSRSPRLQIPAMWTEDSGSYWCEVETVTHSIKKRSLRSQIRVQRVPVSNVNLEIRPTGGQLIEGENMVLICSVAQGSGTVTFSWHKEGRVRSLGRKTQRSLLAELHVLTVKESDAGRYYCAADNVHSPILSTWIRVTVRIPVSHPVLTFRAPRAHTVVGDLLELHCESLRGSPPILYRFYHEDVTLGNSSAPSGGGASFNLSLTAEHSGNYSCDADNGLGAQHSHGVSLRVTVPVSRPVLTLRAPGAQAVVGDLLELHCESLRGSFPILYWFYHEDDTLGNISAHSGGGASFNLSLTTEHSGNYSCEADNGLGAQHSKVVTLNVTGTSRNRTGLTAAGITGLVLSILVLAAAAALLHYARARRKPGGLSATGTSSHSPSECQEPSSSRPSRIDPQEPTHSKPLAPMELEPMYSNVNPGDSNPIYSQIWSIQHTKENSANCPMMHQEHEELTVLYSELKKTHPDDSAGEASSRGRAHEEDDEENYENILNPRKNKVQDFPCLCNT

SEQ ID NO: 5232 - protein, 734 aa, Homo sapiens
MLLWLLLLILTPGREQSGVAPKAVLLLNPPWSTAFKGEKVALICSSISHSLAQGDTYWYHDEKLLKIKHDKIQITEPGNYQCKTRGSSLSDAVHVEFSPDWLILQALHPVFEGDNVILRCQGKDNKNTHQKVYYKDGKQLPNSYNLEKITVNSVSRDNSKYHCTAYRKFYILDIEVTSKPLNIQVQELFLHPVLRASSSTPIEGSPMTLTCETQLSPQRPDVQLQFSLFRDSQTLGLGWSRSPRLQIPAMWTEDSGSYWCEVETVTHSIKKRSLRSQIRVQRVPVSNVNLEIRPTGGQLIEGENMVLICSVAQGSGTVTFSWHKEGRVRSLGRKTQRSLLAELHVLTVKESDAGRYYCAADNVHSPILSTWIRVTVRIPVSHPVLTFRAPRAHTVVGDLLELHCESLRGSPPILYRFYHEDVTLGNSSAPSGGGASFNLSLTAEHSGNYSCDADNGLGAQHSHGVSLRVTVPVSRPVLTLRAPGAQAVVGDLLELHCESLRGSFPILYWFYHEDDTLGNISAHSGGGASFNLSLTTEHSGNYSCEADNGLGAQHSKVVTLNVTGTSRNRTGLTAAGITGLVLSILVLAAAAALLHYARARRKPGGLSATGTSSHSPSECQEPSSSRPSRIDPQEPTHSKPLAPMELEPMYSNVNPGDSNPIYSQIWSIQHTKENSANCPMMHQEHEELTVLYSELKKTHPDDSAGEASSRGRAHEEDDEENYENVPRVLLASDH

SEQ ID NO: 5233 - protein, 256 aa, Homo sapiens
MLLWLLLLILTPGREQSGVAPKAVLLLNPPWSTAFKGEKVALICSSISHSLAQGDTYWYHDEKLLKIKHDKIQITEPGNYQCKTRGSSLSDAVHVEFSPDWLILQALHPVFEGDNVILRCQGKDNKNTHQKVYYKDGKQLPNSYNLEKITVNSVSRDNSKYHCTAYRKFYILDIEVTSKPLNIQVQELFLHPVLRASSSTPIEGSPMTLTCETQLSPQRPDVQLQFSLFRDSQTLGLGWSRSPRLQIPAMWTEDSG

SEQ ID NO: 5234 - protein, 740 aa, Homo sapiens
MLLWLLLLILTPGREQSGVAPKAVLLLNPPWSTAFKGEKVALICSSISHSLAQGDTYWYHDEKLLKIKHDKIQITEPGNYQCKTRGSSLSDAVHVEFSPDWLILQALHPVFEGDNVILRCQGKDNKNTHQKVYYKDGKQLPNSYNLEKITVNSVSRDNSKYHCTAYRKFYILDIEVTSKPLNIQVQELFLHPVLRASSSTPIEGSPMTLTCETQLSPQRPDVQLQFSLFRDSQTLGLGWSRSPRLQIPAMWTEDSGSYWCEVETVTHSIKKRSLRSQIRVQRVPVSNVNLEIRPTGGQLIEGENMVLICSVAQGSGTVTFSWHKEGRVRSLGRKTQRSLLAELHVLTVKESDAGRYYCAADNVHSPILSTWIRVTVRTLLSPSVPVSHPVLTFRAPRAHTVVGDLLELHCESLRGSPPILYRFYHEDVTLGNSSAPSGGGASFNLSLTAEHSGNYSCDADNGLGAQHSHGVSLRVTVPVSRPVLTLRAPGAQAVVGDLLELHCESLRGSFPILYWFYHEDDTLGNISAHSGGGASFNLSLTTEHSGNYSCEADNGLGAQHSKVVTLNVTGTSRNRTGLTAAGITGLVLSILVLAAAAALLHYARARRKPGGLSATGTSSHSPSECQEPSSSRPSRIDPQEPTHSKPLAPMELEPMYSNVNPGDSNPIYSQIWSIQHTKENSANCPMMHQEHEELTVLYSELKKTHPDDSAGEASSRGRAHEEDDEENYENVPRVLLASDH

SEQ ID NO: 5235 - protein, 734 aa, Homo sapiens; identical to SEQ ID NO: 5232

SEQ ID NO: 5236 - protein, 639 aa, Homo sapiens
MLLWLLLLILTPGREQSGVAPKAVLLLNPPWSTAFKGEKVALICSSISHSLAQGDTYWYHDEKLLKIKHDKIQITEPGNYQCKTRGSSLSDAVHVEFSPDWLILQALHPVFEGDNVILRCQGKDNKNTHQKVYYKDGKQLPNSYNLEKITVNSVSRDNSKYHCTAYRKFYILDIEVTSKPLNIQVQGVPVSNVNLEIRPTGGQLIEGENMVLICSVAQGSGTVTFSWHKEGRVRSLGRKTQRSLLAELHVLTVKESDAGRYYCAADNVHSPILSTWIRVTVRIPVSHPVLTFRAPRAHTVVGDLLELHCESLRGSPPILYRFYHEDVTLGNSSAPSGGGASFNLSLTAEHSGNYSCDADNGLGAQHSHGVSLRVTVPVSRPVLTLRAPGAQAVVGDLLELHCESLRGSFPILYWFYHEDDTLGNISAHSGGGASFNLSLTTEHSGNYSCEADNGLGAQHSKVVTLNVTGTSRNRTGLTAAGITGLVLSILVLAAAAALLHYARARRKPGGLSATGTSSHSPSECQEPSSSRPSRIDPQEPTHSKPLAPMELEPMYSNVNPGDSNPIYSQIWSIQHTKENSANCPMMHQEHEELTVLYSELKKTHPDDSAGEASSRGRAHEEDDEENYENVPRVLLASDH

SEQ ID NO: 5237 - protein, 592 aa, Homo sapiens
MLLWVILLVLAPVSGQFARTPRPIIFLQPPWTTVFQGERVTLTCKGFRFYSPQKTKWYHRYLGKEILRETPDNILEVQESGEYRCQAQGSPLSSPVHLDFSSASLILQAPLSVFEGDSVVLRCRAKAEVTLNNTIYKNDNVLAFLNKRTDFHIPHACLKDNGAYRCTGYKESCCPVSSNTVKIQVQEPFTRPVLRASSFQPISGNPVTLTCETQLSLERSDVPLRFRFFRDDQTLGLGWSLSPNFQITAMWSKDSGFYWCKAATMPYSVISDSPRSWIQVQIPASHPVLTLSPEKALNFEGTKVTLHCETQEDSLRTLYRFYHEGVPLRHKSVRCERGASISFSLTTENSGNYYCTADNGLGAKPSKAVSLSVTVPVSHPVLNLSSPEDLIFEGAKVTLHCEAQRGSLPILYQFHHEGAALERRSANSAGGVAISFSLTAEHSGNYYCTADNGFGPQRSKAVSLSVTVPVSHPVLTLSSAEALTFEGATVTLHCEVQRGSPQILYQFYHEDMPLWSSSTPSVGRVSFSFSLTEGHSGNYYCTADNGFGPQRSEVVSLFVTGKCWVLASHPPLAEFSLTHSFKNLFALSSFLP

SEQ ID NO: 5238 - protein, 977 aa, Homo sapiens
MLLWVILLVLAPVSGQFARTPRPIIFLQPPWTTVFQGERVTLTCKGFRFYSPQKTKWYHRYLGKEILRETPDNILEVQESGEYRCQAQGSPLSSPVHLDFSSASLILQAPLSVFEGDSVVLRCRAKAEVTLNNTIYKNDNVLAFLNKRTDFHIPHACLKDNGAYRCTGYKESCCPVSSNTVKIQVQEPFTRPVLRASSFQPISGNPVTLTCETQLSLERSDVPLRFRFFRDDQTLGLGWSLSPNFQITAMWSKDSGFYWCKAATMPYSVISDSPRSWIQVQIPASHPVLTLSPEKALNFEGTKVTLHCETQEDSLRTLYRFYHEGVPLRHKSVRCERGASISFSLTTENSGNYYCTADNGLGAKPSKAVSLSVTVPVSHPVLNLSSPEDLIFEGAKVTLHCEAQRGSLPILYQFHHEGAALERRSANSAGGVAISFSLTAEHSGNYYCTADNGFGPQRSKAVSLSVTVPVSHPVLTLSSAEALTFEGATVTLHCEVQRGSPQILYQFYHEDMPLWSSSTPSVGRVSFSFSLTEGHSGNYYCTADNGFGPQRSEVVSLFVTVPVSRPILTLRVPRAQAVVGDLLELHCEAPRGSPPILYWFYHEDVTLGSSSAPSGGEASFNLSLTAEHSGNYSCEANNGLVAQHSDTISLSVIVPVSRPILTFRAPRAQAVVGDLLELHCEALRGSSPILYWFYHEDVTLGKISAPSGGGASFNLSLTTEHSGIYSCEADNGLEAQRSEMVTLKVAVPVSRPVLTLRAPGTHAAVGDLLELHCEALRGSPLILYRFFHEDVTLGNRSSPSGGASLNLSLTAEHSGNYSCEADNGLGAQRSETVTLYITGLTANRSGPFATGVAGGLLSIAGLAAGALLLYCWLSRKAGRKPASDPARSPSDSDSQEPTYHNVPAWEELQPVYTNANPRGENVVYSEVRIIQEKKKHAVASDPRHLRNKGSPIIYSEVKVASTPVSGSLFLASSAPHR

SEQ ID NO: 5239 - protein, 759 aa, Homo sapiens
MLLWVILLVLAPVSGQFARTPRPIIFLQPPWTTVFQGERVTLTCKGFRFYSPQKTKWYHRYLGKEILRETPDNILEVQESGEYRCQAQGSPLSSPVHLDFSSASLILQAPLSVFEGDSVVLRCRAKAEVTLNNTIYKNDNVLAFLNKRTDFHIPHACLKDNGAYRCTGYKESCCPVSSNTVKIQVQEPFTRPVLRASSFQPISGNPVTLTCETQLSLERSDVPLRFRFFRDDQTLGLGWSLSPNFQITAMWSKDSGFYWCKAATMPYSVISDSPRSWIQVQIPASHPVLTLSPEKALNFEGTKVTLHCETQEDSLRTLYRFYHEGVPLRHKSVRCERGASISFSLTTENSGNYYCTADNGLGAKPSKAVSLSVTVPVSHPVLNLSSPEDLIFEGAKVTLHCEAQRGSLPILYQFHHEGAALERRSANSAGGVAISFSLTAEHSGNYYCTADNGFGPQRSKAVSLSVTVPVSHPVLTLSSAEALTFEGATVTLHCEVQRGSPQILYQFYHEDMPLWSSSTPSVGRVSFSFSLTEGHSGNYYCTADNGFGPQRSEVVSLFVTVPVSRPILTLRVPRAQAVVGDLLELHCEAPRGSPPILYWFYHEDVTLGSSSAPSGGEASFNLSLTAEHSGNYSCEANNGLVAQHSDTISLSVIVPVSRPILTFRAPRAQAVVGDLLELHCEALRGSSPILYWFYHEDVTLGKISAPSGGGASFNLSLTTEHSGIYSCEADNGLEAQRSEMVTLKVAGEWALPTSSTSEN

SEQ ID NO: 5240 - protein, 365 aa, Homo sapiens
MKLGCVLMAWALYLSLGVLWVAQMLLAAGCHAAASFETLQCEGPVCTEESSCHTEDDLTDAREAGFQVKAYTFSEPFHLIVSYDWLILQGPAKPVFEGDLLVLRCQAWQDWPLTQVTFYRDGSALGPPGPNREFSITVVQKADSGHYHCSGIFQSPGPGIPETASVVAITVQELFPAPILRAVPSAEPQAGSPMTLSCQTKLPLQRSAARLLFSFYKDGRIVQSRGLSSEFQIPTASEDHSGSYWCEAATEDNQVWKQSPQLEIRVQGASSSAAPPTLNPAPQKSAAPGTAPEEAPGPLPPPPTPSSEDPGFSSPLGMPDPHLYHQMGLLLKHMQDVRVLLGHLLMELRELSGHRKPGTTKATAE

SEQ ID NO: 5241 - protein, 225 aa, Homo sapiens
MKLGCVLMAWALYLSLGVLWVAQMLLAAGCHAELFPAPILRAVPSAEPQAGSPMTLSCQTKLPLQRSAARLLFSFYKDGRIVQSRGLSSEFQIPTASEDHSGSYWCEAATEDNQVWKQSPQLEIRVQGASSSAAPPTLNPAPQKSAAPGTAPEEAPGPLPPPPTPSSEDPGFSSPLGMPDPHLYHQMGLLLKHMQDVRVLLGHLLMELRELSGHRKPGTTKATAE

SEQ ID NO: 5242 - protein, 264 aa, Homo sapiens
MKLGCVLMAWALYLSLGVLWVAQMLLAASFETLQCEGPVCTEESSCHTEDDLTDAREAGFQVKAYTFSEPFHLIVSYDWLILQGPAKPVFEGDLLVLRCQAWQDWPLTQVTFYRDGSALGPPGPNREFSITVVQKADSGHYHCSGIFQSPGPGIPETASVVAITVQGASSSAAPPTLNPAPQKSAAPGTAPEEAPGPLPPPPTPSSEDPGFSSPLGMPDPHLYHQMGLLLKHMQDVRVLLGHLLMELRELSGHRKPGTTKATAE

SEQ ID NO: 5243 - protein, 270 aa, Homo sapiens
MKLGCVLMAWALYLSLGVLWVAQMLLAASFETLQCEGPVCTEESSCHTEDDLTDAREAGFQVKAYTFSEPFHLIVSYELFPAPILRAVPSAEPQAGSPMTLSCQTKLPLQRSAARLLFSFYKDGRIVQSRGLSSEFQIPTASEDHSGSYWCEAATEDNQVWKQSPQLEIRVQGASSSAAPPTLNPAPQKSAAPGTAPEEAPGPLPPPPTPSSEDPGFSSPLGMPDPHLYHQMGLLLKHMQDVRVLLGHLLMELRELSGHRKPGTTKATAE

SEQ ID NO: 5244 - protein, 382 aa, Homo sapiens
MLKKISVGVAGDLNTVTMKLGCVLMAWALYLSLGVLWVAQMLLAAGCHAAASFETLQCEGPVCTEESSCHTEDDLTDAREAGFQVKAYTFSEPFHLIVSYDWLILQGPAKPVFEGDLLVLRCQAWQDWPLTQVTFYRDGSALGPPGPNREFSITVVQKADSGHYHCSGIFQSPGPGIPETASVVAITVQELFPAPILRAVPSAEPQAGSPMTLSCQTKLPLQRSAARLLFSFYKDGRIVQSRGLSSEFQIPTASEDHSGSYWCEAATEDNQVWKQSPQLEIRVQGASSSAAPPTLNPAPQKSAAPGTAPEEAPGPLPPPPTPSSEDPGFSSPLGMPDPHLYHQMGLLLKHMQDVRVLLGHLLMELRELSGHRKPGTTKATAE

SEQ ID NO: 5245 - protein, 242 aa, Homo sapiens
MLKKISVGVAGDLNTVTMKLGCVLMAWALYLSLGVLWVAQMLLAAGCHAELFPAPILRAVPSAEPQAGSPMTLSCQTKLPLQRSAARLLFSFYKDGRIVQSRGLSSEFQIPTASEDHSGSYWCEAATEDNQVWKQSPQLEIRVQGASSSAAPPTLNPAPQKSAAPGTAPEEAPGPLPPPPTPSSEDPGFSSPLGMPDPHLYHQMGLLLKHMQDVRVLLGHLLMELRELSGHRKPGTTKATAE

SEQ ID NO: 5246 - protein, 376 aa, Homo sapiens
MLKKISVGVAGDLNTVTMKLGCVLMAWALYLSLGVLWVAQMLLAASFETLQCEGPVCTEESSCHTEDDLTDAREAGFQVKAYTFSEPFHLIVSYDWLILQGPAKPVFEGDLLVLRCQAWQDWPLTQVTFYRDGSALGPPGPNREFSITVVQKADSGHYHCSGIFQSPGPGIPETASVVAITVQELFPAPILRAVPSAEPQAGSPMTLSCQTKLPLQRSAARLLFSFYKDGRIVQSRGLSSEFQIPTASEDHSGSYWCEAATEDNQVWKQSPQLEIRVQGASSSAAPPTLNPAPQKSAAPGTAPEEAPGPLPPPPTPSSEDPGFSSPLGMPDPHLYHQMGLLLKHMQDVRVLLGHLLMELRELSGHRKPGTTKATAE

SEQ ID NO: 5247 - protein, 287 aa, Homo sapiens
MLKKISVGVAGDLNTVTMKLGCVLMAWALYLSLGVLWVAQMLLAASFETLQCEGPVCTEESSCHTEDDLTDAREAGFQVKAYTFSEPFHLIVSYELFPAPILRAVPSAEPQAGSPMTLSCQTKLPLQRSAARLLFSFYKDGRIVQSRGLSSEFQIPTASEDHSGSYWCEAATEDNQVWKQSPQLEIRVQGASSSAAPPTLNPAPQKSAAPGTAPEEAPGPLPPPPTPSSEDPGFSSPLGMPDPHLYHQMGLLLKHMQDVRVLLGHLLMELRELSGHRKPGTTKATAE

SEQ ID NO: 5248 - protein, 192 aa, Homo sapiens
MLKKISVGVAGDLNTVTMKLGCVLMAWALYLSLGVLWVAQMLLAASFETLQCEGPVCTEESSCHTEDDLTDAREAGFQVKAYTFSEPFHLIVSYGASSSAAPPTLNPAPQKSAAPGTAPEEAPGPLPPPPTPSSEDPGFSSPLGMPDPHLYHQMGLLLKHMQDVRVLLGHLLMELRELSGHRKPGTTKATAE

SEQ ID NO: 5249 - protein, 236 aa, Homo sapiens
MLKKISVGVAGDLNTVTMKLGCVLMAWALYLSLGVLWVAQMLLELFPAPILRAVPSAEPQAGSPMTLSCQTKLPLQRSAARLLFSFYKDGRIVQSRGLSSEFQIPTASEDHSGSYWCEAATEDNQVWKQSPQLEIRVQGASSSAAPPTLNPAPQKSAAPGTAPEEAPGPLPPPPTPSSEDPGFSSPLGMPDPHLYHQMGLLLKHMQDVRVLLGHLLMELRELSGHRKPGTTKATAE

SEQ ID NO: 5250 - protein, 141 aa, Homo sapiens
MLKKISVGVAGDLNTVTMKLGCVLMAWALYLSLGVLWVAQMLLGASSSAAPPTLNPAPQKSAAPGTAPEEAPGPLPPPPTPSSEDPGFSSPLGMPDPHLYHQMGLLLKHMQDVRVLLGHLLMELRELSGHRKPGTTKATAE

SEQ ID NO: 5251 - protein, 152 aa, Homo sapiens
MLLAASFETLQCEGPVCTEESSCHTEDDLTDAREAGFQVKAYTFSEPFHLIVSYGASSSAAPPTLNPAPQKSAAPGTAPEEAPGPLPPPPTPSSEDPGFSSPLGMPDPHLYHQMGLLLKHMQDVRVLLGHLLMELRELSGHRKPGTTKATAE

SEQ ID NO: 5252 - protein, 311 aa, Homo sapiens
MWPLTALLLLATLEKPILSLHPPWTTIFKGERVTLKCDGYHPLLLELQPISTLWYLGHLLLPSHKKSIEVQTPGVYRCQTRGAPVSDPIHLSVSNDWLILQVPYAPVFEGEPLVLRCRGWYDKVVYKLHYYHDGQAVRYFHSSANYTVLQARASDSGRYQCSGTMRIPVESAPMFSAKVAVTVQAARCAASTGAPSTQSRSPRSRSSNRTGARRLPPPAVSGNAVRGCSSRGRVLPWTRPPPPPQLHGPQPWLLVIGRFPSESPRCPDRSRWSPPSGTPPPPGCSSRRAAPRLRGHPPALRRRPWNNRLEP

SEQ ID NO: 5253 - protein, 268 aa, Homo sapiens
MWPLTALLLLATLEKPILSLHPPWTTIFKGERVTLKCDGYHPLLLELQPISTLWYLGHLLLPSHKKSIEVQTPGVYRCQTRGAPVSDPIHLSVSNDWLILQVPYAPVFEGEPLVLRCRGWYDKVVYKLHYYHDGQAVRYFHSSANYTVLQARASDSGRYQCSGTMRIPVESAPMFSAKVAVTVQEARHAAAVRVLQVQPRGAPLRLGRRVHSPGARGRGARIVLVRGGYRHPQCPETQSVAAAPGAGFSPGPGLHHRPSSMGRSLGSW

SEQ ID NO: 5254 - protein, 318 aa, Homo sapiens
MWPLTALLLLVPSSGQAATLEKPILSLHPPWTTIFKGERVTLKCDGYHPLLLELQPISTLWYLGHLLLPSHKKSIEVQTPGVYRCQTRGAPVSDPIHLSVSNDWLILQVPYAPVFEGEPLVLRCRGWYDKVVYKLHYYHDGQAVRYFHSSANYTVLQARASDSGRYQCSGTMRIPVESAPMFSAKVAVTVQAARCAASTGAPSTQSRSPRSRSSNRTGARRLPPPAVSGNAVRGCSSRGRVLPWTRPPPPPQLHGPQPWLLVIGRFPSESPRCPDRSRWSPPSGTPPPPGCSSRRAAPRLRGHPPALRRRPWNNRLEP

SEQ ID NO: 5255 - protein, 275 aa, Homo sapiens
MWPLTALLLLVPSSGQAATLEKPILSLHPPWTTIFKGERVTLKCDGYHPLLLELQPISTLWYLGHLLLPSHKKSIEVQTPGVYRCQTRGAPVSDPIHLSVSNDWLILQVPYAPVFEGEPLVLRCRGWYDKVVYKLHYYHDGQAVRYFHSSANYTVLQARASDSGRYQCSGTMRIPVESAPMFSAKVAVTVQEARHAAAVRVLQVQPRGAPLRLGRRVHSPGARGRGARIVLVRGGYRHPQCPETQSVAAAPGAGFSPGPGLHHRPSSMGRSLGSW

SEQ ID NO: 5256 - protein, 426 aa, Homo sapiens
MWPLTALLLLVPSSGQAATLEKPILSLHPPWTTIFKGERVTLKCDGYHPLLLELQPISTLWYLGHLLLPSHKKSIEVQTPGVYRCQTRGAPVSDPIHLSVSNDWLILQVPYAPVFEGEPLVLRCRGWYDKVVYKLHYYHDGQAVRYFHSSANYTVLQARASDSGRYQCSGTMRIPVESAPMFSAKVAVTVQELFRAPVLRVMGPREARGAALGGVVLRCDTRLHPQKRDTPLQFAFYKYSRAVRRFDWGAEYTVPEPEVEELESYWCEAATATRSVRKRSPWLQLPGPGSPLDPASTTAPAPWAAALAPGNRPLSFRKPPVSRSVPLVTSVRNTTSTGLQFPASGAPTAGPPACAPPTPLEQSAGALKPDVDLLLREMQLLKGLLSRVVLELKEPQALRELRGTPETPTSHFAVSPGTPETTPVES

SEQ ID NO: 5257 - protein, 85 aa, Homo sapiens
MKKVLLLITAILAVAVGFPVSQDQEREKRSISDSDELASGFFVFPYPYPFRPLPPIPFPRFPWFRRNFPIPIPESAPTTPLPSEK

SEQ ID NO: 5258 - protein, 317 aa, Homo sapiens
MGLLLPLALCILVLCCGAMSPPQLALNPSALLSRGCNDSDVLAVAGFALRDINKDRKDGYVLRLNRVNDAQEYRRAISKKKIYMTCPDCPSSIPTDSSNHQVLEAATESLAKYNNENTSKQYSLFKVTRASSQWVVGPSYFVEYLIKESPCTKSQASSCSLQSSDSVPVGLCKGSLTRTHWEKFVSVTCDFFESQAPATGSENSAVNQKPTNLPKVEESQQKNTPPTDSPSKAGPRGSVQYLPDLDDKNSQEKGPQEAFPVHLDLTTNPQGETLDISFLFLEPMEEKLVVLPFPKEKARTAECPGPAQNASPLVLPP

SEQ ID NO: 5259 - protein, 92 aa, Homo sapiens
MGLLLPLALCILVLCCGAMSPPQLALNPSALLSRGCNDSDVLAVAGFALRDINKDRKDGYVLRLNRVNDAQEYRRARWPGISVLSYTGCARD

SEQ ID NO: 5260 - protein, 119 aa, Homo sapiens
MGLLLPLALCILVLCCGAMSPPQLALNPSALLSRGCNDSDVLAVAGFALRDINKDRKDGYVLRLNRVNDAQEYRRGGLGSLFYLTLDVLETDCHVLRKKAWQDCGMRIFFESFQKKRFT

SEQ ID NO: 5261 - protein, 382 aa, Homo sapiens
MGLLLPLALCILVLCCGAMSPPQLALNPSALLSRGCNDSDVLAVAGFALRDINKDRKDGYVLRLNRVNDAQEYRRGGLGSLFYLTLDVLETDCHVLRKKAWQDCGMRIFFESVYGQCKAIFYMNNPSRVLYLAAYNCTLRPVSKKKIYMTCPDCPSSIPTDSSNHQVLEAATESLAKYNNENTSKQYSLFKVTRASSQWVVGPSYFVEYLIKESPCTKSQASSCSLQSSDSVPVGLCKGSLTRTHWEKFVSVTCDFFESQAPATGSENSAVNQKPTNLPKVEESQQKNTPPTDSPSKAGPRGSVQYLPDLDDKNSQEKGPQEAFPVHLDLTTNPQGETLDISFLFLEPMEEKLVVLPFPKEKARTAECPGPAQNASPLVLPP

SEQ ID NO: 5262 - protein, 382 aa, Homo sapiens; identical to SEQ ID NO: 5261

SEQ ID NO: 5263 - protein, 345 aa, Homo sapiens
MGLLLPLALCILVLCCGAMSPPQLALNPSALLSRGCNDSDVLAVAGFALRDINKDRKDGYVLRLNRVNDAQEYRRVYGQCKAIFYMNNPSRVLYLAAYNCTLRPVSKKKIYMTCPDCPSSIPTDSSNHQVLEAATESLAKYNNENTSKQYSLFKVTRASSQWVVGPSYFVEYLIKESPCTKSQASSCSLQSSDSVPVGLCKGSLTRTHWEKFVSVTCDFFESQAPATGSENSAVNQKPTNLPKVEESQQKNTPPTDSPSKAGPRGSVQYLPDLDDKNSQEKGPQEAFPVHLDLTTNPQGETLDISFLFLEPMEEKLVVLPFPKEKARTAECPGPAQNASPLVLPP

SEQ ID NO: 5264 - protein, 104 aa, Homo sapiens
MTCPDCPSSIPTDSSNHQVLEAATESLAKYNNENTSKQYSLFKVTRASSQWVVGPSYFVEYLIKESPCTKSQASSCSLQSSDSVPVGLCKGSLTRTHWEKFVSV

SEQ ID NO: 5265 - protein, 289 aa, Homo sapiens [sequence omitted]

SEQ ID NO: 5266 - protein, 866 aa, Homo sapiens
MFSMRIVCLVLSVVGTAWTADSGEGDFLAEGGGVRGPRVVERHQSACKDSDWPFCSDEDWNYKCPSGCRMKGLIDEVNQDFTNRINKLKNSLFEYQKNNKDSHSLTTNIMEILRGDFSSANNRDNTYNRVSEDLRSRIEVLKRKVIEKVQHIQLLQKNVRAQLVDMKRLEVDIDIKIRSCRGSCSRALAREVDLKDYEDQQKQLEQVIAKDLLPSRDRQHLPLIKMKPVPDLVPGNFKSQLQKVPPEWKALTDMPQMRMELERPGGNEITRGGSTSYGTGSETESPRNPSSAGSWNSGSSGPGSTGNRNPGSSGTGGTATWKPGSSGPGSTGSWNSGSSGTGSTGNQNPGSPRPGSTGTWNPGSSERGSAGHWTSESSVSGSTGQWHSESGSFRPDSPGSGNARPNNPDWGTFEEVSGNVSPGTRREYHTEKLVTSKGDKELRTGKEKVTSGSTTTTRRSCSKTVTKTVIGPDGHKEVTKEVVTSEDGSDCPEAMDLGTLSGIGTLDGFRHRHPDEAAFFDTASTGKTFPGFFSPMLGEFVSETESRGSESGIFTNTKESSSHHPGIAEFPSRGKSSSYSKQFTSSTSYNRGDSTFESKSYKMADEAGSEADHEGTHSTKRGHAKSRPVRDCDDVLQTHPSGTQSGIFNIKLPGSSKIFSVYCDQETSLGGWLLIQQRMDGSLNFNRTWQDYKRGFGSLNDEGEGEFWLGNDYLHLLTQRGSVLRVELEDWAGNEAYAEYHFRVGSEAEGYALQVSSYEGTAGDALIEGSVEEGAEYTSHNNMQFSTFDRDADQWEENCAEVYGGGWWYNNCQAANLNGIYYPGGSYDPRNNSPYEIENGVVWVSFRGADYSLRAVRMKIRPLVTQ

SEQ ID NO: 5267 - protein, 644 aa, Homo sapiens
MFSMRIVCLVLSVVGTAWTADSGEGDFLAEGGGVRGPRVVERHQSACKDSDWPFCSDEDWNYKCPSGCRMKGLIDEVNQDFTNRINKLKNSLFEYQKNNKDSHSLTTNIMEILRGDFSSANNRDNTYNRVSEDLRSRIEVLKRKVIEKVQHIQLLQKNVRAQLVDMKRLEVDIDIKIRSCRGSCSRALAREVDLKDYEDQQKQLEQVIAKDLLPSRDRQHLPLIKMKPVPDLVPGNFKSQLQKVPPEWKALTDMPQMRMELERPGGNEITRGGSTSYGTGSETESPRNPSSAGSWNSGSSGPGSTGNRNPGSSGTGGTATWKPGSSGPGSTGSWNSGSSGTGSTGNQNPGSPRPGSTGTWNPGSSERGSAGHWTSESSVSGSTGQWHSESGSFRPDSPGSGNARPNNPDWGTFEEVSGNVSPGTRREYHTEKLVTSKGDKELRTGKEKVTSGSTTTTRRSCSKTVTKTVIGPDGHKEVTKEVVTSEDGSDCPEAMDLGTLSGIGTLDGFRHRHPDEAAFFDTASTGKTFPGFFSPMLGEFVSETESRGSESGIFTNTKESSSHHPGIAEFPSRGKSSSYSKQFTSSTSYNRGDSTFESKSYKMADEAGSEADHEGTHSTKRGHAKSRPVRGIHTSPLGKPSLSP

SEQ ID NO: 5268 - protein, 272 aa, Homo sapiens
MEYCRTPCTVSCNIPVVSGKECEEIIRKGGETSEMYLIQPDSSVKPYRVYCDMNTENGGWTVIQNRQDGSVDFGRKWDPYKQGFGNVATNTDGKNYCGLPGEYWLGNDKISQLTRMGPTELLIEMEDWKGDKVKAHYGGFTVQNEANKYQISVNKYRGTAGNALMDGASQLMGENRTMTIHNGMFFSTYDRDNDGWLTSDPRKQCSKEDGGGWWYNRCHAANPNGRYYWGGQYTWDMAKHGTDDGVVWMNWKGSWYSMRKMSMKIRPFFPQQ

SEQ ID NO: 5269 - protein, 491 aa, Homo sapiens
MKRMVSWSFHKLKTMKHLLLLLLCVFLVKSQGVNDNEEGFFSARGHRPLDKKREEAPSLRPAPPPISGGGYRARPAKAAATQKKVERKAPDAGGCLHADPDLGVLCPTGCQLQEALLQQERPIRNSVDELNNNVEAVSQTSSSSFQYMYLLKDLWQKRQKQVKDNENVVNEYSSELEKHQLYIDETVNSNIPTNLRVLRSILENLRSKIQKLESDVSAQMEYCRTPCTVSCNIPVVSGKECEEIIRKGGETSEMYLIQPDSSVKPYRVYCDMNTENGGWTVIQNRQDGSVDFGRKWDPYKQGFGNVATNTDGKNYCGLPGEYWLGNDKISQLTRMGPTELLIEMEDWKGDKVKAHYGGFTVQNEANKYQISVNKYRGTAGNALMDGASQLMGENRTMTIHNGMFFSTYDRDNDGWLTSDPRKQCSKEDGGGWWYNRCHAANPNGRYYWGGQYTWDMAKHGTDDGVVWMNWKGSWYSMRKMSMKIRPFFPQQ

SEQ ID NO: 5270 - protein, 45 aa, Homo sapiens
MKRMVSWSFHKLKTMKHLLLLLLCVFLVKSQGVNDNEEMRKLGHR

SEQ ID NO: 5271 - protein, 66 aa, Homo sapiens
MWKWILTHCASAFPHLPGCCCCCFLLLFLVSSVPVTCQALGQDMVSPEATNSSSSSFSSPSSAGRH

SEQ ID NO: 5272 - protein, 208 aa, Homo sapiens
MWKWILTHCASAFPHLPGCCCCCFLLLFLVSSVPVTCQALGQDMVSPEATNSSSSSFSSPSSAGRHVRSYNHLQGDVRWRKLFSFTKYFLKIEKNGKVSGTKKENCPYSILEITSVEIGVVAVKAINSNYYLAMNKKGKLYGSKEFNNDCKLKERIEENGYNTYASFNWQHNGRQMYVALNGKGAPRRGQKTRRKNTSAHFLPMVVHS

SEQ ID NO: 5273 - protein, 216 aa, Homo sapiens
MGAARLLPNLTLCLQLLILCCQTQGENHPSPNFNQYVRDQGAMTDQLSRRQIREYQLYSRTSGKHVQVTGRRISATAEDGNKFAKLIVETDTFGSRVRIKGAESEKYICMNKRGKLIGKPSGKSKDCVFTEIVLENNYTAFQNARHEGWFMAFTRQGRPRQASRSRQNQREAHFIKRLYQGQLPFPNHAEKQKQFEFVGSAPTRRTKRTRRPQPLT

SEQ ID NO: 5274 - protein, 205 aa, Homo sapiens
MGAARLLPNLTLCLQLLILCCQTQYVRDQGAMTDQLSRRQIREYQLYSRTSGKHVQVTGRRISATAEDGNKFAKLIVETDTFGSRVRIKGAESEKYICMNKRGKLIGKPSGKSKDCVFTEIVLENNYTAFQNARHEGWFMAFTRQGRPRQASRSRQNQREAHFIKRLYQGQLPFPNHAEKQKQFEFVGSAPTRRTKRTRRPQPLT

SEQ ID NO: 5275 - protein, 207 aa, Homo sapiens
MYSAPSACTCLCLHFLLLCFQVQVLVAEENVDFRIHVENQTRARDDVSRKQLRLYQLYSRTSGKHIQVLGRRISARGEDGDKYAQLLVETDTFGSQVRIKGKETEFYLCMNRKGKLVGKPDGTSKECVFIEKVLENNYTALMSAKYSGWYVGFTKKGRPRKGPKTRENQQDVHFMKRYPKGQPELQKPFKYTTVTKRSRRIRPTHPA

SEQ ID NO: 5276 - protein, 216 aa, Homo sapiens
MRSGCVVVHVWILAGLWLAVAGRPLAFSDAGPHVHYGWGDPIRLRHLYTSGPHGLSSCFLRIRADGVVDCARGQSAHSLLEIKAVALRTVAIKGVHSVRYLCMGADGKMQGLLQYSEEDCAFEEEIRPDGYNVYRSEKHRLPVSLSSAKQRQLYKNRGFLPLSHFLPMLPMVPEEPEDLRGHLESDMFSSPLETDSMDPFGLVTGLEAVRSPSFEK

SEQ ID NO: 5277 - protein, 209 aa, Homo sapiens
MDSDETGFEHSGLWVSVLAGLLLGACQAHPIPDSSPLLQFGGQVRQRYLYTDDAQQTEAHLEIREDGTVGGAADQSPESLLQLKALKPGVIQILGVKTSRFLCQRPDGALYGSLHFDPEACSFRELLLEDGYNVYQSEAHGLPLHLPGNKSPHRDPAPRGPARFLPLPGLPPALPEPPGILAPQPPDVGSSDPLSMVGPSQGRSPSYAS

SEQ ID NO: 5278 - protein, 209 aa, Homo sapiens; identical to SEQ ID NO: 5277

SEQ ID NO: 5279 - protein, 170 aa, Homo sapiens
MRRRLWLGLAWLLLARAPDAAGTPSASRGPRSYPHLEGDVRWRRLFSSTHFFLRVDPGGRVQGTRWRHGQDSILEIRSVHVGVVVIKAVSSGFYVAMNRRGRLYGSRLYTVDCRFRERIEENGHNTYASQRWRRRGQPMFLALDRRGGPRPGGRTRRYHLSAHFLPVLVS

SEQ ID NO: 5280 - protein, 165 aa, Homo sapiens
MRRRLWLGLAWLLLARAPDAAGTPSASRGPRSYPHLEGDVRWRRLFSSTHFFLRVDPGGRVQGTRWRHGQDSILEIRSVHVGVVVIKAVSSGFYVAMNRRGRLYGSVPGAHRRERPQHLRLTALAPPRPAHVPGAGQEGGAPARRPDAAVPPVRPLPARPGLLRP

SEQ ID NO: 5281 - protein, 251 aa, Homo sapiens
MLGARLRLWVCALCSVCSMSVLRAYPNASPLLGSSWGGLIHLYTATARNSYHLQIHKNGHVDGAPHQTIYSALMIRSEDAGFVVITGVMSRRYLCMDFRGNIFGSHYFDPENCRFQHQTLENGYDVYHSPQYHFLVSLGRAKRAFLPGMNPPPYSQFLSRRNEIPLIHFNTPIPRRHTRSAEDDSERDPLNVLKPRARMTPAPASCSQELPSAEDNSPMASDPLGVVRGGRVNTHAGGTGPEGCRPFAKFI

SEQ ID NO: 5282 - protein, 239 aa, Homo sapiens
MGLIWLLLLSLLEPGWPAAGPGARLRRDAGGRGGVYEHLGGAPRRRKLYCATKYHLQLHPSGRVNGSLENSAYSILEITAVEVGIVAIRGLFSGRYLAMNKRGRLYASEHYSAECEFVERIHELGYNTYASRLYRTVSSTPGARRQPSAERLWYVSVNGKGRPRRGFKTRRTQKSSLFLPRVLDHRDHEMVRQLQSGLPRPPGKGVQPRRRRQKQSPDNLEPSHVQASRLGSQLEASAH

SEQ ID NO: 5283 - protein, 206 aa, Homo sapiens
MSGPGTAAVALLPAVLLALLAPWAGRGGAAAPTAPNGTLEAELERRWESLVALSLARLPVAAQPKEAAVQSGAGDYLLGIKRLRRLYCNVGIGFHLQALPDGRIGGAHADTRDSLLELSPVERGVVSIFGVASRFFVAMSSKGKLYGSPFFTDECTFKEILLPNNYNAYESYKYPGMFIALSKNGKTKKGNRVSPTMKVTHFLPRL

SEQ ID NO: 5284 - protein, 123 aa, Homo sapiens
MSLSFLLLLFFSHLILSAWAHGEKRLAPKGQPGPAATDRNPRGSSSRQSSSSAMSSSSASSSPAASLGSQGSGLEQSSFQWSPSGRRTGSLYCRVGIGFHLQIYPDGKVNGSHEANMLSQVHR

SEQ ID NO: 5285 - protein, 268 aa, Homo sapiens
MSLSFLLLLFFSHLILSAWAHGEKRLAPKGQPGPAATDRNPRGSSSRQSSSSAMSSSSASSSPAASLGSQGSGLEQSSFQWSPSGRRTGSLYCRVGIGFHLQIYPDGKVNGSHEANMLSVLEIFAVSQGIVGIRGVFSNKFLAMSKKGKLHASAKFTDDCKFRERFQENSYNTYASAIHRTEKTGREWYVALNKRGKAKRGCSPRVKPQHISTHFLPRFKQSEQPELSFTVTVPEKKKPPSPIKPKIPLSAPRKNTNSVKYRLKFRFG

SEQ ID NO: 5286 - protein, 119 aa, Homo sapiens
NPRGSSSRQSSSSAMSSSSASSSPAASLGSQGSGLEQSSFQWSPSGRRTGSLYCRVGIGFHLQIYPDGKVNGSHEANMLSVLEIFAVSQGIVGIRGVFSNKFLAMSKKGKLHASNTLET

SEQ ID NO: 5287 - protein, 122 aa, Homo sapiens
MEGGDIRVRRLFCRTQWYLRIDKRGKVKGTQEMKNNYNIMEIRTVAVGIVAIKGVESEFYLAMNKEGKLYAKKECNEDCNFKELILENHYNTYASAKWTHNGGEMFVALNQKGIPVRGKKTK

SEQ ID NO: 5288 - protein, 194 aa, Homo sapiens
MHKWILTWILPTLLYRSCFHIICLVGTISLACNDMTPEQMATNVNCSSPERHTRSYDYMEGGDIRVRRLFCRTQWYLRIDKRGKVKGTQEMKNNYNIMEIRTVAVGIVAIKGVESEFYLAMNKEGKLYAKKECNEDCNFKELILENHYNTYASAKWTHNGGEMFVALNQKGIPVRGKKTKKEQKTAHFLPMAIT

SEQ ID NO: 5289 - protein, 194 aa, Homo sapiens; identical to SEQ ID NO: 5288

SEQ ID NO: 5290 - protein, 194 aa, Homo sapiens; identical to SEQ ID NO: 5288

SEQ ID NO: 5291 - protein, 97 aa, Homo sapiens
MHKWILTWILPTLLYRSCFHIICLVGTISLACNDMTPEQMATNVNCSSPERHTRSYDYMEGGDIRVRRLFCRTQWYLRIDKRGKVKGTQEMKNNYSK

SEQ ID NO: 5292 - protein, 140 aa, Homo sapiens
MAEDGDPFAKLIVETDTFGSRVRVRGAETGLYICMNKKGKLIAKSNGKGKDCVFTEIVLENNYTALQNAKYEGWYMAFTRKGRPRKGSKTRQHQREVHFMKRLPRGHHTTEQSLRFEFLNYPPFTRSLRGSQRTWAPEPR

SEQ ID NO: 5293 - protein, 233 aa, Homo sapiens
MGSPRSALSCLLLHLLVLCLQAQEGPGRGPALGRELASLFRAGREPQGVSQQHVREQSLVTDQLSRRLIRTYQLYSRTSGKHVQVLANKRINAMAEDGDPFAKLIVETDTFGSRVRVRGAETGLYICMNKKGKLIAKSNGKGKDCVFTEIVLENNYTALQNAKYEGWYMAFTRKGRPRKGSKTRQHQREVHFMKRLPRGHHTTEQSLRFEFLNYPPFTRSLRGSQRTWAPEPR

SEQ ID NO: 5294 - protein, 244 aa, Homo sapiens
MGSPRSALSCLLLHLLVLCLQAQEGPGRGPALGRELASLFRAGREPQGVSQQVTVQSSPNFTQHVREQSLVTDQLSRRLIRTYQLYSRTSGKHVQVLANKRINAMAEDGDPFAKLIVETDTFGSRVRVRGAETGLYICMNKKGKLIAKSNGKGKDCVFTEIVLENNYTALQNAKYEGWYMAFTRKGRPRKGSKTRQHQREVHFMKRLPRGHHTTEQSLRFEFLNYPPFTRSLRGSQRTWAPEPR

SEQ ID NO: 5295 - protein, 204 aa, Homo sapiens
MGSPRSALSCLLLHLLVLCLQAQHVREQSLVTDQLSRRLIRTYQLYSRTSGKHVQVLANKRINAMAEDGDPFAKLIVETDTFGSRVRVRGAETGLYICMNKKGKLIAKSNGKGKDCVFTEIVLENNYTALQNAKYEGWYMAFTRKGRPRKGSKTRQHQREVHFMKRLPRGHHTTEQSLRFEFLNYPPFTRSLRGSQRTWAPEPR

SEQ ID NO: 5296 - protein, 37 aa, Homo sapiens
MGSPRSALSCLLLHLLVLCLQAQVRRGARRRGPGAPV

SEQ ID NO: 5297 - protein, 215 aa, Homo sapiens
MGSPRSALSCLLLHLLVLCLQAQVTVQSSPNFTQHVREQSLVTDQLSRRLIRTYQLYSRTSGKHVQVLANKRINAMAEDGDPFAKLIVETDTFGSRVRVRGAETGLYICMNKKGKLIAKSNGKGKDCVFTEIVLENNYTALQNAKYEGWYMAFTRKGRPRKGSKTRQHQREVHFMKRLPRGHHTTEQSLRFEFLNYPPFTRSLRGSQRTWAPEPR

SEQ ID NO: 5298 - protein, 234 aa, Homo sapiens [sequence omitted]

SEQ ID NO: 5299 - protein, 223 aa, Homo sapiens
MKFVPCLLLVTLSCLGTLGQAPRQKQGSTGEEFHFQTGGRDSCTMRPSSLGQGAGEVWLRVDCRNTDQTYWCEYRGQPSMCQAFAADPKPYWNQALQELRRLHHACQGAPVLRPSVCREAGPQAHMQQVTSSLKGSPEPNQQPEAGTPSLRPKATVKLTEATQLGKDSMEELGKAKPTTRPTAKPTQPGPRPGGNEEAKKKAWEHCWKPFQALCAFLISFFRG

SEQ ID NO: 5300 - protein, 258 aa, Homo sapiens
MTPPKLRASLSPSLLLLLSGCLLAAARREKGAASNVAEPVPGPTGGSSGRFLSPEQHACSWQLLLPAPEAAAGSELALRCQSPDGARHQCAYRGHPERCAAYAARRAHFWKQVLGGLRKKRRPCHDPAPLQARLCAGKKGHGAELRLVPRASPPARPTVAGFAGESKPRARNRGRTRERASGPAAGTPPPQSAPPKENPSERKTNEGKRKAALVPNEERPMGTGPDPDGLDGNAELTETYCAEKWHSLCNFFVNFWNG

SEQ ID NO: 5301 - protein, 812 aa, Homo sapiens
MAAVTRDFGEMLLHSGRVLPAEAQPWGAPVEVESFLVHPGDLLQLRCRLRDDVQSINWLRDGVQLAESNRTRITGEEVEVQDSVPADSGLYACVTSSPSGSDTTYFSVNVSDALPSSEDDDDDDDSSSEEKETDNTKPNRMPVAPYWTSPEKMEKKLHAVPAAKTVKFKCPSSGTPNPTLRWLKNGKEFKPDHRIGGYKVRYATWSIIMDSVVPSDKGNYTCIVENEYGSINHTYQLDVVERSPHRPILQAGLPANKTVALGSNVEFMCKVYSDPQPHIQWLKHIEVNGSKIGPDNLPYVQILKTAGVNTTDKEMEVLHLRNVSFEDAGEYTCLAGNSIGLSHHSAWLTVLEALEERPAVMTSPLYLEIIIYCTGAFLISCMVGSVIVYKMKSGTKKSDFHSQMAVHKLAKSIPLRRQVSADSSASMNSGVLLVRPSRLSSSGTPMLAGVSEYELPEDPRWELPRDRLVLGKPLGEGCFGQVVLAEAIGLDKDKPNRVTKVAVKMLKSDATEKDLSDLISEMEMMKMIGKHKNIINLLGACTQDGPLYVIVEYASKGNLREYLQARRPPGLEYCYNPSHNPEEQLSSKDLVSCAYQVARGMEYLASKKCIHRDLAARNVLVTEDNVMKIADFGLARDIHHIDYYKKTTNGRLPVKWMAPEALFDRIYTHQSDVWSFGVLLWEIFTLGGSPYPGVPVEELFKLLKEGHRMDKPSNCTNELYMMMRDCWHAVPSQRPTFKQLVEDLDRIVALTSNQEYLDLSMPLDQYSPSFPDTRSSTCSSGEDSVFSHEPLPEEPCLPRHPAQLANGGLKRR

SEQ ID NO: 5302 - protein, 853 aa, Homo sapiens
MEARVSLKRRIELTVEYPWRCGALSPTSNCRTGMWSWKCLLFWAVLVTATLCTARPSPTLPEQAQPWGAPVEVESFLVHPGDLLQLRCRLRDDVQSINWLRDGVQLAESNRTRITGEEVEVQDSVPADSGLYACVTSSPSGSDTTYFSVNVSDALPSSEDDDDDDDSSSEEKETDNTKPNPVAPYWTSPEKMEKKLHAVPAAKTVKFKCPSSGTPNPTLRWLKNGKEFKPDHRIGGYKVRYATWSIIMDSVVPSDKGNYTCIVENEYGSINHTYQLDVVERSPHRPILQAGLPANKTVALGSNVEFMCKVYSDPQPHIQWLKHIEVNGSKIGPDNLPYVQILKTAGVNTTDKEMEVLHLRNVSFEDAGEYTCLAGNSIGLSHHSAWLTVLEALEERPAVMTSPLYLEIIIYCTGAFLISCMVGSVIVYKMKSGTKKSDFHSQMAVHKLAKSIPLRRQVTVSADSSASMNSGVLLVRPSRLSSSGTPMLAGVSEYELPEDPRWELPRDRLVLGKPLGEGCFGQVVLAEAIGLDKDKPNRVTKVAVKMLKSDATEKDLSDLISEMEMMKMIGKHKNIINLLGACTQDGPLYVIVEYASKGNLREYLQARRPPGLEYCYNPSHNPEEQLSSKDLVSCAYQVARGMEYLASKKCIHRDLAARNVLVTEDNVMKIADFGLARDIHHIDYYKKTTNGRLPVKWMAPEALFDRIYTHQSDVWSFGVLLWEIFTLGGSPYPGVPVEELFKLLKEGHRMDKPSNCTNELYMMMRDCWHAVPSQRPTFKQLVEDLDRIVALTSNQEYLDLSMPLDQYSPSFPDTRSSTCSSGEDSVFSHEPLPEEPCLPRHPAQLANGGLKRR

SEQ ID NO: 5303 - protein, 139 aa, Homo sapiens
MEKKLHAVPAAKTVKFKCPSSGTPNPTLRWLKNGKEFKPDHRIGGYKVRYATWSIIMDSVVPSDKGNYTCIVENEYGSINHTYQLDVVERSPHRPILQAGLPANKTVALGSNVEFMCKVYSDPQPHIQWLKHIEVNGSK

SEQ ID NO: 5304 - protein, 61 aa, Homo sapiens
MWSWKCLLFWAVLVTATLCTARPSPTLPEQACPDLQEAKWCSASFHSITPLPFGLGTRLSD

SEQ ID NO: 5305 - protein, 107 aa, Homo sapiens
MWSWKCLLFWAVLVTATLCTARPSPTLPEQAQPWGAPVEVESFLVHPGDLLQLRCRLRDDVQSINWLRDGVQLAESNRTRITGEEVEVQDSVPADSGLYACVTSSPS

SEQ ID NO: 5306 - protein, 150 aa, Homo sapiens
MWSWKCLLFWAVLVTATLCTARPSPTLPEQAQPWGAPVEVESFLVHPGDLLQLRCRLRDDVQSINWLRDGVQLAESNRTRITGEEVEVQDSVPADSGLYACVTSSPSGSDTTYFSVNVSACPDLQEAKWCSASFHSITPLPFGLGTRLSD

SEQ ID NO: 5307 - protein, 820 aa, Homo sapiens
MWSWKCLLFWAVLVTATLCTARPSPTLPEQAQPWGAPVEVESFLVHPGDLLQLRCRLRDDVQSINWLRDGVQLAESNRTRITGEEVEVQDSVPADSGLYACVTSSPSGSDTTYFSVNVSDALPSSEDDDDDDDSSSEEKETDNTKPNPVAPYWTSPEKMEKKLHAVPAAKTVKFKCPSSGTPNPTLRWLKNGKEFKPDHRIGGYKVRYATWSIIMDSVVPSDKGNYTCIVENEYGSINHTYQLDVVERSPHRPILQAGLPANKTVALGSNVEFMCKVYSDPQPHIQWLKHIEVNGSKIGPDNLPYVQILKTAGVNTTDKEMEVLHLRNVSFEDAGEYTCLAGNSIGLSHHSAWLTVLEALEERPAVMTSPLYLEIIIYCTGAFLISCMVGSVIVYKMKSGTKKSDFHSQMAVHKLAKSIPLRRQVTVSADSSASMNSGVLLVRPSRLSSSGTPMLAGVSEYELPEDPRWELPRDRLVLGKPLGEGCFGQVVLAEAIGLDKDKPNRVTKVAVKMLKSDATEKDLSDLISEMEMMKMIGKHKNIINLLGACTQDGPLYVIVEYASKGNLREYLQARRPPGLEYCYNPSHNPEEQLSSKDLVSCAYQVARGMEYLASKKCIHRDLAARNVLVTEDNVMKIADFGLARDIHHIDYYKKTTNGRLPVKWMAPEALFDRIYTHQSDVWSFGVLLWEIFTLGGSPYPGVPVEELFKLLKEGHRMDKPSNCTNELYMMMRDCWHAVPSQRPTFKQLVEDLDRIVALTSNQEYLDLSMPLDQYSPSFPDTRSSTCSSGEDSVFSHEPLPEEPCLPRHPAQLANGGLKRR

SEQ ID NO: 5308 - protein, 820 aa, Homo sapiens; identical to SEQ ID NO: 5307

SEQ ID NO: 5309 - protein, 820 aa, Homo sapiens; identical to SEQ ID NO: 5307

SEQ ID NO: 5310 - protein, 822 aa, Homo sapiens [sequence omitted]

SEQ ID NO: 5311 - protein, 298 aa, Homo sapiens
MWSWKCLLFWAVLVTATLCTARPSPTLPEQAQPWGAPVEVESFLVHPGDLLQLRCRLRDDVQSINWLRDGVQLAESNRTRITGEEVEVQDSVPADSGLYACVTSSPSGSDTTYFSVNVSDALPSSEDDDDDDDSSSEEKETDNTKPNRMPVAPYWTSPEKMEKKLHAVPAAKTVKFKCPSSGTPNPTLRWLKNGKEFKPDHRIGGYKVRYATWSIIMDSVVPSDKGNYTCIVENEYGSINHTYQLDVVERSPHRPILQAGLPANKTVALGSNVEFMCKVYSDPQPHIQWLKHIEVNGS

SEQ ID NO: 5312 - protein, 820 aa, Homo sapiens
MWSWKCLLFWAVLVTATLCTARPSPTLPEQAQPWGAPVEVESFLVHPGDLLQLRCRLRDDVQSINWLRDGVQLAESNRTRITGEEVEVQDSVPADSGLYACVTSSPSGSDTTYFSVNVSDALPSSEDDDDDDDSSSEEKETDNTKPNRMPVAPYWTSPEKMEKKLHAVPAAKTVKFKCPSSGTPNPTLRWLKNGKEFKPDHRIGGYKVRYATWSIIMDSVVPSDKGNYTCIVENEYGSINHTYQLDVVERSPHRPILQAGLPANKTVALGSNVEFMCKVYSDPQPHIQWLKHIEVNGSKIGPDNLPYVQILKTAGVNTTDKEMEVLHLRNVSFEDAGEYTCLAGNSIGLSHHSAWLTVLEALEERPAVMTSPLYLEIIIYCTGAFLISCMVGSVIVYKMKSGTKKSDFHSQMAVHKLAKSIPLRRQVSADSSASMNSGVLLVRPSRLSSSGTPMLAGVSEYELPEDPRWELPRDRLVLGKPLGEGCFGQVVLAEAIGLDKDKPNRVTKVAVKMLKSDATEKDLSDLISEMEMMKMIGKHKNIINLLGACTQDGPLYVIVEYASKGNLREYLQARRPPGLEYCYNPSHNPEEQLSSKDLVSCAYQVARGMEYLASKKCIHRDLAARNVLVTEDNVMKIADFGLARDIHHIDYYKKTTNGRLPVKWMAPEALFDRIYTHQSDVWSFGVLLWEIFTLGGSPYPGVPVEELFKLLKEGHRMDKPSNCTNELYMMMRDCWHAVPSQRPTFKQLVEDLDRIVALTSNQEYLDLSMPLDQYSPSFPDTRSSTCSSGEDSVFSHEPLPEEPCLPRHPAQLANGGLKRR

SEQ ID NO: 5313 - protein, 367 aa, Homo sapiens
MWSWKCLLFWAVLVTATLCTARPSPTLPEQAQPWGAPVEVESFLVHPGDLLQLRCRLRDDVQSINWLRDGVQLAESNRTRITGEEVEVQDSVPADSGLYACVTSSPSGSDTTYFSVNVSVPIDALPSSEDDDDDDDSSSEEKETDNTKPNPVAPYWTSPEKMEKKLHAVPAAKTVKFKCPSSGTPNPTLRWLKNGKEFKPDHRIGGYKVRYATWSIIMDSVVPSDKGNYTCIVENEYGSINHTYQLDVVERSPHRPILQAGLPANKTVALGSNVEFMCKVYSDPQPHIQWLKHIEVNGSKIGPDNLPYVQILKHSGINSSDAEVLTLFNVTEAQSGEYVCKVSNYIGEANQSAWLTVTRPVAKDCWS

SEQ ID NO: 5314 - protein, 55 aa, Homo sapiens
MWSWKCLLFWAVLVTATLCTARPSPTLPEQDALPSSEDDDDDDDSSSEEKETDNT

SEQ ID NO: 5315 - protein, 85 aa, Homo sapiens
MWSWKCLLFWAVLVTATLCTARPSPTLPEQDALPSSEDDDDDDDSSSEEKETDNTKPNPVAPYWTSPEKMEKKLHAVPAAKTVKF

SEQ ID NO: 5316 - protein, 145 aa, Homo sapiens
MWSWKCLLFWAVLVTATLCTARPSPTLPEQDALPSSEDDDDDDDSSSEEKETDNTKPNPVAPYWTSPEKMEKKLHAVPAAKTVKFKCPSSGTPNPTLRWLKNGKEFKPDHRIGGYKVRYATWSIIMDSVVPSDKGNYTCIVENEY

SEQ ID NO: 5317 - protein, 733 aa, Homo sapiens
MWSWKCLLFWAVLVTATLCTARPSPTLPEQDALPSSEDDDDDDDSSSEEKETDNTKPNPVAPYWTSPEKMEKKLHAVPAAKTVKFKCPSSGTPNPTLRWLKNGKEFKPDHRIGGYKVRYATWSIIMDSVVPSDKGNYTCIVENEYGSINHTYQLDVVERSPHRPILQAGLPANKTVALGSNVEFMCKVYSDPQPHIQWLKHIEVNGSKIGPDNLPYVQILKHSGINSSDAEVLTLFNVTEAQSGEYVCKVSNYIGEANQSAWLTVTRPVAKALEERPAVMTSPLYLEIIIYCTGAFLISCMVGSVIVYKMKSGTKKSDFHSQMAVHKLAKSIPLRRQVTVSADSSASMNSGVLLVRPSRLSSSGTPMLAGVSEYELPEDPRWELPRDRLVLGKPLGEGCFGQVVLAEAIGLDKDKPNRVTKVAVKMLKSDATEKDLSDLISEMEMMKMIGKHKNIINLLGACTQDGPLYVIVEYASKGNLREYLQARRPPGLEYCYNPSHNPEEQLSSKDLVSCAYQVARGMEYLASKKCIHRDLAARNVLVTEDNVMKIADFGLARDIHHIDYYKKTTNGRLPVKWMAPEALFDRIYTHQSDVWSFGVLLWEIFTLGGSPYPGVPVEELFKLLKEGHRMDKPSNCTNELYMMMRDCWHAVPSQRPTFKQLVEDLDRIVALTSNQEYLDLSMPLDQYSPSFPDTRSSTCSSGEDSVFSHEPLPEEPCLPRHPAQLANGGLKRR

SEQ ID NO: 5318 - protein, 228 aa, Homo sapiens
MWSWKCLLFWAVLVTATLCTARPSPTLPEQDALPSSEDDDDDDDSSSEEKETDNTKPNPVAPYWTSPEKMEKKLHAVPAAKTVKFKCPSSGTPNPTLRWLKNGKEFKPDHRIGGYKVRYATWSIIMDSVVPSDKGNYTCIVENEYGSINHTYQLDVVERSPHRPILQAGLPANKTVALGSNVEFMCKVYSDPQPHIQWLKHIEVNGSKIGPDNLPYVQILKPWKRGRQ

SEQ ID NO: 5319 - protein, 731 aa, Homo sapiens
MWSWKCLLFWAVLVTATLCTARPSPTLPEQDALPSSEDDDDDDDSSSEEKETDNTKPNPVAPYWTSPEKMEKKLHAVPAAKTVKFKCPSSGTPNPTLRWLKNGKEFKPDHRIGGYKVRYATWSIIMDSVVPSDKGNYTCIVENEYGSINHTYQLDVVERSPHRPILQAGLPANKTVALGSNVEFMCKVYSDPQPHIQWLKHIEVNGSKIGPDNLPYVQILKTAGVNTTDKEMEVLHLRNVSFEDAGEYTCLAGNSIGLSHHSAWLTVLEALEERPAVMTSPLYLEIIIYCTGAFLISCMVGSVIVYKMKSGTKKSDFHSQMAVHKLAKSIPLRRQVTVSADSSASMNSGVLLVRPSRLSSSGTPMLAGVSEYELPEDPRWELPRDRLVLGKPLGEGCFGQVVLAEAIGLDKDKPNRVTKVAVKMLKSDATEKDLSDLISEMEMMKMIGKHKNIINLLGACTQDGPLYVIVEYASKGNLREYLQARRPPGLEYCYNPSHNPEEQLSSKDLVSCAYQVARGMEYLASKKCIHRDLAARNVLVTEDNVMKIADFGLARDIHHIDYYKKTTNGRLPVKWMAPEALFDRIYTHQSDVWSFGVLLWEIFTLGGSPYPGVPVEELFKLLKEGHRMDKPSNCTNELYMMMRDCWHAVPSQRPTFKQLVEDLDRIVALTSNQEYLDLSMPLDQYSPSFPDTRSSTCSSGEDSVFSHEPLPEEPCLPRHPAQLANGGLKRR

SEQ ID NO: 5320 - protein, 142 aa, Homo sapiens
MWSWKCLLFWAVLVTATLCTARPSPTLPEQDALPSSEDDDDDDDSSSEEKETDNTKPNRMPVAPYWTSPEKMEKKLHAVPAAKTVKFKCPSSGTPNPTLRWLKNGKEFKPDHRIGGYKVRYATWSIIMDSVVPSDKGNYTCI

SEQ ID NO: 5321 - protein, 733 aa, Homo sapiens
MWSWKCLLFWAVLVTATLCTARPSPTLPEQDALPSSEDDDDDDDSSSEEKETDNTKPNRMPVAPYWTSPEKMEKKLHAVPAAKTVKFKCPSSGTPNPTLRWLKNGKEFKPDHRIGGYKVRYATWSIIMDSVVPSDKGNYTCIVENEYGSINHTYQLDVVERSPHRPILQAGLPANKTVALGSNVEFMCKVYSDPQPHIQWLKHIEVNGSKIGPDNLPYVQILKTAGVNTTDKEMEVLHLRNVSFEDAGEYTCLAGNSIGLSHHSAWLTVLEALEERPAVMTSPLYLEIIIYCTGAFLISCMVGSVIVYKMKSGTKKSDFHSQMAVHKLAKSIPLRRQVTVSADSSASMNSGVLLVRPSRLSSSGTPMLAGVSEYELPEDPRWELPRDRLVLGKPLGEGCFGQVVLAEAIGLDKDKPNRVTKVAVKMLKSDATEKDLSDLISEMEMMKMIGKHKNIINLLGACTQDGPLYVIVEYASKGNLREYLQARRPPGLEYCYNPSHNPEEQLSSKDLVSCAYQVARGMEYLASKKCIHRDLAARNVLVTEDNVMKIADFGLARDIHHIDYYKKTTNGRLPVKWMAPEALFDRIYTHQSDVWSFGVLLWEIFTLGGSPYPGVPVEELFKLLKEGHRMDKPSNCTNELYMMMRDCWHAVPSQRPTFKQLVEDLDRIVALTSNQEYLDLSMPLDQYSPSFPDTRSSTCSSGEDSVFSHEPLPEEPCLPRHPAQLANGGLKRR

SEQ ID NO: 5322 - protein, 134 aa, Homo sapiens
VSCAYQVARGMEYLASKKCIHRDLAARNVLVTEDNVMKIADFGLARDIHHIDYYKKTTNGRLPVKWMAPEALFDRIYTHQSDVWSFGVLLWEIFTLGGSPYPGVPVEELFKLLKEGHRMDKPSNCTNELPAAGT

SEQ ID NO: 5323 - protein, 371 aa, Homo sapiens
FSSQPAVHKLTKRIPLRRQVTVSAESSSSMNSNTPLVRITTRLSSTADTPMLAGVSEYELPEDPKWEFPRDKLTLGKPLGEGCFGQVVMAEAVGIDKDKPKEAVTVAVKMLKDDATEKDLSDLVSEMEMMKMIGKHKNIINLLGACTQDGPLYVIVEYASKGNLREYLRARRPPGMEYSYDINRVPEEQMTFKDLVSCTYQLARGMEYLASQKCIHRDLAARNVLVTENNVMKIADFGLARDINNIDYYKKTTNGRLPVKWMAPEALFDRVYTHQSDVWSFGVLMWEIFTLGGSPYPGIPVEELFKLLKEGHRMDKPANCTNELNTWTSANLSNSIHLVTLTQEVLVLQEMILFFLQTPCLTNHAFLSIHT

SEQ ID NO: 5324 - protein, 593 aa, Homo sapiens
MCLNKTKQLFGVAKRLPFWRKERSPHRPILQAGLPANASTVVGGDVEFVCKVYSDAQPHIQWIKHVEKNGSKYGPDGLPYLKVLKAAGVNTTDKEIEVLYIRNVTFEDAGEYTCLAGNSIGISFHSAWLTVLPAPGREKEITASPDYLEIAIYCIGVFLIACMVVTVILCRMKNTTKKPDFSSQPAVHKLTKRIPLRRQVTVSAESSSSMNSNTPLVRITTRLSSTADTPMLAGVSEYELPEDPKWEFPRDKLTLGKPLGEGCFGQVVMAEAVGIDKDKPKEAVTVAVKMLKDDATEKDLSDLVSEMEMMKMIGKHKNIINLLGACTQDGPLYVIVEYASKGNLREYLRARRPPGMEYSYDINRVPEEQMTFKDLVSCTYQLARGMEYLASQKCIHRDLAARNVLVTENNVMKIADFGLARDINNIDYYKKTTNGRLPVKWMAPEALFDRVYTHQSDVWSFGVLMWEIFTLGGSPYPGIPVEELFKLLKEGHRMDKPANCTNELYMMMRDCWHAVPSQRPTFKQLVEDLDRILTLTTNEEYLDLSQPLEQYSPSYPDTRSSCSSGDDSVFSPDPMPYEPCLPQYPHINGSVKT

SEQ ID NO: 5325 - protein, 669 aa, Homo sapiens
MVSWGRFICLVVVTMATLSLARPSFSLVEDTTLEPEDAISSGDDEDDTDGAEDFVSENSNNKRAPYWTNTEKMEKRLHAVPAANTVKFRCPAGGNPMPTMRWLKNGKEFKQEHRIGGYKVRNQHWSLIMESVVPSDKGNYTCVVENEYGSINHTYHLDVVERSPHRPILQAGLPANASTVVGGDVEFVCKVYSDAQPHIQWIKHVEKNGSKYGPDGLPYLKVLKAAGVNTTDKEIEVLYIRNVTFEDAGEYTCLAGNSIGISFHSAWLTVLPAPGREKEITASPDYLEIAIYCIGVFLIACMVVTVILCRMKNTTKKPDFSSQPAVHKLTKRIPLRRQVSAESSSSMNSNTPLVRITTRLSSTADTPMLAGVSEYELPEDPKWEFPRDKLTLGKPLGEGCFGQVVMAEAVGIDKDKPKEAVTVAVKMLKDDATEKDLSDLVSEMEMMKMIGKHKNIINLLGACTQDGPLYVIVEYASKGNLREYLRARRPPGMEYSYDINRVPEEQMTFKDLVSCTYQLARGMEYLASQKCIHRDLAARNVLVTENNVMKIADFGLARDINNIDYYKKTTNGRLPVKWMAPEALFDRVYTHQSDVWSFGVLMWEIFTLGGSPYPGIPVEELFKLLKEGHRMDKPANCTNELYMMMRDCWHAVPSQRPTFKQLVEDLDRI

SEQ ID NO: 5326 - protein, 707 aa, Homo sapiens
MVSWGRFICLVVVTMATLSLARPSFSLVEDTTLEPEDAISSGDDEDDTDGAEDFVSENSNNKRAPYWTNTEKMEKRLHAVPAANTVKFRCPAGGNPMPTMRWLKNGKEFKQEHRIGGYKVRNQHWSLIMESVVPSDKGNYTCVVENEYGSINHTYHLDVVERSPHRPILQAGLPANASTVVGGDVEFVCKVYSDAQPHIQWIKHVEKNGSKYGPDGLPYLKVLKAAGVNTTDKEIEVLYIRNVTFEDAGEYTCLAGNSIGISFHSAWLTVLPAPGREKEITASPDYLEIAIYCIGVFLIACMVVTVILCRMKNTTKKPDFSSQPAVHKLTKRIPLRRQVTVSAESSSSMNSNTPLVRITTRLSSTADTPMLAGVSEYELPEDPKWEFPRDKLTLGKPLGEGCFGQVVMAEAVGIDKDKPKEAVTVAVKMLKDDATEKDLSDLVSEMEMMKMIGKHKNIINLLGACTQDGPLYVIVEYASKGNLREYLRARRPPGMEYSYDINRVPEEQMTFKDLVSCTYQLARGMEYLASQKCIHRDLAARNVLVTENNVMKIADFGLARDINNIDYYKKTTNGRLPVKWMAPEALFDRVYTHQSDVWSFGVLMWEIFTLGGSPYPGIPVEELFKLLKEGHRMDKPANCTNELYMMMRDCWHAVPSQRPTFKQLVEDLDRILTLTTNEEEKKVSGAVDCHKPPCNPSHLPCVLAVDQ

SEQ ID NO: 5327 - protein, 732 aa, Homo sapiens
MVSWGRFICLVVVTMATLSLARPSFSLVEDTTLEPEDAISSGDDEDDTDGAEDFVSENSNNKRAPYWTNTEKMEKRLHAVPAANTVKFRCPAGGNPMPTMRWLKNGKEFKQEHRIGGYKVRNQHWSLIMESVVPSDKGNYTCVVENEYGSINHTYHLDVVERSPHRPILQAGLPANASTVVGGDVEFVCKVYSDAQPHIQWIKHVEKNGSKYGPDGLPYLKVLKAAGVNTTDKEIEVLYIRNVTFEDAGEYTCLAGNSIGISFHSAWLTVLPAPGREKEITASPDYLEIAIYCIGVFLIACMVVTVILCRMKNTTKKPDFSSQPAVHKLTKRIPLRRQVTVSAESSSSMNSNTPLVRITTRLSSTADTPMLAGVSEYELPEDPKWEFPRDKLTLGKPLGEGCFGQVVMAEAVGIDKDKPKEAVTVAVKMLKDDATEKDLSDLVSEMEMMKMIGKHKNIINLLGACTQDGPLYVIVEYASKGNLREYLRARRPPGMEYSYDINRVPEEQMTFKDLVSCTYQLARGMEYLASQKCIHRDLAARNVLVTENNVMKIADFGLARDINNIDYYKKTTNGRLPVKWMAPEALFDRVYTHQSDVWSFGVLMWEIFTLGGSPYPGIPVEELFKLLKEGHRMDKPANCTNELYMMMRDCWHAVPSQRPTFKQLVEDLDRILTLTTNEEYLDLSQPLEQYSPSYPDTRSSCSSGDDSVFSPDPMPYEPCLPQYPHINGSVKT

SEQ ID NO: 5328 - protein, 680 aa, Homo sapiens
MVSWGRFICLVVVTMATLSLARPSFSLVEDTTLEPEDAISSGDDEDDTDGAEDFVSENSNNKRAPYWTNTEKMEKRLHAVPAANTVKFRCPAGGNPMPTMRWLKNGKEFKQEHRIGGYKVRNQHWSLIMESVVPSDKGNYTCVVENEYGSINHTYHLDVVERSPHRPILQAGLPANASTVVGGDVEFVCKVYSDAQPHIQWIKHVEKNGSKYGPDGLPYLKVLKHSGINSSNAEVLALFNVTEADAGEYICKVSNYIGQANQSAWLTVLPKQQAPGREKEITASPDYLEIAIYCIGVFLIACMVVTVILCRMKNTTKKPDFSSQPAVHKLTKRIPLRRQVTVSAESSSSMNSNTPLVRITTRLSSTADTPMLAGVSEYELPEDPKWEFPRDKLTLGKPLGEGCFGQVVMAEAVGIDKDKPKEAVTVAVKMLKDDATEKDLSDLVSEMEMMKMIGKHKNIINLLGACTQDGPLYVIVEYASKGNLREYLRARRPPGMEYSYDINRVPEEQMTFKDLVSCTYQLARGMEYLASQKCIHRDLAARNVLVTENNVMKIADFGLARDINNIDYYKKTTNGRLPVKWMAPEALFDRVYTHQSDVWSFGVLMWEIFTLGGSPYPGIPVEELFKLLKEGHRMDKPANCTNELYMMMRDCWHAVPSQRPTFKQLVEDLDRILTLTTNEI

SEQ ID NO: 5329 - protein, 64 aa, Homo sapiens
MVSWGRFICLVVVTMATLSLARPSFSLVEDTTLEPEDAISSGDDEDDTDGAEDFVSENSNNKSK

SEQ ID NO: 5330 - protein, 144 aa, Homo sapiens
MVSWGRFICLVVVTMATLSLARPSFSLVEDTTLEPEEPPTKYQISQPEVYVAAPGESLEMPSHPEMMRMTPMVRKILSVRTVTTRVSNCPAPMVPERGAWREVLPVTCLLVDSSAPCCVPRPLPFPAVSTFLTFKPENKPVLLH

SEQ ID NO: 5331 - protein, 709 aa, Homo sapiens
MVSWGRFICLVVVTMATLSLARPSFSLVEDTTLEPEEPPTKYQISQPEVYVAAPGESLEVRCLLKDAAVISWTKDGVHLGPNNRTVLIGEYLQIKGATPRDSGLYACTASRTVDSETWYFMVNVTDAISSGDDEDDTDGAEDFVSENSNNKRAPYWTNTEKMEKRLHAVPAANTVKFRCPAGGNPMPTMRWLKNGKEFKQEHRIGGYKVRNQHWSLIMESVVPSDKGNYTCVVENEYGSINHTYHLDVVAPGREKEITASPDYLEIAIYCIGVFLIACMVVTVILCRMKNTTKKPDFSSQPAVHKLTKRIPLRRQVTVSAESSSSMNSNTPLVRITTRLSSTADTPMLAGVSEYELPEDPKWEFPRDKLTLGKPLGEGCFGQVVMAEAVGIDKDKPKEAVTVAVKMLKDDATEKDLSDLVSEMEMMKMIGKHKNIINLLGACTQDGPLYVIVEYASKGNLREYLRARRPPGMEYSYDINRVPEEQMTFKDLVSCTYQLARGMEYLASQKCIHRDLAARNVLVTENNVMKIADFGLARDINNIDYYKKTTNGRLPVKWMAPEALFDRVYTHQSDVWSFGVLMWEIFTLGGSPYPGIPVEELFKLLKEGHRMDKPANCTNELYMMMRDCWHAVPSQRPTFKQLVEDLDRILTLTTNEEYLDLSQPLEQYSPSYPDTRSSCSSGDDSVFSPDPMPYEPCLPQYPHINGSVKT

SEQ ID NO: 5332 - protein, 821 aa, Homo sapiens
MVSWGRFICLVVVTMATLSLARPSFSLVEDTTLEPEEPPTKYQISQPEVYVAAPGESLEVRCLLKDAAVISWTKDGVHLGPNNRTVLIGEYLQIKGATPRDSGLYACTASRTVDSETWYFMVNVTDAISSGDDEDDTDGAEDFVSENSNNKRAPYWTNTEKMEKRLHAVPAANTVKFRCPAGGNPMPTMRWLKNGKEFKQEHRIGGYKVRNQHWSLIMESVVPSDKGNYTCVVENEYGSINHTYHLDVVERSPHRPILQAGLPANASTVVGGDVEFVCKVYSDAQPHIQWIKHVEKNGSKYGPDGLPYLKVLKAAGVNTTDKEIEVLYIRNVTFEDAGEYTCLAGNSIGISFHSAWLTVLPAPGREKEITASPDYLEIAIYCIGVFLIACMVVTVILCRMKNTTKKPDFSSQPAVHKLTKRIPLRRQVTVSAESSSSMNSNTPLVRITTRLSSTADTPMLAGVSEYELPEDPKWEFPRDKLTLGKPLGEGCFGQVVMAEAVGIDKDKPKEAVTVAVKMLKDDATEKDLSDLVSEMEMMKMIGKHKNIINLLGACTQDGPLYVIVEYASKGNLREYLRARRPPGMEYSYDINRVPEEQMTFKDLVSCTYQLARGMEYLASQKCIHRDLAARNVLVTENNVMKIADFGLARDINNIDYYKKTTNGRLPVKWMAPEALFDRVYTHQSDVWSFGVLMWEIFTLGGSPYPGIPVEELFKLLKEGHRMDKPANCTNELYMMMRDCWHAVPSQRPTFKQLVEDLDRILTLTTNEEYLDLSQPLEQYSPSYPDTRSSCSSGDDSVFSPDPMPYEPCLPQYPHINGSVKT

SEQ ID NO: 5333 - protein, 821 aa, Homo sapiens
MVSWGRFICLVVVTMATLSLARPSFSLVEDTTLEPEEPPTKYQISQPEVYVAAPGESLEVRCLLKDAAVISWTKDGVHLGPNNRTVLIGEYLQIKGATPRDSGLYACTASRTVDSETWYFMVNVTDAISSGDDEDDTDGAEDFVSENSNNKRAPYWTNTEKMEKRLHAVPAANTVKFRCPAGGNPMPTMRWLKNGKEFKQEHRIGGYKVRNQHWSLIMESVVPSDKGNYTCVVENEYGSINHTYHLDVVERSPHRPILQAGLPANASTVVGGDVEFVCKVYSDAQPHIQWIKHVEKNGSKYGPDGLPYLKVLKVFAAGVNTTDKEIEVLYIRNVTFEDAGEYTCLAGNSIGISFHSAWLTVLPAPGREKEITASPDYLEIAIYCIGVFLIACMVVTVILCRMKNTTKKPDFSSQPAVHKLTKRIPLRRQVSAESSSSMNSNTPLVRITTRLSSTADTPMLAGVSEYELPEDPKWEFPRDKLTLGKPLGEGCFGQVVMAEAVGIDKDKPKEAVTVAVKMLKDDATEKDLSDLVSEMEMMKMIGKHKNIINLLGACTQDGPLYVIVEYASKGNLREYLRARRPPGMEYSYDINRVPEEQMTFKDLVSCTYQLARGMEYLASQKCIHRDLAARNVLVTENNVMKIADFGLARDINNIDYYKKTTNGRLPVKWMAPEALFDRVYTHQSDVWSFGVLMWEIFTLGGSPYPGIPVEELFKLLKEGHRMDKPANCTNELYMMMRDCWHAVPSQRPTFKQLVEDLDRILTLTTNEEYLDLSQPLEQYSPSYPDTRSSCSSGDDSVFSPDPMPYEPCLPQYPHINGSVKT

SEQ ID NO: 5334 - protein, 819 aa, Homo sapiens
MVSWGRFICLVVVTMATLSLARPSFSLVEDTTLEPEEPPTKYQISQPEVYVAAPGESLEVRCLLKDAAVISWTKDGVHLGPNNRTVLIGEYLQIKGATPRDSGLYACTASRTVDSETWYFMVNVTDAISSGDDEDDTDGAEDFVSENSNNKRAPYWTNTEKMEKRLHAVPAANTVKFRCPAGGNPMPTMRWLKNGKEFKQEHRIGGYKVRNQHWSLIMESVVPSDKGNYTCVVENEYGSINHTYHLDVVERSPHRPILQAGLPANASTVVGGDVEFVCKVYSDAQPHIQWIKHVEKNGSKYGPDGLPYLKVLKAAGVNTTDKEIEVLYIRNVTFEDAGEYTCLAGNSIGISFHSAWLTVLPAPGREKEITASPDYLEIAIYCIGVFLIACMVVTVILCRMKNTTKKPDFSSQPAVHKLTKRIPLRRQVSAESSSSMNSNTPLVRITTRLSSTADTPMLAGVSEYELPEDPKWEFPRDKLTLGKPLGEGCFGQVVMAEAVGIDKDKPKEAVTVAVKMLKDDATEKDLSDLVSEMEMMKMIGKHKNIINLLGACTQDGPLYVIVEYASKGNLREYLRARRPPGMEYSYDINRVPEEQMTFKDLVSCTYQLARGMEYLASQKCIHRDLAARNVLVTENNVMKIADFGLARDINNIDYYKKTTNGRLPVKWMAPEALFDRVYTHQSDVWSFGVLMWEIFTLGGSPYPGIPVEELFKLLKEGHRMDKPANCTNELYMMMRDCWHAVPSQRPTFKQLVEDLDRILTLTTNEEYLDLSQPLEQYSPSYPDTRSSCSSGDDSVFSPDPMPYEPCLPQYPHINGSVKT

SEQ ID NO: 5335 - protein, 768 aa, Homo sapiens
MVSWGRFICLVVVTMATLSLARPSFSLVEDTTLEPEEPPTKYQISQPEVYVAAPGESLEVRCLLKDAAVISWTKDGVHLGPNNRTVLIGEYLQIKGATPRDSGLYACTASRTVDSETWYFMVNVTDAISSGDDEDDTDGAEDFVSENSNNKRAPYWTNTEKMEKRLHAVPAANTVKFRCPAGGNPMPTMRWLKNGKEFKQEHRIGGYKVRNQHWSLIMESVVPSDKGNYTCVVENEYGSINHTYHLDVVERSPHRPILQAGLPANASTVVGGDVEFVCKVYSDAQPHIQWIKHVEKNGSKYGPDGLPYLKVLKHSGINSSNAEVLALFNVTEADAGEYICKVSNYIGQANQSAWLTVLPKQQAPGREKEITASPDYLEIAIYCIGVFLIACMVVTVILCRMKNTTKKPDFSSQPAVHKLTKRIPLRRQVTVSAESSSSMNSNTPLVRITTRLSSTADTPMLAGVSEYELPEDPKWEFPRDKLTLGKPLGEGCFGQVVMAEAVGIDKDKPKEAVTVAVKMLKDDATEKDLSDLVSEMEMMKMIGKHKNIINLLGACTQDGPLYVIVEYASKGNLREYLRARRPPGMEYSYDINRVPEEQMTFKDLVSCTYQLARGMEYLASQKCIHRDLAARNVLVTENNVMKIADFGLARDINNIDYYKKTTNGRLPVKWMAPEALFDRVYTHQSDVWSFGVLMWEIFTLGGSPYPGIPVEELFKLLKEGHRMDKPANCTNELYMMMRDCWHAVPSQRPTFKQLVEDLDRILTLTTNE

SEQ ID NO: 5336 - protein, 769 aa, Homo sapiens
MVSWGRFICLVVVTMATLSLARPSFSLVEDTTLEPEEPPTKYQISQPEVYVAAPGESLEVRCLLKDAAVISWTKDGVHLGPNNRTVLIGEYLQIKGATPRDSGLYACTASRTVDSETWYFMVNVTDAISSGDDEDDTDGAEDFVSENSNNKRAPYWTNTEKMEKRLHAVPAANTVKFRCPAGGNPMPTMRWLKNGKEFKQEHRIGGYKVRNQHWSLIMESVVPSDKGNYTCVVENEYGSINHTYHLDVVERSPHRPILQAGLPANASTVVGGDVEFVCKVYSDAQPHIQWIKHVEKNGSKYGPDGLPYLKVLKHSGINSSNAEVLALFNVTEADAGEYICKVSNYIGQANQSAWLTVLPKQQAPGREKEITASPDYLEIAIYCIGVFLIACMVVTVILCRMKNTTKKPDFSSQPAVHKLTKRIPLRRQVTVSAESSSSMNSNTPLVRITTRLSSTADTPMLAGVSEYELPEDPKWEFPRDKLTLGKPLGEGCFGQVVMAEAVGIDKDKPKEAVTVAVKMLKDDATEKDLSDLVSEMEMMKMIGKHKNIINLLGACTQDGPLYVIVEYASKGNLREYLRARRPPGMEYSYDINRVPEEQMTFKDLVSCTYQLARGMEYLASQKCIHRDLAARNVLVTENNVMKIADFGLARDINNIDYYKKTTNGRLPVKWMAPEALFDRVYTHQSDVWSFGVLMWEIFTLGGSPYPGIPVEELFKLLKEGHRMDKPANCTNELYMMMRDCWHAVPSQRPTFKQLVEDLDRILTLTTNEI

SEQ ID NO: 5337 - protein, 705 aa, Homo sapiens
MVSWGRFICLVVVTMATLSLARPSFSLVEDTTLEPEEPPTKYQISQPEVYVAAPGESLEVRCLLKDAAVISWTKDGVHLGPNNRTVLIGEYLQIKGATPRDSGLYACTASRTVDSETWYFMVNVTDAISSGDDEDDTDGAEDFVSENSNNKRAPYWTNTEKMEKRLHAVPAANTVKFRCPAGGNPMPTMRWLKNGKEFKQEHRIGGYKVRNQHWSLIMESVVPSDKGNYTCVVENEYGSINHTYHLDVVERSPHRPILQAGLPANASTVVGGDVEFVCKVYSDAQPHIQWIKHVEKNGSKYGPDGLPYLKVLKVSAESSSSMNSNTPLVRITTRLSSTADTPMLAGVSEYELPEDPKWEFPRDKLTLGKPLGEGCFGQVVMAEAVGIDKDKPKEAVTVAVKMLKDDATEKDLSDLVSEMEMMKMIGKHKNIINLLGACTQDGPLYVIVEYASKGNLREYLRARRPPGMEYSYDINRVPEEQMTFKDLVSCTYQLARGMEYLASQKCIHRDLAARNVLVTENNVMKIADFGLARDINNIDYYKKTTNGRLPVKWMAPEALFDRVYTHQSDVWSFGVLMWEIFTLGGSPYPGIPVEELFKLLKEGHRMDKPANCTNELYMMMRDCWHAVPSQRPTFKQLVEDLDRILTLTTNEEYLDLSQPLEQYSPSYPDTRSSCSSGDDSVFSPDPMPYEPCLPQYPHINGSVKT

SEQ ID NO: 5338 - protein, 822 aa, Homo sapiens
MVSWGRFICLVVVTMATLSLARPSFSLVEDTTLEPEEPPTKYQISQPEVYVAAPGESLEVRCLLKDAAVISWTKDGVHLGPNNRTVLIGEYLQIKGATPRDSGLYACTASRTVDSETWYFMVNVTDAISSGDDEDDTDGAEDFVSENSNNKRAPYWTNTEKMEKRLHAVPAANTVKFRCPAGGNPMPTMRWLKNGKEFKQEHRIGGYKVRNQHWSLIMESVVPSDKGNYTCVVENEYGSINHTYHLDVVERSPHRPILQAGLPANASTVVGGDVEFVCKVYSDAQPHIQWIKHVEKNGSKYGPDGLPYLKVLKHSGINSSNAEVLALFNVTEADAGEYICKVSNYIGQANQSAWLTVLPKQQAPGREKEITASPDYLEIAIYCIGVFLIACMVVTVILCRMKNTTKKPDFSSQPAVHKLTKRIPLRRQVTVSAESSSSMNSNTPLVRITTRLSSTADTPMLAGVSEYELPEDPKWEFPRDKLTLGKPLGEGCFGQVVMAEAVGIDKDKPKEAVTVAVKMLKDDATEKDLSDLVSEMEMMKMIGKHKNIINLLGACTQDGPLYVIVEYASKGNLREYLRARRPPGMEYSYDINRVPEEQMTFKDLVSCTYQLARGMEYLASQKCIHRDLAARNVLVTENNVMKIADFGLARDINNIDYYKKTTNGRLPVKWMAPEALFDRVYTHQSDVWSFGVLMWEIFTLGGSPYPGIPVEELFKLLKEGHRMDKPANCTNELYMMMRDCWHAVPSQRPTFKQLVEDLDRILTLTTNEEYLDLSQPLEQYSPSYPDTRSSCSSGDDSVFSPDPMPYEPCLPQYPHINGSVKT

SEQ ID NO: 5339 - protein, 254 aa, Homo sapiens
MVSWGRFICLVVVTMATLSLARPSFSLVEDTTLEPEEPPTKYQISQPEVYVAAPGESLEVRCLLKDAAVISWTKDGVHLGPNNRTVLIGEYLQIKGATPRDSGLYACTASRTVDSETWYFMVNVTDAISSGDDEDDTDGAEDFVSENSNNKRAPYWTNTEKMEKRLHAVPAANTVKFRCPAGGNPMPTMRWLKNGKEFKQEHRIGGYKVRNQHWSLIMESVVPSDKGNYTCVVENEYGSINHTYHLDVVGSQGL

SEQ ID NO: 5340 - protein, 704 aa, Homo sapiens
MVSWGRFICLVVVTMATLSLARPSFSLVEDTTLEPEGAPYWTNTEKMEKRLHAVPAANTVKFRCPAGGNPMPTMRWLKNGKEFKQEHRIGGYKVRNQHWSLIMESVVPSDKGNYTCVVENEYGSINHTYHLDVVERSPHRPILQAGLPANASTVVGGDVEFVCKVYSDAQPHIQWIKHVEKNGSKYGPDGLPYLKVLKAAGVNTTDKEIEVLYIRNVTFEDAGEYTCLAGNSIGISFHSAWLTVLPAPGREKEITASPDYLEIAIYCIGVFLIACMVVTVILCRMKNTTKKPDFSSQPAVHKLTKRIPLRRQVSAESSSSMNSNTPLVRITTRLSSTADTPMLAGVSEYELPEDPKWEFPRDKLTLGKPLGEGCFGQVVMAEAVGIDKDKPKEAVTVAVKMLKDDATEKDLSDLVSEMEMMKMIGKHKNIINLLGACTQDGPLYVIVEYASKGNLREYLRARRPPGMEYSYDINRVPEEQMTFKDLVSCTYQLARGMEYLASQKCIHRDLAARNVLVTENNVMKIADFGLARDINNIDYYKKTTNGRLPVKWMAPEALFDRVYTHQSDVWSFGVLMWEIFTLGGSPYPGIPVEELFKLLKEGHRMDKPANCTNELYMMMRDCWHAVPSQRPTFKQLVEDLDRILTLTTNEEYLDLSQPLEQYSPSYPDTRSSCSSGDDSVFSPDPMPYEPCLPQYPHINGSVKT

SEQ ID NO: 5341 - protein, 707 aa, Homo sapiens
MVSWGRFICLVVVTMATLSLARPSFSLVEDTTLEPEGAPYWTNTEKMEKRLHAVPAANTVKFRCPAGGNPMPTMRWLKNGKEFKQEHRIGGYKVRNQHWSLIMESVVPSDKGNYTCVVENEYGSINHTYHLDVVERSPHRPILQAGLPANASTVVGGDVEFVCKVYSDAQPHIQWIKHVEKNGSKYGPDGLPYLKVLKHSGINSSNAEVLALFNVTEADAGEYICKVSNYIGQANQSAWLTVLPKQQAPGREKEITASPDYLEIAIYCIGVFLIACMVVTVILCRMKNTTKKPDFSSQPAVHKLTKRIPLRRQVTVSAESSSSMNSNTPLVRITTRLSSTADTPMLAGVSEYELPEDPKWEFPRDKLTLGKPLGEGCFGQVVMAEAVGIDKDKPKEAVTVAVKMLKDDATEKDLSDLVSEMEMMKMIGKHKNIINLLGACTQDGPLYVIVEYASKGNLREYLRARRPPGMEYSYDINRVPEEQMTFKDLVSCTYQLARGMEYLASQKCIHRDLAARNVLVTENNVMKIADFGLARDINNIDYYKKTTNGRLPVKWMAPEALFDRVYTHQSDVWSFGVLMWEIFTLGGSPYPGIPVEELFKLLKEGHRMDKPANCTNELYMMMRDCWHAVPSQRPTFKQLVEDLDRILTLTTNEEYLDLSQPLEQYSPSYPDTRSSCSSGDDSVFSPDPMPYEPCLPQYPHINGSVKT

SEQ ID NO: 5342 - protein, 251 aa, Homo sapiens
MVSWGRFICLVVVTMATLSLARPSFSLVEDTTLEPEGAPYWTNTEKMEKRLHAVPAANTVKFRCPAGGNPMPTMRWLKNGKEFKQEHRIGGYKVRNQHWSLIMESVVPSDKGNYTCVVENEYGSINHTYHLDVVERSPHRPILQAGLPANASTVVGGDVEFVCKVYSDAQPHIQWIKHVEKNGSKYGPDGLPYLKVLKHSGINSSNAEVLALFNVTEADAGEYICKVSNYIGQANQSAWLTVLPKQQGRRC

SEQ ID NO: 5343 - protein, 86 aa, Homo sapiens
  SITE 1: note = misc_feature - Xaa can be any naturally occurring amino acid
XPYPGIPVEELFKLLKEGHRMDKPANCTNELYMMMRDCWHAVPSQRPTFKQLVEDLDRILTLTTNEEYLDLSQPLEPYSPCYPDPR

SEQ ID NO: 5344 - protein, 136 aa, Homo sapiens
  SITE 1: note = misc_feature - Xaa can be any naturally occurring amino acid
XSLARPSFSLVEDTTLEPEEPPTKYQISQPEVYVAAPGESLEVRCLLKDAAVISWTKDGVHLGPNNRTVLIGEYLQIKGATPRDSGLYACTASRTVDSETWYFMVNVTDAISSGDDEDDTDGAEDFVSENSNNKSK

SEQ ID NO: 5345 - protein, 364 aa, Homo sapiens
MGAPACALALCVAVAIVAGASSESLGTEQRVVGRAAEVPGPEPGQQEQLVFGSGDAVELSCPPPGGGPMGPTVWVKDGTGLVPSERVLVGPQRLQVLNASHEDSGAYSCRQRLTQRVLCHFSVRVTDAPSSGDDEDGEDEAEDTGVDTGAPYWTRPERMDKKLLAVPAANTVRFRCPAAGNPTPSISWLKNGREFRGEHRIGGIKLRHQQWSLVMESVVPSDRGNYTCVVENKFGSIRQTYTLDVLERSPHRPILQAGLPANQTAVLGSDVEFHCKVYSDAQPHIQWLKHVEVNGSKVGPDGTPYVTVLKSWISESVEADVRLRLANVSERDGGEYLCRATNFIGVAEKAFWLSVHGPRADGGR

SEQ ID NO: 5346 - protein, 694 aa, Homo sapiens
MGAPACALALCVAVAIVAGASSESLGTEQRVVGRAAEVPGPEPGQQEQLVFGSGDAVELSCPPPGGGPMGPTVWVKDGTGLVPSERVLVGPQRLQVLNASHEDSGAYSCRQRLTQRVLCHFSVRVTDAPSSGDDEDGEDEAEDTGVDTGAPYWTRPERMDKKLLAVPAANTVRFRCPAAGNPTPSISWLKNGREFRGEHRIGGIKLRHQQWSLVMESVVPSDRGNYTCVVENKFGSIRQTYTLDVLERSPHRPILQAGLPANQTAVLGSDVEFHCKVYSDAQPHIQWLKHVEVNGSKVGPDGTPYVTVLKVSLESNASMSSNTPLVRIARLSSGEGPTLANVSELELPADPKWELSRARLTLGKPLGEGCFGQVVMAEAIGIDKDRAAKPVTVAVKMLKDDATDKDLSDLVSEMEMMKMIGKHKNIINLLGACTQGGPLYVLVEYAAKGNLREFLRARRPPGLDYSFDTCKPPEEQLTFKDLVSCAYQVARGMEYLASQKCIHRDLAARNVLVTEDNVMKIADFGLARDVHNLDYYKKTTNGRLPVKWMAPEALFDRVYTHQSDVWSFGVLLWEIFTLGGSPYPGIPVEELFKLLKEGHRMDKPANCTHDLYMIMRECWHAAPSQRPTFKQLVEDLDRVLTVTSTDEYLDLSAPFEQYSPGGQDTPSSSSSGDDSVFAHDLLPPAPPSSGGSRT

SEQ ID NO: 5347 - protein, 808 aa, Homo sapiens
MGAPACALALCVAVAIVAGASSESLGTEQRVVGRAAEVPGPEPGQQEQLVFGSGDAVELSCPPPGGGPMGPTVWVKDGTGLVPSERVLVGPQRLQVLNASHEDSGAYSCRQRLTQRVLCHFSVRVTDAPSSGDDEDGEDEAEDTGVDTGAPYWTRPERMDKKLLAVPAANTVRFRCPAAGNPTPSISWLKNGREFRGEHRIGGIKLRHQQWSLVMESVVPSDRGNYTCVVENKFGSIRQTYTLDVLERSPHRPILQAGLPANQTAVLGSDVEFHCKVYSDAQPHIQWLKHVEVNGSKVGPDGTPYVTVLKSWISESVEADVRLRLANVSERDGGEYLCRATNFIGVAEKAFWLSVHGPRAAEEELVEADEAGSVYAGILSYGVGFFLFILVVAAVTLCRLRSPPKKGLGSPTVHKISRFPLKRQVSLESNASMSSNTPLVRIARLSSGEGPTLANVSELELPADPKWELSRARLTLGKPLGEGCFGQVVMAEAIGIDKDRAAKPVTVAVKMLKDDATDKDLSDLVSEMEMMKMIGKHKNIINLLGACTQGGPLYVLVEYAAKGNLREFLRARRPPGLDYSFDTCKPPEEQLTFKDLVSCAYQVARGMEYLASQKCIHRDLAARNVLVTEDNVMKIADFGLARDVHNLDYYKKTTNGRLPVKWMAPEALFDRVYTHQSDVWSFGVLLWEIFTLGGSPYPGIPVEELFKLLKEGHRMDKPANCTHDLYMIMRECWHAAPSQRPTFKQLVEDLDRVLTVTSTDEYLDLSAPFEQYSPGGQDTPSSSSSGDDSVFAHDLLPPAPPSSGGSRT

SEQ ID NO: 5348 - protein, 806 aa, Homo sapiens
MGAPACALALCVAVAIVAGASSESLGTEQRVVGRAAEVPGPEPGQQEQLVFGSGDAVELSCPPPGGGPMGPTVWVKDGTGLVPSERVLVGPQRLQVLNASHEDSGAYSCRQRLTQRVLCHFSVRVTDAPSSGDDEDGEDEAEDTGVDTGAPYWTRPERMDKKLLAVPAANTVRFRCPAAGNPTPSISWLKNGREFRGEHRIGGIKLRHQQWSLVMESVVPSDRGNYTCVVENKFGSIRQTYTLDVLERSPHRPILQAGLPANQTAVLGSDVEFHCKVYSDAQPHIQWLKHVEVNGSKVGPDGTPYVTVLKTAGANTTDKELEVLSLHNVTFEDAGEYTCLAGNSIGFSHHSAWLVVLPAEEELVEADEAGSVYAGILSYGVGFFLFILVVAAVTLCRLRSPPKKGLGSPTVHKISRFPLKRQVSLESNASMSSNTPLVRIARLSSGEGPTLANVSELELPADPKWELSRARLTLGKPLGEGCFGQVVMAEAIGIDKDRAAKPVTVAVKMLKDDATDKDLSDLVSEMEMMKMIGKHKNIINLLGACTQGGPLYVLVEYAAKGNLREFLRARRPPGLDYSFDTCKPPEEQLTFKDLVSCAYQVARGMEYLASQKCIHRDLAARNVLVTEDNVMKIADFGLARDVHNLDYYKKTTNGRLPVKWMAPEALFDRVYTHQSDVWSFGVLLWEIFTLGGSPYPGIPVEELFKLLKEGHRMDKPANCTHDLYMIMRECWHAAPSQRPTFKQLVEDLDRVLTVTSTDEYLDLSAPFEQYSPGGQDTPSSSSSGDDSVFAHDLLPPAPPSSGGSRT

SEQ ID NO: 5349 - protein, 694 aa, Homo sapiens; identical to SEQ ID NO: 5346

SEQ ID NO: 5350 - protein, 792 aa, Homo sapiens
MGAPACALALCVAVAIVAGASSESLGTEQRVVGRAAEVPGPEPGQQEQLVFGSGDAVELSCPPPGGGPMGPTVWVKDGTGLVPSERVLVGPQRLQVLNASHEDSGAYSCRQRLTQRVLCHFSVRVTDAPSSGDDEDGEDEAEDTGVDTGAPYWTRPERMDKKLLAVPAANTVRFRCPAAGNPTPSISWLKNGREFRGEHRIGGIKLRHQQWSLVMESVVPSDRGNYTCVVENKFGSIRQTYTLDVLERSPHRPILQAGLPANQTAVLGSDVEFHCKVYSDAQPHIQWLKHVEVNGSKVGPDGTPYVTVLKTAGANTTDKELEVLSLHNVTFEDAGEYTCLAGNSIGFSHHSAWLVVLPAEEELVEADEAGSVYAGILSYGVGFFLFILVVAAVTLCRLRSPPKKGLGSPTVHKISRFPLKRQQVSLESNASMSSNTPLVRIARLSSGEGPTLANVSELELPADPKWELSRARLTLGKPLGEGCFGQVVMAEAIGIDKDRAAKPVTVAVKMLKDDATDKDLSDLVSEMEMMKMIGKHKNIINLLGACTQGGPLYVLVEYAAKGNLREFLRARRPPGLDYSFDTCKPPEEQLTFKDLVSCAYQVARGMEYLASQKCIHRDLAARNVLVTEDNVMKIADFGLARDVHNLDYYKKTTNLVLWGPALGDLHAGGLPVPRHPCGGALQAAEGGPPHGQARQLHTRPVHDHAGVLACRALPEAHLQAAGGGPGPCPYRDVHRRVPGPVGAFRAVLPGWPGHPQLQLLRGRLRVCPRPAAPGPTQQWGLADVKGHWSPTM

SEQ ID NO: 5351 - protein, 364 aa, Homo sapiens; identical to SEQ ID NO: 5345

SEQ ID NO: 5352 - protein, 112 aa, Homo sapiens
NPTPSISWLKNGREFRGEHRIGGIKLRHQQWSLVMESVVPSDRGNYTCVVENKFGSIRQTYTLDVLERSPHRPILQAGLPANQTAVLGSDVEFHCKTAGANTTDKELEVLSL

SEQ ID NO: 5353 - protein, 72 aa, Homo sapiens
MRLLLALLGVLLSVPGPPVLSLEASEEVELASIHLSLCLRERTGLAGRRALSWAAELVSPAWLPAWSSKSRS

SEQ ID NO: 5354 - protein, 87 aa, Homo sapiens
MRLLLALLGVLLSVPGPPVLSLEASEEVELEPCLAPSLEQQEQELTVALGQPVRLCCGRAERGGHWYKEGSRLAPAGRVRGWRGRLE

SEQ ID NO: 5355 - protein, 108 aa, Homo sapiens
MRLLLALLGVLLSVPGPPVLSLEASEEVELEPCLAPSLEQQEQELTVALGQPVRLCCGRAERGGHWYKEGSRLAPAGRVRGWRGRLEIASFLPEDAGRYLCLARGSMI

SEQ ID NO: 5356 - protein, 114 aa, Homo sapiens
MRLLLALLGVLLSVPGPPVLSLEASEEVELEPCLAPSLEQQEQELTVALGQPVRLCCGRAERGGHWYKEGSRLAPAGRVRGWRGRLEIASFLPEDAGRYLCLARGSMIVLQNLT

SEQ ID NO: 5357 - protein, 201 aa, Homo sapiens
MRLLLALLGVLLSVPGPPVLSLEASEEVELEPCLAPSLEQQEQELTVALGQPVRLCCGRAERGGHWYKEGSRLAPAGRVRGWRGRLEIASFLPEDAGRYLCLARGSMIVLQNLTLITGDSLTSSNDDEDPKSHRDPSNRHSYPQQAPYWTHPQRMEKKLHAVPAGNTVKFRCPAAGNPTPTIRWLKDGQAFHGENRIGGIR

SEQ ID NO: 5358 - protein, 802 aa, Homo sapiens
MRLLLALLGVLLSVPGPPVLSLEASEEVELEPCLAPSLEQQEQELTVALGQPVRLCCGRAERGGHWYKEGSRLAPAGRVRGWRGRLEIASFLPEDAGRYLCLARGSMIVLQNLTLITGDSLTSSNDDEDPKSHRDPSNRHSYPQQAPYWTHPQRMEKKLHAVPAGNTVKFRCPAAGNPTPTIRWLKDGQAFHGENRIGGIRLRHQHWSLVMESVVPSDRGTYTCLVENAVGSIRYNYLLDVLERSPHRPILQAGLPANTTAVVGSDVELLCKVYSDAQPHIQWLKHIVINGSSFGADGFPYVQVLKTADINSSEVEVLYLRNVSAEDAGEYTCLAGNSIGLSYQSAWLTVLPEEDPTWTAAAPEARYTDIILYASGSLALAVLLLLAGLYRGQALHGRHPRPPATVQKLSRFPLARQFSLESGSSGKSSSSLVRGVRLSSSGPALLAGLVSLDLPLDPLWEFPRDRLVLGKPLGEGCFGQVVRAEAFGMDPARPDQASTVAVKMLKDNASDKDLADLVSEMEVMKLIGRHKNIINLLGVCTQEGPLYVIVECAAKGNLREFLRARRPPGPDLSPDGPRSSEGPLSFPVLVSCAYQVARGMQYLESRKCIHRDLAARNVLVTEDNVMKIADFGLARGVHHIDYYKKTSNGRLPVKWMAPEALFDRVYTHQSDVWSFGILLWEIFTLGGSPYPGIPVEELFSLLREGHRMDRPPHCPPELYGLMRECWHAAPSQRPTFKQLVEALDKVLLAVSEEYLDLRLTFGPYSPSGGDASSTCSSSDSVFSHDPLPLGSSSFPFGSGVQT

SEQ ID NO: 5359 - protein, 762 aa, Homo sapiens
MRLLLALLGVLLSVPGPPVLSLEASEEVELEPCLAPSLEQQEQELTVALGQPVRLCCGRAERGGHWYKEGSRLAPAGRVRGWRGRLEIASFLPEDAGRYLCLARGSMIVLQNLTLITGDSLTSSNDDEDPKSHRDPSNRHSYPQQAPYWTHPQRMEKKLHAVPAGNTVKFRCPAAGNPTPTIRWLKDGQAFHGENRIGGIRLRHQHWSLVMESVVPSDRGTYTCLVENAVGSIRYNYLLDVLERSPHRPILQAGLPANTTAVVGSDVELLCKVYSDAQPHIQWLKHIVINGSSFGADGFPYVQVLKTADINSSEVEVLYLRNVSAEDAGEYTCLAGNSIGLSYQSAWLTVLPGTGRIPHLTCDSLTPAGRTKSPTLQFSLESGSSGKSSSSLVRGVRLSSSGPALLAGLVSLDLPLDPLWEFPRDRLVLGKPLGEGCFGQVVRAEAFGMDPARPDQASTVAVKMLKDNASDKDLADLVSEMEVMKLIGRHKNIINLLGVCTQEGPLYVIVECAAKGNLREFLRARRPPGPDLSPDGPRSSEGPLSFPVLVSCAYQVARGMQYLESRKCIHRDLAARNVLVTEDNVMKIADFGLARGVHHIDYYKKTSNGRLPVKWMAPEALFDRVYTHQSDVWSFGILLWEIFTLGGSPYPGIPVEELFSLLREGHRMDRPPHCPPELYGLMRECWHAAPSQRPTFKQLVEALDKVLLAVSEEYLDLRLTFGPYSPSGGDASSTCSSSDSVFSHDPLPLGSSSFPFGSGVQT

SEQ ID NO: 5360 - protein, 734 aa, Homo sapiens
MRLLLALLGVLLSVPGPPVLSLEASEEVELEPCLAPSLEQQEQELTVALGQPVRLCCGRAERGGHWYKEGSRLAPAGRVRGWRGRLEIASFLPEDAGRYLCLARGSMIVLQNLTLITGDSLTSSNDDEDPKSHRDPSNRHSYPQQAPYWTHPQRMEKKLHAVPAGNTVKFRCPAAGNPTPTIRWLKDGQAFHGENRIGGIRLRHQHWSLVMESVVPSDRGTYTCLVENAVGSIRYNYLLDVLERSPHRPILQAGLPANTTAVVGSDVELLCKVYSDAQPHIQWLKHIVINGSSFGADGFPYVQVLKTADINSSEVEVLYLRNVSAEDAGEYTCLAGNSIGLSYQSAWLTVLPEEDPTWTAAAPEASSPWSQALPASQAHPWYEACVSPPAAPPCSPASLVLGKPLGEGCFGQVVRAEAFGMDPARPDQASTVAVKMLKDNASDKDLADLVSEMEVMKLIGRHKNIINLLGVCTQEGPLYVIVECAAKGNLREFLRARRPPGPDLSPDGPRSSEGPLSFPVLVSCAYQVARGMQYLESRKCIHRDLAARNVLVTEDNVMKIADFGLARGVHHIDYYKKTSNGRLPVKWMAPEALFDRVYTHQSDVWSFGILLWEIFTLGGSPYPGIPVEELFSLLREGHRMDRPPHCPPELYGLMRECWHAAPSQRPTFKQLVEALDKVLLAVSEEYLDLRLTFGPYSPSGGDASSTCSSSDSVFSHDPLPLGSSSFPFGSGVQT

SEQ ID NO: 5361 - protein, 802 aa, Homo sapiens; identical to SEQ ID NO: 5358

SEQ ID NO: 5362 - protein, 280 aa, Homo sapiens
  SITE 1: note = misc_feature - Xaa can be any naturally occurring amino acid
XRYTDIILYASGSLALAVLLLLAGLYRGQALHGRHPRPPATVQKLSRFPLARQSGSSGKSSSSLVRGVRLSSSGPALLAGLVSLDLPLDPLWEFPRDRLVLGKPLGEGCFGQVVRAEAFGMDPARPDQASTVAVKMLKDNASDKDLADLVSEMEVMKLIGRHKNIINLLGVCTQEGPLYVIVECAAKGNLREFLRARRPPGPDLSPDGPRSSEGPLSFPVLVSCAYQVARGMQYLESRKCIHRDLAARNVLVTEDNVMKIADFGLARGVHHIDYYKKTSN

SEQ ID NO: 5363 - protein, 80 aa, Homo sapiens
MTPSPLLLLLLPPLLLGAFPPAAAARGPPKMADKVVPRQVARLGRTVRLQCPVEGDPPPLTMWTKDGRTIHSGWSRFRVL

SEQ ID NO: 5364 - protein, 152 aa, Homo sapiens
MTPSPLLLLLLPPLLLGAFPPAAAARGPPKMADKVVPRQVARLGRTVRLQCPVEGDPPPLTMWTKDGRTIHSGWSRFRVLPQGLKVKQVEREDAGVYVCKATNGFGSLSVNYTLVVLDDISPGKESLGPDSSSGGQEDPASQQWARPRFTQP

SEQ ID NO: 5365 - protein, 504 aa, Homo sapiens
MTPSPLLLLLLPPLLLGAFPPAAAARGPPKMADKVVPRQVARLGRTVRLQCPVEGDPPPLTMWTKDGRTIHSGWSRFRVLPQGLKVKQVEREDAGVYVCKATNGFGSLSVNYTLVVLDDISPGKESLGPDSSSGGQEDPASQQWARPRFTQPSKMRRRVIARPVGSSVRLKCVASGHPRPDITWMKDDQALTRPEAAEPRKKKWTLSLKNLRPEDSGKYTCRVSNRAGAINATYKVDVIQRTRSKPVLTGTHPVNTTVDFGGTTSFQCKVRSDVKPVIQWLKRVEYGAEGRHNSTIDVGGQKFVVLPTGDVWSRPDGSYLNKLLITRARQDDAGMYICLGANTMGYSFRSAFLTVLPDPKPPGPPVASSSSATSLPWPVVIGIPAGAVFILGTLLLWLCQAQKKPCTPAPAPPLPGHRPPGTARDRSGDKDLPSLAALSAGPGVGLCEEHGSPAAPQHLLGPGPVAGPKLYPKLYTDIHTHTHTHSHTHSHVEGKVHQHIHYQC

SEQ ID NO: 5366 - protein, 504 aa, Homo sapiens; identical to SEQ ID NO: 5365

SEQ ID NO: 5367 - protein, 504 aa, Homo sapiens; identical to SEQ ID NO: 5365

SEQ ID NO: 5368 - protein, 504 aa, Homo sapiens; identical to SEQ ID NO: 5365

SEQ ID NO: 5369 - protein, 119 aa, Homo sapiens
MIDAATLKSRKMLEEIMKYEASILTHDSSIRYLQEIYNSNNQKIVNLKEKVAQLEAQCQEPCKDTVQIHDITGKDCQDIANKGAKQSGLYFIKPLKANQQFLVYCEIDGSGNGWTVFQK

SEQ ID NO: 5370 - protein, 123 aa, Homo sapiens
MIDAATLKSRKMLEEIMKYEASILTHDSSIRYLQEIYNSNNQKIVNLKEKVAQLEAQCQEPCKDTVQIHDITGKDCQDIANKGAKQSGLYFIKPLKANQQFLVYCEIDGSGNGWTVFQKRLDG

SEQ ID NO: 5371 - protein, 453 aa, Homo sapiens
MSWSLHPRNLILYFYALLFLSSTCVAYVATRDNCCILDERFGSYCPTTCGIADFLSTYQTKVDKDLQSLEDILHQVENKTSEVKQLIKAIQLTYNPDESSKPNMIDAATLKSRKMLEEIMKYEASILTHDSSIRYLQEIYNSNNQKIVNLKEKVAQLEAQCQEPCKDTVQIHDITGKDCQDIANKGAKQSGLYFIKPLKANQQFLVYCEIDGSGNGWTVFQKRLDGSVDFKKNWIQYKEGFGHLSPTGTTEFWLGNEKIHLISTQSAIPYALRVELEDWNGRTSTADYAMFKVGPEADKYRLTYAYFAGGDAGDAFDGFDFGDDPSDKFFTSHNGMQFSTWDNDNDKFEGNCAEQDGSGWWMNKCHAGHLNGVYYQGGTYSKASTPNGYDNGIIWATWKTRWYSMKKTTMKIIPFNRLTIGEGQQHHLGGAKQVRPEHPAETEYDSLYPEDDL

SEQ ID NO: 5372 - protein, 437 aa, Homo sapiens
MSWSLHPRNLILYFYALLFLSSTCVAYVATRDNCCILDERFGSYCPTTCGIADFLSTYQTKVDKDLQSLEDILHQVENKTSEVKQLIKAIQLTYNPDESSKPNMIDAATLKSRKMLEEIMKYEASILTHDSSIRYLQEIYNSNNQKIVNLKEKVAQLEAQCQEPCKDTVQIHDITGKDCQDIANKGAKQSGLYFIKPLKANQQFLVYCEIDGSGNGWTVFQKRLDGSVDFKKNWIQYKEGFGHLSPTGTTEFWLGNEKIHLISTQSAIPYALRVELEDWNGRTSTADYAMFKVGPEADKYRLTYAYFAGGDAGDAFDGFDFGDDPSDKFFTSHNGMQFSTWDNDNDKFEGNCAEQDGSGWWMNKCHAGHLNGVYYQGGTYSKASTPNGYDNGIIWATWKTRWYSMKKTTMKIIPFNRLTIGEGQQHHLGGAKQAGDV

SEQ ID NO: 5373 - protein, 461 aa, Homo sapiens
MSWSLHPRNLILYFYALLFLSSTCVAYVATRDNCCILDERFGSYCPTTCGIADFLSTYQTKVDKDLQSLEDILHQVENKTSEVKQLIKAIQLTYNPDESSKPNMIDAATLKSRKMLEEIMKYEASILTHDSSIRYLQEIYNSNNQKIVNLKEKVAQLEAQCQEPCKDTVQIHDITGKVKVDSPSLDCQDIANKGAKQSGLYFIKPLKANQQFLVYCEIDGSGNGWTVFQKRLDGSVDFKKNWIQYKEGFGHLSPTGTTEFWLGNEKIHLISTQSAIPYALRVELEDWNGRTSTADYAMFKVGPEADKYRLTYAYFAGGDAGDAFDGFDFGDDPSDKFFTSHNGMQFSTWDNDNDKFEGNCAEQDGSGWWMNKCHAGHLNGVYYQGGTYSKASTPNGYDNGIIWATWKTRWYSMKKTTMKIIPFNRLTIGEGQQHHLGGAKQVRPEHPAETEYDSLYPEDDL

SEQ ID NO: 5374 - protein, 445 aa, Homo sapiens
MSWSLHPRNLILYFYALLFLSSTCVAYVATRDNCCILDERFGSYCPTTCGIADFLSTYQTKVDKDLQSLEDILHQVENKTSEVKQLIKAIQLTYNPDESSKPNMIDAATLKSRKMLEEIMKYEASILTHDSSIRYLQEIYNSNNQKIVNLKEKVAQLEAQCQEPCKDTVQIHDITGKVKVDSPSLDCQDIANKGAKQSGLYFIKPLKANQQFLVYCEIDGSGNGWTVFQKRLDGSVDFKKNWIQYKEGFGHLSPTGTTEFWLGNEKIHLISTQSAIPYALRVELEDWNGRTSTADYAMFKVGPEADKYRLTYAYFAGGDAGDAFDGFDFGDDPSDKFFTSHNGMQFSTWDNDNDKFEGNCAEQDGSGWWMNKCHAGHLNGVYYQGGTYSKASTPNGYDNGIIWATWKTRWYSMKKTTMKIIPFNRLTIGEGQQHHLGGAKQAGDV

SEQ ID NO: 5375 - protein, 312 aa, Homo sapiens
MAKVFSFILVTTALTMGREISALEDCAQEQMRLRAQVRLLETRVKQQQVKIKQLLQENEVQFLDKGDENTVIDLGSKRQYADCSEIFNDGYKLSGFYKIKPLQSPAEFSVYCDMSDGGGWTVIQRRSDGSENFNRGWKDYENGFGNFVQKHGEYWLGNKNLHFLTTQEDYTLKIDLADFEKNSRYAQYKNFKVGDEKNFYELNIGEYSGTAGDSLAGNFHPEVQWWASHQRMKFSTWDRDHDNYEGNCAEEDQSGWWFNRCHSANLNGVYYSGPYTAKTDNGIVWYTWHGWWYSLKSVVMKIRPNDFIPNVI

SEQ ID NO: 5376 - protein, 312 aa, Homo sapiens; identical to SEQ ID NO: 5375

SEQ ID NO: 5377 - protein, 312 aa, Homo sapiens; identical to SEQ ID NO: 5375

SEQ ID NO: 5378 - protein, 312 aa, Homo sapiens; identical to SEQ ID NO: 5375

SEQ ID NO: 5379 - protein, 312 aa, Homo sapiens; identical to SEQ ID NO: 5375

SEQ ID NO: 5380 - protein, 312 aa, Homo sapiens; identical to SEQ ID NO: 5375

SEQ ID NO: 5381 - protein, 312 aa, Homo sapiens; identical to SEQ ID NO: 5375

SEQ ID NO: 5382 - protein, 225 aa, Homo sapiens
MKLANWYWLSSAVLATYGFLVVANNETEEIKDERAKDVCPVRLESRGKCEEAGECPYQVSLPPLTIQLPKQFSRIEEVFKEVQNLKEIVNSLKKSCQDCKLQADDNGDPGRNGLLLPSTGAPGEVGDNRVRELESEVNKLSSELKNAKEEINVLHGRLEKLNLVNMNNIENYVDSKVANLTFVVNSLDGKCSKCPSQEQIQSRPGMYNNVFLSYVHKCYTAREYL

SEQ ID NO: 5383 - protein, 439 aa, Homo sapiens
MKLANWYWLSSAVLATYGFLVVANNETEEIKDERAKDVCPVRLESRGKCEEAGECPYQVSLPPLTIQLPKQFSRIEEVFKEVQNLKEIVNSLKKSCQDCKLQADDNGDPGRNGLLLPSTGAPGEVGDNRVRELESEVNKLSSELKNAKEEINVLHGRLEKLNLVNMNNIENYVDSKVANLTFVVNSLDGKCSKCPSQEQIQSRPVQHLIYKDCSDYYAIGKRSSETYRVTPDPKNSSFEVYCDMETMGGGWTVLQARLDGSTNFTRTWQDYKAGFGNLRREFWLGNDKIHLLTKSKEMILRIDLEDFNGVELYALYDQFYVANEFLKYRLHVGNYNGTAGDALRFNKHYNHDLKFFTTPDKDNDRYPSGNCGLYYSSGWWFDACLSANLNGKYYHQKYRGVRNGIFWGTWPGVSEAHPGGYKSSFKEAKMMIRPKHFKP

SEQ ID NO: 5384 - protein, 18 aa, Homo sapiens
MAEKFDCHYCRDPLQGKK

SEQ ID NO: 5385 - protein, 66 aa, Homo sapiens
MAEKFDCHYCRDPLQGKKYVQKDGHHCCLKCFDKFCANTCVECRKPIGADSKEVHYKNRFWHDTCF

SEQ ID NO: 5386 - protein, 78 aa, Homo sapiens
MAEKFDCHYCRDPLQGKKYVQKDGHHCCLKCFDKFCANTCVECRKPIGADSKEVHYKNRFWHDTCFRCAKCLHPLANE

SEQ ID NO: 5387 - protein, 130 aa, Homo sapiens
MAEKFDCHYCRDPLQGKKYVQKDGHHCCLKCFDKFCANTCVECRKPIGADSKEVHYKNRFWHDTCFRCAKCLHPLANETFVAKDNKILCNKCTTREDSPKCKGCFKAIVAGDQNVEYKGTVWHKDCFTCS

SEQ ID NO: 5388 - protein, 138 aa, Homo sapiens
MAEKFDCHYCRDPLQGKKYVQKDGHHCCLKCFDKFCANTCVECRKPIGADSKEVHYKNRFWHDTCFRCAKCLHPLANETFVAKDNKILCNKCTTREDSPKCKGCFKAIVAGDQNVEYKGTVWHKDCFTCSNCKQVIGT

SEQ ID NO: 5389 - protein, 141 aa, Homo sapiens
MAEKFDCHYCRDPLQGKKYVQKDGHHCCLKCFDKFCANTCVECRKPIGADSKEVHYKNRFWHDTCFRCAKCLHPLANETFVAKDNKILCNKCTTREDSPKCKGCFKAIVAGDQNVEYKGTVWHKDCFTCSNCKQVIGTGSF

SEQ ID NO: 5390 - protein, 147 aa, Homo sapiens
MAEKFDCHYCRDPLQGKKYVQKDGHHCCLKCFDKFCANTCVECRKPIGADSKEVHYKNRFWHDTCFRCAKCLHPLANETFVAKDNKILCNKCTTREDSPKCKGCFKAIVAGDQNVEYKGTVWHKDCFTCSNCKQVIGTGSFFPKGED

SEQ ID NO: 5391 - protein, 152 aa, Homo sapiens
MAEKFDCHYCRDPLQGKKYVQKDGHHCCLKCFDKFCANTCVECRKPIGADSKEVHYKNRFWHDTCFRCAKCLHPLANETFVAKDNKILCNKCTTREDSPKCKGCFKAIVAGDQNVEYKGTVWHKDCFTCSNCKQVIGTGSFFPKGEDFYCVT

SEQ ID NO: 5392 - protein, 155 aa, Homo sapiens
MAEKFDCHYCRDPLQGKKYVQKDGHHCCLKCFDKFCANTCVECRKPIGADSKEVHYKNRFWHDTCFRCAKCLHPLANETFVAKDNKILCNKCTTREDSPKCKGCFKAIVAGDQNVEYKGTVWHKDCFTCSNCKQVIGTGSFFPKGEDFYCVTCHE

SEQ ID NO: 5393 - protein, 175 aa, Homo sapiens
MAEKFDCHYCRDPLQGKKYVQKDGHHCCLKCFDKFCANTCVECRKPIGADSKEVHYKNRFWHDTCFRCAKCLHPLANETFVAKDNKILCNKCTTREDSPKCKGCFKAIVAGDQNVEYKGTVWHKDCFTCSNCKQVIGTGSFFPKGEDFYCVTCHETKFAKHCVKCNKAITSGGIT

SEQ ID NO: 5394 - protein, 204 aa, Homo sapiens
MAEKFDCHYCRDPLQGKKYVQKDGHHCCLKCFDKFCANTCVECRKPIGADSKEVHYKNRFWHDTCFRCAKCLHPLANETFVAKDNKILCNKCTTREDSPKCKGCFKAIVAGDQNVEYKGTVWHKDCFTCSNCKQVIGTGSFFPKGEDFYCVTCHETKFAKHCVKCNKAITSGGITYQDQPWHADCFVCVTCSKKLAGQRFTAVE

SEQ ID NO: 5395 - protein, 205 aa, Homo sapiens
MAEKFDCHYCRDPLQGKKYVQKDGHHCCLKCFDKFCANTCVECRKPIGADSKEVHYKNRFWHDTCFRCAKCLHPLANETFVAKDNKILCNKCTTREDSPKCKGCFKAIVAGDQNVEYKGTVWHKDCFTCSNCKQVIGTGSFFPKGEDFYCVTCHETKFAKHCVKCNKAITSGGITYQDQPWHADCFVCVTCSKKLAGQRFTAVED

SEQ ID NO: 5396 - protein, 207 aa, Homo sapiens
MAEKFDCHYCRDPLQGKKYVQKDGHHCCLKCFDKFCANTCVECRKPIGADSKEVHYKNRFWHDTCFRCAKCLHPLANETFVAKDNKILCNKCTTREDSPKCKGCFKAIVAGDQNVEYKGTVWHKDCFTCSNCKQVIGTGSFFPKGEDFYCVTCHETKFAKHCVKCNKAITSGGITYQDQPWHADCFVCVTCSKKLAGQRFTAVEDQY

SEQ ID NO: 5397 - protein, 207 aa, Homo sapiens; identical to SEQ ID NO: 5396

SEQ ID NO: 5398 - protein, 280 aa, Homo sapiens
MAEKFDCHYCRDPLQGKKYVQKDGHHCCLKCFDKFCANTCVECRKPIGADSKEVHYKNRFWHDTCFRCAKCLHPLANETFVAKDNKILCNKCTTREDSPKCKGCFKAIVAGDQNVEYKGTVWHKDCFTCSNCKQVIGTGSFFPKGEDFYCVTCHETKFAKHCVKCNKAITSGGITYQDQPWHADCFVCVTCSKKLAGQRFTAVEDQYYCVDCYKNFVAKKCAGCKNPITGFGKGSSVVAYEGQSWHDYCFHCKKCSVNLANKRFVFHQEQVYCPDCAKKL

SEQ ID NO: 5399 - protein, 280 aa, Homo sapiens; identical to SEQ ID NO: 5398

SEQ ID NO: 5400 - protein, 257 aa, Homo sapiens
MAEKFDCHYCRDPLQGKKYVQKDGHHCCLKCFDKFCANTCVECRKPIGADSKEVHYKNRFWHDTCFRCAKCLHPLANETFVAKDNKILCNKCTTREDSPKCKGCFKAIVAGDQNVEYKGTVWHKDCFTCSNCKQVIGTGSFFPKGEDFYCVTCHETKFAKHCVKCNKAITSGGITYQDQPWHADCFVCVTCSKKLAGQRFTAVEDQYYCVDCYKNFVAKKCAGCKNPITGFGKGSSVVAYEGQSWHDYCFHCKKCSV

SEQ ID NO: 5401 - protein, 280 aa, Homo sapiens; identical to SEQ ID NO: 5398

SEQ ID NO: 5402 - protein, 280 aa, Homo sapiens; identical to SEQ ID NO: 5398

SEQ ID NO: 5403 - protein, 280 aa, Homo sapiens; identical to SEQ ID NO: 5398

SEQ ID NO: 5404 - protein, 280 aa, Homo sapiens; identical to SEQ ID NO: 5398

SEQ ID NO: 5405 - protein, 280 aa, Homo sapiens; identical to SEQ ID NO: 5398

SEQ ID NO: 5406 - protein, 323 aa, Homo sapiens
MAEKFDCHYCRDPLQGKKYVQKDGHHCCLKCFDKFCANTCVECRKPIGADSKEVHYKNRFWHDTCFRCAKCLHPLANETFVAKDNKILCNKCTTREDSPKCKGCFKAIVAGDQNVEYKGTVWHKDCFTCSNCKQVIGTGSFFPKGEDFYCVTCHETKFAKHCVKCNKAITSGGITYQDQPWHADCFVCVTCSKKLAGQRFTAVEDQYYCVDCYKNFVAKKCAGCKNPITGKRTVSRVSHPVSKARKPPVCHGKRLPLTLFPSANLRGRHPGGERTCPSWVVVLYRKNRSLAAPRGPGLVKAPVWWPMKDNPGTTTASTAKNAP

SEQ ID NO: 5407 - protein, 323 aa, Homo sapiens; identical to SEQ ID NO: 5406

SEQ ID NO: 5408 - protein, 194 aa, Homo sapiens
MAEKFDCHYCRDPLQGKKYVQKDGHHCCLKCFDKFCANTCVECRKPIGADSKEVHYKNRFWHDTCFRCAKCLHPLANETFVAKDNKILCNKCTTREDSPKCKGCFKAIVAGDQNVEYKGTVWHKDCFTCSNCKQVIGTGSFFPKGEDFYCVTCHETKFAKHCVKCNKGLVKAPVWWPMKDNPGTTTASTAKNAP

SEQ ID NO: 5409 - protein, 296 aa, Homo sapiens
MASHRHSGPSSYKVGTMAEKFDCHYCRDPLQGKKYVQKDGHHCCLKCFDKFCANTCVECRKPIGADSKEVHYKNRFWHDTCFRCAKCLHPLANETFVAKDNKILCNKCTTREDSPKCKGCFKAIVAGDQNVEYKGTVWHKDCFTCSNCKQVIGTGSFFPKGEDFYCVTCHETKFAKHCVKCNKAITSGGITYQDQPWHADCFVCVTCSKKLAGQRFTAVEDQYYCVDCYKNFVAKKCAGCKNPITGFGKGSSVVAYEGQSWHDYCFHCKKCSVNLANKRFVFHQEQVYCPDCAKKL

SEQ ID NO: 5410 - protein, 210 aa, Homo sapiens
MASHRHSGPSSYKVGTMAEKFDCHYCRDPLQGKKYVQKDGHHCCLKCFDKFCANTCVECRKPIGADSKEVHYKNRFWHDTCFRCAKCLHPLANETFVAKDNKILCNKCTTREDSPKCKGCFKAIVAGDQNVEYKGTVWHKDCFTCSNCKQVIGTGSFFPKGEDFYCVTCHETKFAKHCVKCNKGLVKAPVWWPMKDNPGTTTASTAKNAP

SEQ ID NO: 5411 - protein, 309 aa, Homo sapiens
MTFYVASLALELIWMLSSPAGPSSYKVGTMAEKFDCHYCRDPLQGKKYVQKDGHHCCLKCFDKFCANTCVECRKPIGADSKEVHYKNRFWHDTCFRCAKCLHPLANETFVAKDNKILCNKCTTREDSPKCKGCFKAIVAGDQNVEYKGTVWHKDCFTCSNCKQVIGTGSFFPKGEDFYCVTCHETKFAKHCVKCNKAITSGGITYQDQPWHADCFVCVTCSKKLAGQRFTAVEDQYYCVDCYKNFVAKKCAGCKNPITGFGKGSSVVAYEGQSWHDYCFHCKKCSVNLANKRFVFHQEQVYCPDCAKKL

SEQ ID NO: 5412 - protein, 635 aa, Homo sapiens
MAMRPRSHPPVGAGTGGGPACVPVAEASTGAWTAEGAAGTRCRASRAPCRPPPVPAPSQLPASSPTKCEICVKNTAILAITLITPQDPHLDPVPRGQPTFTKKKKTIRLFWNEVRPFDWPCKNNRRCREFLWSKLEPIKVDTSRLEHLFESKSKELSVSKKTAADGKRQEIIVLDSKRSNAINIGLTVLPPPRTIKIAILNFDEYALNKEGIEKILTMIPTDEEKQKIQEAQLANPEIPLGSAEQFLLTLSSISELSARLHLWAFKMDYETTEKEVAEPLLDLKEGIDQLENNKTLGFILSTLLAIGNFLNGTNAKAFELSYLEKVPEVKDTVHKQSLLHHVCTMVVENFPDSSDLYSEIGAITRSAKVDFDQLQDNLCQMERRCKASWDHLKAIAKHEMKPVLKQRMSEFLKDCAERIIILKIVHRRIINRFHSFLLFMGHPPYAIREVNINKFCRIISEFALEYRTTRERVLQQKQKRANHRERNKTRGKMITDSGKFSGSSPAPPSQPQGLSYAEDAAEHENMKAVLKTSSPSVEDATPALGVRTRSRASRGSTSSWTMGTDDSPNVTDDAADEIMDRIVKSATQVPSQRVVPRERKRSRANRKSLRRTLKSGLTPEEARALGLVGTSELQL

SEQ ID NO: 5413 - protein, 1439 aa, Homo sapiens
MATLACRVQFLDDTDPFNSTNFPEPSRPPLFTFREDLALGTQLAGVHRLLQAPHKLDDCTLQLSHNGAYLDLEATLAEQRDELEGFQDDAGRGKKHSIILRTQLSVRVHACIEKLYNSSGRDLRRALFSLKQIFQDDKDLVHEFVVAEGLTCLIKVGAEADQNYQNYILRALGQIMLYVDGMNGVINRNETIQWLYTLIGSKFRLVVKTALKLLLVFVEYSESNAPLLIQAVTAVDTKRGVKPWSNIMEILEEKDGVDTELLVYAMTLVNKTLSGLPDQDTFYDVVDCLEELGIAAVSQRHLNKKGTDLDLVEQLNIYEVALRHEDGDETTEPPPSGCRDRRRASVCSSGGGEHRGLDRRRSRRHSVQSIKSTLSAPTSPCSQSAPSFKPNQVRDLREKYSNFGNNSYHSSRPSSGSSVPTTPTSSVSPPQEARLERSSPSGLLTSSFRQHQESLAAERERRRQEREERLQRIEREERNKFSRDYLDKREEQRQAREERYKYLEQLAAEEHEKELRSRSVSRGRADLSLDLTSPAAPACLAPLSHSPSSSDSQEALTVSASSPGTPHHPQASAGDPEPESEAEPEAEAGAGQVADEAGQDIASAHEGAETEVEQALEQEPEERASLSEKERQNEGVNERDNCSASSVSSSSSTLEREEKEDKLSRDRTTGLWPAGVQDAGVNGQCGDILTNKRFMLDMLYAHNRKSPDDEEKGDGEAGRTQQEAEAVASLATRISTLQANSQTQDESVRRVDVGCLDNRGSVKAFAEKFNSGDLGRGSISPDAEPNDKVPETAPVQPKTESDYIWDQLMANPRELRIQDMDFTDLGEEDDIDVLDVDLGHREAPGPPPPPPPTFLGLPPPPPPPLLDSIPPPPVPGNLLVPPPPVFNAPQGLGWSQVPRGQPTFTKKKKTIRLFWNEVRPFDWPCKNNRRCREFLWSKLEPIKVDTSRLEHLFESKSKELSVSKKTAADGKRQEIIVLDSKRSNAINIGLTVLPPPRTIKIAILNFDEYALNKEGIEKILTMIPTDEEKQKIQEAQLANPEIPLGSAEQFLLTLSSISELSARLHLWAFKMDYETTEKEVAEPLLDLKEGIDQLENNKTLGFILSTLLAIGNFLNGTNAKAFELSYLEKVPEVKDTVHKQSLLHHVCTMVVENFPDSSDLYSEIGAITRSAKVDFDQLQDNLCQMERRCKASWDHLKAIAKHEMKPVLKQRMSEFLKDCAERIIILKIVHRRIINRFHSFLLFMGHPPYAIREVNINKFCRIISEFALEYRTTRERVLQQKQKRANHRERNKTRGKMITDSGKFSGSSPAPPSQPQGLSYAEDAAEHENMKAVLKTSSPSVEDATPALGVRTRSRASRGSTSSWTMGTDDSPNVTDDAADEIMDRIVKSATQVPSQRVVPRERKRSRANRKSLRRTLKSGLTPEEARALGLVGTSELQL

SEQ ID NO: 5414 - protein, 1422 aa, Homo sapiens
MATLACRVQFLDDTDPFNSTNFPEPSRPPLFTFREDLALGTQLAGVHRLLQAPHKLDDCTLQLSHNGAYLDLEATLAEQRDELEGFQDDAGRGKKHSIILRTQLSVRVHACIEKLYNSSGRDLRRALFSLKQIFQDDKDLVHEFVVAEGLTCLIKVGAEADQNYQNYILRALGQIMLYVDGMNGVINRNETIQWLYTLIGSKFRLVVKTALKLLLVFVEYSESNAPLLIQAVTAVDTKRGVKPWSNIMEILEEKDGVDTELLVYAMTLVNKTLSGLPDQDTFYDVVDCLEELGIAAVSQRHLNKKGTDLDLVEQLNIYEVALRHEDGDETTEPPPSGCRDRRRASVCSSGGGEHRGLDRRRSRRHSVQSIKSTLSAPTSPCSQSAPSFKPNQVRDLREKYSNFGNNSYHSSRPSSGSSVPTTPTSSVSPPQEARLERSSPSGLLTSSFRQHQESLAAERERRRQEREERLQRIEREERNKFRYKYLEQLAAEEHEKELRSRSVSRGRADLSLDLTSPAAPACLAPLSHSPSSSDSQEALTVSASSPGTPHHPQASAGDPEPESEAEPEAEAGAGQVADEAGQDIASAHEGAETEVEQALEQEPEERASLSEKERQNEGVNERDNCSASSVSSSSSTLEREEKEDKLSRDRTTGLWPAGVQDAGVNGQCGDILTNKRFMLDMLYAHNRKSPDDEEKGDGEAGRTQQEAEAVASLATRISTLQANSQTQDESVRRVDVGCLDNRGSVKAFAEKFNSGDLGRGSISPDAEPNDKVPETAPVQPKTESDYIWDQLMANPRELRIQDMDFTDLGEEDDIDVLDVDLGHREAPGPPPPPPPTFLGLPPPPPPPLLDSIPPPPVPGNLLVPPPPVFNAPQGLGWSQVPRGQPTFTKKKKTIRLFWNEVRPFDWPCKNNRRCREFLWSKLEPIKVDTSRLEHLFESKSKELSVSKKTAADGKRQEIIVLDSKRSNAINIGLTVLPPPRTIKIAILNFDEYALNKEGIEKILTMIPTDEEKQKIQEAQLANPEIPLGSAEQFLLTLSSISELSARLHLWAFKMDYETTEKEVAEPLLDLKEGIDQLENNKTLGFILSTLLAIGNFLNGTNAKAFELSYLEKVPEVKDTVHKQSLLHHVCTMVVENFPDSSDLYSEIGAITRSAKVDFDQLQDNLCQMERRCKASWDHLKAIAKHEMKPVLKQRMSEFLKDCAERIIILKIVHRRIINRFHSFLLFMGHPPYAIREVNINKFCRIISEFALEYRTTRERVLQQKQKRANHRERNKTRGKMITDSGKFSGSSPAPPSQPQGLSYAEDAAEHENMKAVLKTSSPSVEDATPALGVRTRSRASRGSTSSWTMGTDDSPNVTDDAADEIMDRIVKSATQVPSQRVVPRERKRSRANRKSLRRTLKSGLTPEEARALGLVGTSELQL

SEQ ID NO: 5415 - protein, 1622 aa, Homo sapiens
MATLACRVQFLDDTDPFNSTNFPEPSRPPLFTFREDLALGTQLAGVHRLLQAPHKLDDCTLQLSHNGAYLDLEATLAEQRDELEGFQDDAGRGKKHSIILRTQLSVRVHACIEKLYNSSGRDLRRALFSLKQIFQDDKDLVHEFVVAEGLTCLIKVGAEADQNYQNYILRALGQIMLYVDGMNGVINRNETIQWLYTLIGSKFRLVVKTALKLLLVFVEYSESNAPLLIQAVTAVDTKRGVKPWSNIMEILEEKDGVDTELLVYAMTLVNKTLSGLPDQDTFYDVVDCLEELGIAAVSQRHLNKKGTDLDLVEQLNIYEVALRHEDGDETTEPPPSGCRDRRRASVCSSGGGEHRGLDRRRSRRHSVQSIKSTLSAPTSPCSQSAPSFKPNQVRDLREKEEEEEEEQPITEPSSEEEREDDASCQGKDSKVGAASGQSPTGRDAAPKSSALPAVSNASSQGKPLLVGTAGGTTWHSGSSGSEATPSALLSPPASAARPSSATPGSLKVSPTIDKLPYVPHSPFHLFSYDFEDSSLSTKEKEAESQKENSSSDSFSLSTYSASEPYHFRSFSSNRYSNFGNNSYHSSRPSSGSSVPTTPTSSVSPPQEARLERSSPSGLLTSSFRQHQESLAAERERRRQEREERLQRIEREERNKFSRDYLDKREEQRQAREERYKYLEQLAAEEHEKELRSRSVSRGRADLSLDLTSPAAPACLAPLSHSPSSSDSQEALTVSASSPGTPHHPQASAGDPEPESEAEPEAEAGAGQVADEAGQDIASAHEGAETEVEQALEQEPEERASLSEKERQNEGVNERDNCSASSVSSSSSTLEREEKEDKLSRDRTTGLWPAGVQDAGVNGQCGDILTNKRFMLDMLYAHNRKSPDDEEKGDGEAGRTQQEAEAVASLATRISTLQANSQTQDESVRRVDVGCLDNRGSVKAFAEKFNSGDLGRGSISPDAEPNDKVPETAPVQPKTESDYIWDQLMANPRELRIQDMDFTDLGEEDDIDVLDVDLGHREAPGPPPPPPPTFLGLPPPPPPPLLDSIPPPPVPGNLLVPPPPVFNAPQGLGWSQVPRGQPTFTKKKKTIRLFWNEVRPFDWPCKNNRRCREFLWSKLEPIKVDTSRLEHLFESKSKELSVSKKTAADGKRQEIIVLDSKRSNAINIGLTVLPPPRTIKIAILNFDEYALNKEGIEKILTMIPTDEEKQKIQEAQLANPEIPLGSAEQFLLTLSSISELSARLHLWAFKMDYETTEKEVAEPLLDLKEGIDQLENNKTLGFILSTLLAIGNFLNGTNAKAFELSYLEKVPEVKDTVHKQSLLHHVCTMVVENFPDSSDLYSEIGAITRSAKVDFDQLQDNLCQMERRCKASWDHLKAIAKHEMKPVLKQRMSEFLKDCAERIIILKIVHRRIINRFHSFLLFMGHPPYAIREVNINKFCRIISEFALEYRTTRERVLQQKQKRANHRERNKTRGKMITDTDEEEEVESGKFSGSSPAPPSQPQGLSYAEDAAEHENMKAVLKTSSPSVEDATPALGVRTRSRASRGSTSSWTMGTDDSPNVTDDAADEIMDRIVKSATQVPSQRVVPRERKRSRANRKSLRRTLKSGLTPEEARALGLVGTSELQL

SEQ ID NO: 5416 - protein, 528 aa, Homo sapiens
RLFWNEVRPFDWPCKNNRRCREFLWSKLEPIKVDTSRLEHLFESKSKELSVSKKTAADGKRQEIIVLDSKRSNAINIGLTVLPPPRTIKIAILNFDEYALNKEGIEKILTMIPTDEEKQKIQEAQLANPEIPLGSAEQFLLTLSSISELSARLHLWAFKMDYETTEKEVAEPLLDLKEGIDQLENNKTLGFILSTLLAIGNFLNGTNAKAFELSYLEKVPEVKDTVHKQSLLHHVCTMVVENFPDSSDLYSEIGAITRSAKVDFDQLQDNLCQMERRCKASWDHLKAIAKHEMKPVLKQRMSEFLKDCAERIIILKIVHRRIINRFHSFLLFMGHPPYAIREVNINKFCRIISEFALEYRTTRERVLQQKQKRANHRERNKTRGKMITDSGKFSGSSPAPPSQPQGLSYAEDAAEHENMKAVLKTSSPSVEDATPALGVRTRSRASRGSTSSWTMGTDDSPNVTDDAADEIMDRIVKSATQVPSQRVVPRERKRSRANRKSLRRTLKSGLTPEEARALGLVGTSELQL

SEQ ID NO: 5417 - protein, 375 aa, Homo sapiens
  SITE 1: note = misc_feature - Xaa can be any naturally occurring amino acid
XAINIGLTVLPPPRTIKIAILNFDEYALNKEGIEKILTMIPTDEEKQKIQEAQLANPEIPLGSAEQFLLTLSSISELSARLHLWAFKMDYETTEKEVAEPLLDLKEGIDQLENNKTLGFILSTLLAIGNFLNGTNAKAFELSYLEKVPEVKDTVHKQSLLHHVCTMVVENFPDSSDLYSEIGAITRSAKVDFDQLQDNLCQMERRCKASWDHLKAIAKHEMKPVLKQRMSEFLKDCAERIIILKIVHRRIINRFHSFLLFMGHPPYAIREVNINKFCRIISEFALEYRTTRERVLQQKQKRANHRERNKTRGKMITDDPLVPGLWELMTRPMSQMMQLMRSWTASSSQPPKCPVSEWCRGRGNDPGPTGNLCEEP

SEQ ID NO: 5418 - protein, 1200 aa, Homo sapiens
  SITE 1: note = misc_feature - Xaa can be any naturally occurring amino acid
XFRLVVKTALKLLLVFVEYSESNAPLLIQAVTAVDTKRGVKPWSNIMEILEEKDGVDTELLVYAMTLVNKTLSGLPDQDTFYDVVDCLEELGIAAVSQRHLNKKGTDLDLVEQLNIYEVALRHEDGDETTEPPPSGCRDRRRASVCSSGGGEHRGLDRRRSRRHSVQSIKSTLSAPTSPCSQSAPSFKPNQVRDLREKSSPSGLLTSSFRQHQESLAAERERRRQEREERLQRIEREERNKFSRDYLDKREEQRQAREERYKYLEQLAAEEHEKELRSRSVSRGRADLSLDLTSPAAPACLAPLSHSPSSSDSQEALTVSASSPGTPHHPQASAGDPEPESEAEPEAEAGAGQVADEAGQDIASAHEGAETEVEQALEQEPEERASLSEKERQNEGVNERDNCSASSVSSSSSTLEREEKEDKLSRDRTTGLWPAGVQDAGVNGQCGDILTNKRFMLDMLYAHNRKSPDDEEKGDGEAGRTQQEAEAVASLATRISTLQANSQTQDESVRRVDVGCLDNRGSVKAFAEKFNSGDLGRGSISPDAEPNDKVPETAPVQPKTESDYIWDQLMANPRELRIQDMDFTDLGEEDDIDVLDVDLGHREAPGPPPPPPPTFLGLPPPPPPPLLDSIPPPPVPGNLLVPPPPVFNAPQGLGWSQVPRGQPTFTKKKKTIRLFWNEVRPFDWPCKNNRRCREFLWSKLEPIKVDTSRLEHLFESKSKELSVSKKTAADGKRQEIIVLDSKRSNAINIGLTVLPPPRTIKIAILNFDEYALNKEGIEKILTMIPTDEEKQKIQEAQLANPEIPLGSAEQFLLTLSSISELSARLHLWAFKMDYETTEKEVAEPLLDLKEGIDQLENNKTLGFILSTLLAIGNFLNGTNAKAFELSYLEKVPEVKDTVHKQSLLHHVCTMVVENFPDSSDLYSEIGAITRSAKVDFDQLQDNLCQMERRCKASWDHLKAIAKHEMKPVLKQRMSEFLKDCAERIIILKIVHRRIINRFHSFLLFMGHPPYAIREVNINKFCRIISEFALEYRTTRERVLQQKQKRANHRERNKTRGKMITDSGKFSGSSPAPPSQPQGLSYAEDAAEHENMKAVLKTSSPSVEDATPALGVRTRSRASRGSTSSWTMGTDDSPNVTDDAADEIMDRIVKSATQVPSQRVVPRERKRSRANRKSLRRTLKSGLTPEEARALGLVGTSELQL

SEQ ID NO: 5419 - protein, 211 aa, Homo sapiens
MVFLKFFCMSFFCHLCQGYFDGPLYPEMSNGTLHHYFVPDGDYEENDDPEKCQLLFRVSDHRRCSQGEGSQVGSLLSLTLREEFTVLGRQVEDAGRVLEGISKSISYDLDGEESYGKYLRRESHQIGDAYSNSDKSLTELESKFKQGQEQDSRQESRLNEDFLGMLVHTRSLLKETLDISVGLRDKYELLALTIRSHGTRLGRLKNDYLKV

SEQ ID NO: 5420 - protein, 458 aa, Homo sapiens
MMLIPMASVMAVTEPKWVSVWSRFLWVTLLSMVLGSLLALLLPLGAVEEQCLAVLKGLYLLRSKPDRAQHAATKCTSPSTELSITSRGATLLVAKTKASPAGKLEARAALNQALEMKRQGKREKAQKLFMHALKMDPDFVDALTEFGIFSEEDKDIIQADYLYTRALTISPYHEKALVNRDRTLPLVEEIDQRYFSIIDSKVKKVMSIPKGNSALRRVMEETYYHHIYHTVAIEGNTLTLSEIRHILETRYAVPGKSLEEQNEVIGMHAAMKYINTTLVSRIGSVTISDVLEIHRRVLGYVDPVEAGRFRTTQVLVGHHIPPHPQDVEKQMQEFVQWLNSEEAMNLHPVEFAALAHYKLVYIHPFIDGNGRTSRLLMNLILMQAGYPPITIRKEQRSDYYHVLEAANEGDVRPFIRFIAKCTETTLDTLLFATTEYSVALPEAQPNHSGFKETLPVKP

SEQ ID NO: 5421 - protein, 180 aa, Homo sapiens
MMLIPMASVMAVTEPKWVSVWSRFLWVTLLSMVLGSLLALLLPLGAVEEQCLAVLKGLYLLRSKPDRAQHAATKCTSPSTELSITSRGATLLVAKTKASPESRRLGSQGGASQNTREWLWGHTDSDCIPPHGWGNRVVPGMLSTHDAAATSSSRPGTQAGHHGFLRRPAQGTAPRMSSAP

SEQ ID NO: 5422 - protein, 139 aa, Homo sapiens
MMLIPMASVMAVTEPKWVSVWSRFLWVTLLSMVLGSLLALLLPLGAVEEQCLAVLKGLYLLRSKPDRAQHAATKCTSPSTELSITSRGATLLVAKTKASPGKTDWPSSSMLVNWIDRHRMCHVLYVGHRGIVNKSALSS

SEQ ID NO: 5423 - protein, 56 aa, Homo sapiens
  SITE 1: note = misc_feature - Xaa can be any naturally occurring amino acid
XCLAVLKGLYLLRSKPDRAQHAATKCTSPSTELSITSRGATLLVAKTKASPGKCCT

SEQ ID NO: 5424 - protein, 437 aa, Homo sapiens
MGRRMRGAAATAGLWLLALGSLLALWGGLLPPRTELPASRPPEDRLPRRPARSGGPAPAPRFPLPPPLAWDARGGSLKTFRALLTLAAGADGPPRQSRSEPRWHVSARQPRPEESAAVHGGVFWSRGLEEQVPPGFSEAQAAAWLEAARGARMVALERGGCGRSSNRLARFADGTRACVRYGINPEQIQGEALSYYLARLLGLQRHVPPLALARVEARGAQWAQVQEELRAAHWTEGSVVSLTRWLPNLTDVVVPAPWRSEDGRLRPLRDAGGELANLSQAELVDLVQWTDLILFDYLTANFDRLVSNLFSLQWDPRVMQRATSNLHRGPGGALVFLDNEAGLVHGYRVAGMWDKYNEPLLQSVCVFRERTARRVLELHRGQDAAARLLRLYRRHEPRFPELAALADPHAQLLQRRLDFLAKHILHCKAKYGRRSGT

SEQ ID NO: 5425 - protein, 147 aa, Homo sapiens
MFPAGPPSHSLLRLPLLQLLLLVVQAVGRGLGRASPAGGPLEDVVIERYHIPRACPREVQMGDFVRYHYNGTFEDGKKFDSSGAHSTGCHPLLRCGSAGCVEQGRHRAGEHIAAPAPLPPHGPGRRLCPLPLQWHPAGRHLLRHQLQ

SEQ ID NO: 5426 - protein, 171 aa, Homo sapiens
MFPAGPPSHSLLRLPLLQLLLLVVQAVGRGLGRASPAGGPLEDVVIERYHIPRACPREVQMGDFVRYHYNGTFEDGKKFDSSYDRNTLVAIVVGVGRLITGMDRGLMGMCVNERRRLIVPPHLGYGSIGLAGLIPPDATLYFDVVLLDVWNKEDTVQVSTLLRPPHCPRMV

SEQ ID NO: 5427 - protein, 582 aa, Homo sapiens
MFPAGPPSHSLLRLPLLQLLLLVVQAVGRGLGRASPAGGPLEDVVIERYHIPRACPREVQMGDFVRYHYNGTFEDGKKFDSSYDRNTLVAIVVGVGRLITGMDRGLMGMCVNERRRLIVPPHLGYGSIGLAGLIPPDATLYFDVVLLDVWNKEDTVQVSTLLRPPHCPRMVQDGDFVRYHYNGTLLDGTSFDTSYSKGGTYDTYVGSGWLIKGMDQGLLGMCPGERRKIIIPPFLAYGEKGYGTVIPPQASLVFHVLLIDVHNPKDAVQLETLELPPGCVRRAGAGDFMRYHYNGSLMDGTLFDSSYSRNHTYNTYIGQGYIIPGMDQGLQGACMGERRRITIPPHLAYGENGTGDKIPGSAVLIFNVHVIDFHNPADVVEIRTLSRPSETCNETTKLGDFVRYHYNCSLLDGTQLFTSHDYGAPQEATLGANKVIEGLDTGLQGMCVGERRQLIVPPHLAHGESGARGVPGSAVLLFEVELVSREDGLPTGYLFVWHKDPPANLFEDMDLNKDGEVPPEEFSTFIKAQVSEGKGRLMPGQDPEKTIGDMFQNQDRNQDGKITVDELKLKSDEDEERVHEEL

SEQ ID NO: 5428 - protein, 81 aa, Homo sapiens
MGDFVRYHYNGTFEDGKKFDSSYDRNTLVAIVVGVGRLITGMDRGLMGMCVNERRRLIVPPHLGYGSIGLAGLIPPDATLY

SEQ ID NO: 5429 - protein, 172 aa, Homo sapiens
MGDFVRYHYNGTFEDGKKFDSSYDRNTLVAIVVGVGRLITGMDRGLMGMCVNERRRLIVPPHLGYGSIGLAGLIPPDATLYFDVVLLDVWNKEDTVQVSTLLRPPHCPRMVQDGDFVRYHYNGTLLDGTSFDTSYSKGGTYDTYVGSGWLIKGMDQGLLGMCPGERRKIIIP

SEQ ID NO: 5430 - protein, 386 aa, Homo sapiens
  SITE 1: note = misc_feature - Xaa can be any naturally occurring amino acid
XIDVHNPKDAVQLETLELPPGCVRRAGAGDFMRYHYNGSLMDGTLFDSSYSRNHTYNTYIGQGYIIPGMDQGLQGACMGERRRITIPPHLAYGENGTDSIGFLQGSAPLRPFRSGEGQPSLGREGGYGKTEPAYPQDPAVLGASVSSPVKWASHADPQGDKIPGSAVLIFNVHVIDFHNPADVVEIRTLSRPSETCNETTKLGDFVRYHYNCSLLDGTQLFTSHDYGAPQEATLGANKVIEGLDTGLQGMCVGERRQLIVPPHLAHGESGARGVPGSAVLLFEVELVSREDGLPTGYLFVWHKDPPANLFEDMDLNKDGEVPPEEFSTFIKAQVSEGKGRLMPGQDPEKTIGDMFQNQDRNQDGKITVDELKLKSDEDEERVHEEL

SEQ ID NO: 5431 - protein, 99 aa, Homo sapiens
MCVGEKRRAIIPSHLAYGKRGFPPSVPADAVVQYDVELIALIRANYWLKLVKGILPLVGMAMVPALLGLIGYHLYRKANRPKVSKKKLKEEKRNKSKKK

SEQ ID NO: 5432 - protein, 92 aa, Homo sapiens
MTLRPSLLPLHLLLLLLLSAAVCRAEAGLETESPVRTLQVETLGRERDLWKSIRDPCSPIVGGAPRTMCRARCFWRHASHTLHGKLGRWTYY

SEQ ID NO: 5433 - protein, 72 aa, Homo sapiens
MTLRPSLLPLHLLLLLLLSAAVCRAEAGLETESPVRTLQVETLSDRRWSPQNHVPSPLLLETRFTYTTREAW

SEQ ID NO: 5434 - protein, 201 aa, Homo sapiens
MTLRPSLLPLHLLLLLLLSAAVCRAEAGLETESPVRTLQVETLVEPPEPCAEPAAFGDTLHIHYTGSLVDGRIIDTSLTRDPLVIELGQKQVIPGLEQSLLDMCVGEKRRAIIPSHLAYGKRGFPPSVPADAVVQYDVELIALIRANYWLKLVKGILPLVGMAMVPALLGLIGYHLYRKANRPKVSKKKLKEEKRNKSKKK

SEQ ID NO: 5435 - protein, 182 aa, Homo sapiens
MTLRPSLLPLHLLLLLLLSAAVCRAEAGLETESPVRTLQVETLVEPPEPCAEPAAFGDTLHIHYTGSLVDGRIIDTSLTRDPLVIELGQKQVIPGLEQSLLDMCVGEKRRAIIPSHLAYGKRGFPPSVPDGVSLLLPRLECNSAIFTHHNLRHPGSSNSPVSASRVAGITGMRHHDRLILYF

SEQ ID NO: 5436 - protein, 146 aa, Homo sapiens
MTLRPSLLPLHLLLLLLLSAAVCRAEAGLETESPVRTLQVETLVEPPEPCAEPAAFGDTLHIHYTGSLVDGRIIDTSLTRDPLVIELGQKQVIPGLEQSLLDMCVGEKRRAIIPSHLAYGKRGFPPSVPGTKDNLMRPPGMTSSSQ

SEQ ID NO: 5437 - protein, 63 aa, Homo sapiens
SLTRDPLVIELGQKQVIPGLEQSLLDMCVGWKNSCFGCEDSGGFAEGASAGLRLLAYLSCLWL

SEQ ID NO: 5438 - protein, 66 aa, Homo sapiens
MRLFLWNAVLTLFVTSLIGALIPEPEVKIEVLQKPFICHRKTKGGDLMLVHYEGYLEKDGSLFHST

SEQ ID NO: 5439 - protein, 211 aa, Homo sapiens
MRLFLWNAVLTLFVTSLIGALIPEPEVKIEVLQKPFICHRKTKGGDLMLVHYEGYLEKDGSLFHSTHKHNNGQPIWFTLGILEALKGWDQGLKGMCVGEKRKLIIPPALGYGKEGKGKIPPESTLIFNIDLLEIRNGPRSHESFQEMDLNDDWKLSKDEVKAYLKKEFEKHGAVVNESHHDALVEDIFDKEDEDKDGFISAREFTYKHDEL

SEQ ID NO: 5440 - protein, 89 aa, Homo sapiens
  SITE 1: note = misc_feature - Xaa can be any naturally occurring amino acid
XVLQKPFICHRKTKGGDLMLVHYEGYLEKDGSLFHSTHKHNNGQPIWFTLGILEALKGWDQGLKGMCVGEKRKLIIPPALGYGKEGKVF

SEQ ID NO: 5441 - protein, 102 aa, Homo sapiens
MRLSWFRVLTVLSICLSAVATATGAEGKRKLQIGVKKRVDHCPIKSRKGDVLHMHYTGKLEDGTEFDSSLPQNQPFVFSLGTGQVIKGWDQGLLGMCEGEKR

SEQ ID NO: 5442 - protein, 142 aa, Homo sapiens
MRLSWFRVLTVLSICLSAVATATGAEGKRKLQIGVKKRVDHCPIKSRKGDVLHMHYTGKLEDGTEFDSSLPQNQPFVFSLGTGQVIKGWDQGLLGMCEGEKRKLVIPSELGYGERGAPPKIPGGATLVFEVELLKIERRTEL

SEQ ID NO: 5443 - protein, 142 aa, Homo sapiens; identical to SEQ ID NO: 5442

SEQ ID NO: 5444 - protein, 142 aa, Homo sapiens; identical to SEQ ID NO: 5442

SEQ ID NO: 5445 - protein, 74 aa, Homo sapiens
MPKTMHFLFRFIVFFYLWGLFTAQRQKKEESTEEVKIEVLHRPENCSKTSKKGDLLNAHYDGYLAKDGSKFYCR

SEQ ID NO: 5446 - protein, 86 aa, Homo sapiens
MPKTMHFLFRFIVFFYLWGLFTAQRQKKEESTEEVKIEVLHRPENCSKTSKKGDLLNAHYDGYLAKDGSKFYCSRRQDSTGCYIDF

SEQ ID NO: 5447 - protein, 222 aa, Homo sapiens
MPKTMHFLFRFIVFFYLWGLFTAQRQKKEESTEEVKIEVLHRPENCSKTSKKGDLLNAHYDGYLAKDGSKFYCSRTQNEGHPKWFVLGVGQVIKGLDIAMTDMCPGEKRKVVIPPSFAYGKEGYAEGKIPPDATLIFEIELYAVTKGPRSIETFKQIDMDNDRQLSKAEINLYLQREFEKDEKPRDKSYQDAVLEDIFKKNDHDGDGFISPKEYNVYQHDEL

SEQ ID NO: 5448 - protein, 221 aa, Homo sapiens
MPKTMHFLFRFIVFFYLWGLFTAQRQKKEESTEEVKIEVLHRPENCSKTSKKGDLLNAHYDGYLAKDGSKFYCSRTQNEGHPKWFVLGVGQVIKGLDIAMTDMCPGEKRKVVIPPSFAYGKEGYEGKIPPDATLIFEIELYAVTKGPRSIETFKQIDMDNDRQLSKAEINLYLQREFEKDEKPRDKSYQDAVLEDIFKKNDHDGDGFISPKEYNVYQHDEL

SEQ ID NO: 5449 - protein, 127 aa, Homo sapiens
MPKTMHFLFRFIVFFYLWGLFTAQRQKKEESTEEVKIEVLHRPENCSKTSKKGDLLNAHYDGYLAKDGSKFYCSRTQNEGHPKWFVLGVGQVIKGLDIAMTDMCPGEKRKVVIPPSFAYGKEGYGST

SEQ ID NO: 5450 - protein, 67 aa, Homo sapiens
  SITE 1: note = misc_feature - Xaa can be any naturally occurring amino acid
XGYLAKDGSKFYCSRTQNEGHPKWFVLGVGQVIKGLDIAMTDMCPGEKRKVVIPPSFAYGKEGYGST

SEQ ID NO: 5451 - protein, 623 aa, Homo sapiens
MAFRGWRPPPPPLLLLLLWVTGQAAPVAGLGSDAELQIERRFVPDECPRTVRSGDFVRYHYVGTFPDGQKFDSRYWDTAEDKADKSPCPQVRVGVNTSPSCRLKQKGVGIYWKDLQFLVRVQNHGLSYDRDSTFNVFVGKGQLITGMDQALVGMCVNERRFVKIPPKLAYGNEGVSGVIPPNSVLHFDVLLMDIWNSEDQVQIHTYFKPPSCPRTIQVSDFVRYHYNGTFLDGTLFDSSHNRMKTYDTYVGIGWLIPGMDKGLLGMCVGEKRIITIPPFLAYGEDGDGKDIPGQASLVFDVALLDLHNPKDSISIENKVVPENCERISQSGDFLRYHYNGTLLDGTLFDSSYSRNRTFDTYIGQGYVIPGMDEGLLGVCIGEKRRIVVPPHLGYGEEGRGNIPGSAVLVFDIHVIDFHNPSDSISITSHYKPPDCSVLSKKGDYLKYHYNASLLDGTLLDSTWNLGKTYNIVLGSGQVVLGMDMGLREMCVGEKRTVIIPPHLGYGEAGVDGEVPGSAVLVFDIELLELVAGLPEGYMFIWNGEVSPNLFEEIDKDGNGEVLLEEFSEYIHAQVASGKGKLAPGFDAELIVKNMFTNQDRNGDGKVTAEEFKLKDQEAKHDEL

SEQ ID NO: 5452 - protein, 570 aa, Homo sapiens
MAFRGWRPPPPPLLLLLLWVTGQAAPVAGLGSDAELQIERRFVPDECPRTVRSGDFVRYHYVGTFPDGQKFDSSYDRDSTFNVFVGKGQLITGMDQALVGMCVNERRFVKIPPKLAYGNEGVSGVIPPNSVLHFDVLLMDIWNSEDQVQIHTYFKPPSCPRTIQVSDFVRYHYNGTFLDGTLFDSSHNRMKTYDTYVGIGWLIPGMDKGLLGMCVGEKRIITIPPFLAYGEDGDGKDIPGQASLVFDVALLDLHNPKDSISIENKVVPENCERISQSGDFLRYHYNGTLLDGTLFDSSYSRNRTFDTYIGQGYVIPGMDEGLLGVCIGEKRRIVVPPHLGYGEEGRGNIPGSAVLVFDIHVIDFHNPSDSISITSHYKPPDCSVLSKKGDYLKYHYNASLLDGTLLDSTWNLGKTYNIVLGSGQVVLGMDMGLREMCVGEKRTVIIPPHLGYGEAGVDGEVPGSAVLVFDIELLELVAGLPEGYMFIWNGEVSPNLFEEIDKDGNGEVLLEEFSEYIHAQVASGKGKLAPGFDAELIVKNMFTNQDRNGDGKVTAEEFKLKDQEAKHDEL

SEQ ID NO: 5453 - protein, 338 aa, Homo sapiens
MAGKDIPGQASLVFDVALLDLHNPKDSISIENKVVPENCERISQSGDFLRYHYNGTLLDGTLFDSSYSRNRTFDTYIGQGYVIPGMDEGLLGVCIGEKRRIVVPPHLGYGEEGRGNIPGSAVLVFDIHVIDFHNPSDSISITSHYKPPDCSVLSKKGDYLKYHYNASLLDGTLLDSTWNLGKTYNIVLGSGQVVLGMDMGLREMCVGEKRTVIIPPHLGYGEAGVDGEVPGSAVLVFDIELLELVAGLPEGYMFIWNGEVSPNLFEEIDKDGNGEVLLEEFSEYIHAQVASGKGKLAPGFDAELIVKNMFTNQDRNGDGKVTAEEFKLKDQEAKHDEL

SEQ ID NO: 5454 - protein, 226 aa, Homo sapiens [sequence omitted]

SEQ ID NO: 5455 - protein, 85 aa, Homo sapiens
MLKRFTWTDSKPKASLKIDLRVTSKSKESGLSDVSRPSFCHSSCGHVSEGKRRFTYDHAELERKIACCSPPPDYNSVVLYSTPPI

SEQ ID NO: 5456 - protein, 85 aa, Homo sapiens; identical to SEQ ID NO: 5455

SEQ ID NO: 5457 - protein, 361 aa, Homo sapiens
MNSDLLVDSDGFYKEPITMEDLISYSFQVARGMEFLSSRKCIHRDLAARNILLSENNVVKICDFGLARDIYKNPDYVRKGDTRLPLKWMAPESIFDKIYSTKSDVWSYGVLLWEIFSLGGSPYPGVQMDEDFCSRLREGMRMRAPEYSTPEIYQIMLDCWHRDPKERPRFAELVEKLGDLLQANVQQDGKDYIPINAILTGNSGFTYSTPAFSEDFFKESISAPKFNSGSSDDVRYVNAFKFMSLERIKTFEELLPNATSMFDDYQGDSSTLLASPMLKRFTWTDSKPKASLKIDLRVTSKSKESGLSDVSRPSFCHSSCGHVSEGKRRFTYDHAELERKIACCSPPPDYNSVVLYSTPPI

SEQ ID NO: 5458 - protein, 433 aa, Homo sapiens
MVIVEYCKYGNLSNYLKSKRDLFFLNKDAALHMEPKKEKMEPGLEQGKKPRLDSVTSSESFASSGFQEDKSLSDVEEEEDSDGFYKEPITMEDLISYSFQVARGMEFLSSRKCIHRDLAARNILLSENNVVKICDFGLARDIYKNPDYVRKGDTRLPLKWMAPESIFDKIYSTKSDVWSYGVLLWEIFSLGGSPYPGVQMDEDFCSRLREGMRMRAPEYSTPEIYQIMLDCWHRDPKERPRFAELVEKLGDLLQANVQQDGKDYIPINAILTGNSGFTYSTPAFSEDFFKESISAPKFNSGSSDDVRYVNAFKFMSLERIKTFEELLPNATSMFDDYQGDSSTLLASPMLKRFTWTDSKPKASLKIDLRVTSKSKESGLSDVSRPSFCHSSCGHVSEGKRRFTYDHAELERKIACCSPPPDYNSVVLYSTPPI

SEQ ID NO: 5459 - protein, 1338 aa, Homo sapiens
MVSYWDTGVLLCALLSCLLLTGSSSGSKLKDPELSLKGTQHIMQAGQTLHLQCRGEAAHKWSLPEMVSKESERLSITKSACGRNGKQFCSTLTLNTAQANHTGFYSCKYLAVPTSKKKETESAIYIFISDTGRPFVEMYSEIPEIIHMTEGRELVIPCRVTSPNITVTLKKFPLDTLIPDGKRIIWDSRKGFIISNATYKEIGLLTCEATVNGHLYKTNYLTHRQTNTIIDVQISTPRPVKLLRGHTLVLNCTATTPLNTRVQMTWSYPDEKNKRASVRRRIDQSNSHANIFYSVLTIDKMQNKDKGLYTCRVRSGPSFKSVNTSVHIYDKAFITVKHRKQQVLETVAGKRSYRLSMKVKAFPSPEVVWLKDGLPATEKSARYLTRGYSLIIKDVTEEDAGNYTILLSIKQSNVFKNLTATLIVNVKPQIYEKAVSSFPDPALYPLGSRQILTCTAYGIPQPTIKWFWHPCNHNHSEARCDFCSNNEESFILDADSNMGNRIESITQRMAIIEGKNKMASTLVVADSRISGIYICIASNKVGTVGRNISFYITDVPNGFHVNLEKMPTEGEDLKLSCTVNKFLYRDVTWILLRTVNNRTMHYSISKQKMAITKEHSITLNLTIMNVSLQDSGTYACRARNVYTGEEILQKKEITIRDQEAPYLLRNLSDHTVAISSSTTLDCHANGVPEPQITWFKNNHKIQQEPGIILGPGSSTLFIERVTEEDEGVYHCKATNQKGSVESSAYLTVQGTSDKSNLELITLTCTCVAATLFWLLLTLFIRKMKRSSSEIKTDYLSIIMDPDEVPLDEQCERLPYDASKWEFARERLKLGKSLGRGAFGKVVQASAFGIKKSPTCRTVAVKMLKEGATASEYKALMTELKILTHIGHHLNVVNLLGACTKQGGPLMVIVEYCKYGNLSNYLKSKRDLFFLNKDAALHMEPKKEKMEPGLEQGKKPRLDSVTSSESFASSGFQEDKSLSDVEEEEDSDGFYKEPITMEDLISYSFQVARGMEFLSSRKCIHRDLAARNILLSENNVVKICDFGLARDIYKNPDYVRKGDTRLPLKWMAPESIFDKIYSTKSDVWSYGVLLWEIFSLGGSPYPGVQMDEDFCSRLREGMRMRAPEYSTPEIYQIMLDCWHRDPKERPRFAELVEKLGDLLQANVQQDGKDYIPINAILTGNSGFTYSTPAFSEDFFKESISAPKFNSGSSDDVRYVNAFKFMSLERIKTFEELLPNATSMFDDYQGDSSTLLASPMLKRFTWTDSKPKASLKIDLRVTSKSKESGLSDVSRPSFCHSSCGHVSEGKRRFTYDHAELERKIACCSPPPDYNSVVLYSTPPI

SEQ ID NO: 5460 - protein, 541 aa, Homo sapiens
MVSYWDTGVLLCALLSCLLLTGSSSGSKLKDPELSLKGTQHIMQAGQTLHLQCRGEAAHKWSLPEMVSKESERLSITKSACGRNGKQFCSTLTLNTAQANHTGFYSCKYLAVPTSKKKETESAIYIFISDTGRPFVEMYSEIPEIIHMTEGRELVIPCRVTSPNITVTLKKFPLDTLIPDGKRIIWDSRKGFIISNATYKEIGLLTCEATVNGHLYKTNYLTHRQTNTIIDVQISTPRPVKLLRGHTLVLNCTATTPLNTRVQMTWSYPDEKNKRASVRRRIDQSNSHANIFYSVLTIDKMQNKDKGLYTCRVRSGPSFKSVNTSVHIYDKAFITVKHRKQQVLETVAGKRSYRLSMKVKAFPSPEVVWLKDGLPATEKSARYLTRGYSLIIKDVTEEDAGNYTILLSIKQSNVFKNLTATLIVNVKPQIYEKAVSSFPDPALYPLGSRQILTCTAYGIPQPTIKWFWHPCNHNHSEARCDFCSNNEESFILDADSNMGNRIESITQRMAIIEGKNKLPPANSSFMLPPTSFSSNYFHFLP

SEQ ID NO: 5461 - protein, 733 aa, Homo sapiens
MVSYWDTGVLLCALLSCLLLTGSSSGSKLKDPELSLKGTQHIMQAGQTLHLQCRGEAAHKWSLPEMVSKESERLSITKSACGRNGKQFCSTLTLNTAQANHTGFYSCKYLAVPTSKKKETESAIYIFISDTGRPFVEMYSEIPEIIHMTEGRELVIPCRVTSPNITVTLKKFPLDTLIPDGKRIIWDSRKGFIISNATYKEIGLLTCEATVNGHLYKTNYLTHRQTNTIIDVQISTPRPVKLLRGHTLVLNCTATTPLNTRVQMTWSYPDEKNKRASVRRRIDQSNSHANIFYSVLTIDKMQNKDKGLYTCRVRSGPSFKSVNTSVHIYDKAFITVKHRKQQVLETVAGKRSYRLSMKVKAFPSPEVVWLKDGLPATEKSARYLTRGYSLIIKDVTEEDAGNYTILLSIKQSNVFKNLTATLIVNVKPQIYEKAVSSFPDPALYPLGSRQILTCTAYGIPQPTIKWFWHPCNHNHSEARCDFCSNNEESFILDADSNMGNRIESITQRMAIIEGKNKMASTLVVADSRISGIYICIASNKVGTVGRNISFYITDVPNGFHVNLEKMPTEGEDLKLSCTVNKFLYRDVTWILLRTVNNRTMHYSISKQKMAITKEHSITLNLTIMNVSLQDSGTYACRARNVYTGEEILQKKEITIRDQEAPYLLRNLSDHTVAISSSTTLDCHANGVPEPQITWFKNNHKIQQEPELYTSTSPSSSSSSPLSSSSSSSSSSSS

SEQ ID NO: 5462 - protein, 687 aa, Homo sapiens
MVSYWDTGVLLCALLSCLLLTGSSSGSKLKDPELSLKGTQHIMQAGQTLHLQCRGEAAHKWSLPEMVSKESERLSITKSACGRNGKQFCSTLTLNTAQANHTGFYSCKYLAVPTSKKKETESAIYIFISDTGRPFVEMYSEIPEIIHMTEGRELVIPCRVTSPNITVTLKKFPLDTLIPDGKRIIWDSRKGFIISNATYKEIGLLTCEATVNGHLYKTNYLTHRQTNTIIDVQISTPRPVKLLRGHTLVLNCTATTPLNTRVQMTWSYPDEKNKRASVRRRIDQSNSHANIFYSVLTIDKMQNKDKGLYTCRVRSGPSFKSVNTSVHIYDKAFITVKHRKQQVLETVAGKRSYRLSMKVKAFPSPEVVWLKDGLPATEKSARYLTRGYSLIIKDVTEEDAGNYTILLSIKQSNVFKNLTATLIVNVKPQIYEKAVSSFPDPALYPLGSRQILTCTAYGIPQPTIKWFWHPCNHNHSEARCDFCSNNEESFILDADSNMGNRIESITQRMAIIEGKNKMASTLVVADSRISGIYICIASNKVGTVGRNISFYITDVPNGFHVNLEKMPTEGEDLKLSCTVNKFLYRDVTWILLRTVNNRTMHYSISKQKMAITKEHSITLNLTIMNVSLQDSGTYACRARNVYTGEEILQKKEITIRGEHCNKKAVFSRISKFKSTRNDCTTQSNVKH

SEQ ID NO: 5463 - protein, 665 aa, Homo sapiens
MVSYWDTGVLLCALLSCLLLTGSSSGSKLKDPELSLKGTQHIMQAGQTLHLQCRGEAAHKWSLPEMVSKESERLSITKSACGRNGKQFCSTLTLNTAQANHTGFYSCKYLAVPTSKKKETESAIYIFISDTGRPFVEMYSEIPEIIHMTEGRELVIPCRVTSPNITVTLKKFPLDTLIPDGKRIIWDSRKGFIISNATYKEIGLLTCEATVNGHLYKTNYLTHRQTNTIIDVQISTPRPVKLLRGHTLVLNCTATTPLNTRVQMTWSYPDEKNKRASVRRRIDQSNSHANIFYSVLTIDKMQNKDKGLYTCRVRSGPSFKSVNTSVHIYDKAFITVKHRKQQVLETVAGKRSYRLSMKVKAFPSPEVVWLKDGLPATEKSARYLTRGYSLIIKDVTEEDAGNYTILLSIKQSNVFKNLTATLIVNVKPQIYEKAVSSFPDPALYPLGSRQILTCTAYGIPQPTIKWFWHPCNHNHSEARCDFCSNNEESFILDADSNMGNRIESITQRMAIIEGKNKMASTLVVADSRISGIYICIASNKVGTVGRNISFYITDVPNGFHVNLEKMPTEGEDLKLSCTVNKFLYRDVTWILLRTVNNRTMHYSISKQKMAITKEHSITLNLTIMNVSLQDSGTYACRARNVYTGEEILQKKEITIRGSEEMLLPK

SEQ ID NO: 5464 - protein, 1363 aa, Homo sapiens
MQRGAALCLRLWLCLGLLDGLVSGYSMTPPTLNITEESHVIDTGDSLSISCRGQHPLEWAWPGAQEAPATGDKDSEDTGVVRDCEGTDARPYCKVLLLHEVHANDTGSYVCYYKYIKARIEGTTAASSYVFVRDFEQPFINKPDTLLVNRKDAMWVPCLVSIPGLNVTLRSQSSVLWPDGQEVVWDDRRGMLVSTPLLHDALYLQCETTWGDQDFLSNPFLVHITGNELYDIQLLPRKSLELLVGEKLVLNCTVWAEFNSGVTFDWDYPGKQAERGKWVPERRSQQTHTELSSILTIHNVSQHDLGSYVCKANNGIQRFRESTEVIVHENPFISVEWLKGPILEATAGDELVKLPVKLAAYPPPEFQWYKDGKALSGRHSPHALVLKEVTEASTGTYTLALWNSAAGLRRNISLELVVNVPPQIHEKEASSPSIYSRHSRQALTCTAYGVPLPLSIQWHWRPWTPCKMFAQRSLRRRQQQDLMPQCRDWRAVTTQDAVNPIESLDTWTEFVEGKNKTVSKLVIQNANVSAMYKCVVSNKVGQDERLIYFYVTTIPDGFTIESKPSEELLEGQPVLLSCQADSYKYEHLRWYRLNLSTLHDAHGNPLLLDCKNVHLFATPLAASLEEVAPGARHATLSLSIPRVAPEHEGHYVCEVQDRRSHDKHCHKKYLSVQALEAPRLTQNLTDLLVNVSDSLEMQCLVAGAHAPSIVWYKDERLLEEKSGVDLADSNQKLSIQRVREEDAGRYLCSVCNAKGCVNSSASVAVEGSEDKGSMEIVILVGTGVIAVFFWVLLLLIFCNMRRPAHADIKTGYLSIIMDPGEVPLEEQCEYLSYDASQWEFPRERLHLGRVLGYGAFGKVVEASAFGIHKGSSCDTVAVKMLKEGATASEHRALMSELKILIHIGNHLNVVNLLGACTKPQGPLMVIVEFCKYGNLSNFLRAKRDAFSPCAEKSPEQRGRFRAMVELARLDRRRPGSSDRVLFARFSKTEGGARRASPDQEAEDLWLSPLTMEDLVCYSFQVARGMEFLASRKCIHRDLAARNILLSESDVVKICDFGLARDIYKDPDYVRKGSARLPLKWMAPESIFDKVYTTQSDVWSFGVLLWEIFSLGASPYPGVQINEEFCQRLRDGTRMRAPELATPAIRRIMLNCWSGDPKARPAFSELVEILGDLLQGRGLQEEEEVCMAPRSSQSSEEGSFSQVSTMALHIAQADAEDSPPSLQRHSLAARYYNWVSFPGCLARGAETRGSSRMKTFEEFPMTPTTYKGSVDNQTDSGMVLASEEFEQIESRHRQESGFSCKGPGQNVAVTRAHPDSQGRRRRPERGARGGQVFYNSEYGELSEPSEEDHCSPSARVTFFTDNSY

SEQ ID NO: 5465 - protein, 1298 aa, Homo sapiens
MQRGAALCLRLWLCLGLLDGLVSGYSMTPPTLNITEESHVIDTGDSLSISCRGQHPLEWAWPGAQEAPATGDKDSEDTGVVRDCEGTDARPYCKVLLLHEVHANDTGSYVCYYKYIKARIEGTTAASSYVFVRDFEQPFINKPDTLLVNRKDAMWVPCLVSIPGLNVTLRSQSSVLWPDGQEVVWDDRRGMLVSTPLLHDALYLQCETTWGDQDFLSNPFLVHITGNELYDIQLLPRKSLELLVGEKLVLNCTVWAEFNSGVTFDWDYPGKQAERGKWVPERRSQQTHTELSSILTIHNVSQHDLGSYVCKANNGIQRFRESTEVIVHENPFISVEWLKGPILEATAGDELVKLPVKLAAYPPPEFQWYKDGKALSGRHSPHALVLKEVTEASTGTYTLALWNSAAGLRRNISLELVVNVPPQIHEKEASSPSIYSRHSRQALTCTAYGVPLPLSIQWHWRPWTPCKMFAQRSLRRRQQQDLMPQCRDWRAVTTQDAVNPIESLDTWTEFVEGKNKTVSKLVIQNANVSAMYKCVVSNKVGQDERLIYFYVTTIPDGFTIESKPSEELLEGQPVLLSCQADSYKYEHLRWYRLNLSTLHDAHGNPLLLDCKNVHLFATPLAASLEEVAPGARHATLSLSIPRVAPEHEGHYVCEVQDRRSHDKHCHKKYLSVQALEAPRLTQNLTDLLVNVSDSLEMQCLVAGAHAPSIVWYKDERLLEEKSGVDLADSNQKLSIQRVREEDAGRYLCSVCNAKGCVNSSASVAVEGSEDKGSMEIVILVGTGVIAVFFWVLLLLIFCNMRRPAHADIKTGYLSIIMDPGEVPLEEQCEYLSYDASQWEFPRERLHLGRVLGYGAFGKVVEASAFGIHKGSSCDTVAVKMLKEGATASEHRALMSELKILIHIGNHLNVVNLLGACTKPQGPLMVIVEFCKYGNLSNFLRAKRDAFSPCAEKSPEQRGRFRAMVELARLDRRRPGSSDRVLFARFSKTEGGARRASPDQEAEDLWLSPLTMEDLVCYSFQVARGMEFLASRKCIHRDLAARNILLSESDVVKICDFGLARDIYKDPDYVRKGSARLPLKWMAPESIFDKVYTTQSDVWSFGVLLWEIFSLGASPYPGVQINEEFCQRLRDGTRMRAPELATPAIRRIMLNCWSGDPKARPAFSELVEILGDLLQGRGLQEEEEVCMAPRSSQSSEEGSFSQVSTMALHIAQADAEDSPPSLQRHSLAARYYNWVSFPGCLARGAETRGSSRMKTFEEFPMTPTTYKGSVDNQTDSGMVLASEEFEQIESRHRQESGFR

SEQ ID NO: 5466 - protein, 1306 aa, Homo sapiens
MQRGAALCLRLWLCLGLLDGLVSGYSMTPPTLNITEESHVIDTGDSLSISCRGQHPLEWAWPGAQEAPATGDKDSEDTGVVRDCEGTDARPYCKVLLLHEVHANDTGSYVCYYKYIKARIEGTTAASSYVFVRDFEQPFINKPDTLLVNRKDAMWVPCLVSIPGLNVTLRSQSSVLWPDGQEVVWDDRRGMLVSTPLLHDALYLQCETTWGDQDFLSNPFLVHITGNELYDIQLLPRKSLELLVGEKLVLNCTVWAEFNSGVTFDWDYPGKQAERGKWVPERRSQQTHTELSSILTIHNVSQHDLGSYVCKANNGIQRFRESTEVIVHENPFISVEWLKGPILEATAGDELVKLPVKLAAYPPPEFQWYKDGKALSGRHSPHALVLKEVTEASTGTYTLALWNSAAGLRRNISLELVVNVPPQIHEKEASSPSIYSRHSRQALTCTAYGVPLPLSIQWHWRPWTPCKMFAQRSLRRRQQQDLMPQCRDWRAVTTQDAVNPIESLDTWTEFVEGKNKTVSKLVIQNANVSAMYKCVVSNKVGQDERLIYFYVTTIPDGFTIESKPSEELLEGQPVLLSCQADSYKYEHLRWYRLNLSTLHDAHGNPLLLDCKNVHLFATPLAASLEEVAPGARHATLSLSIPRVAPEHEGHYVCEVQDRRSHDKHCHKKYLSVQALEAPRLTQNLTDLLVNVSDSLEMQCLVAGAHAPSIVWYKDERLLEEKSGVDLADSNQKLSIQRVREEDAGRYLCSVCNAKGCVNSSASVAVEGSEDKGSMEIVILVGTGVIAVFFWVLLLLIFCNMRRPAHADIKTGYLSIIMDPGEVPLEEQCEYLSYDASQWEFPRERLHLGRVLGYGAFGKVVEASAFGIHKGSSCDTVAVKMLKEGATASEHRALMSELKILIHIGNHLNVVNLLGACTKPQGPLMVIVEFCKYGNLSNFLRAKRDAFSPCAEKSPEQRGRFRAMVELARLDRRRPGSSDRVLFARFSKTEGGARRASPDQEAEDLWLSPLTMEDLVCYSFQVARGMEFLASRKCIHRDLAARNILLSESDVVKICDFGLARDIYKDPDYVRKGSARLPLKWMAPESIFDKVYTTQSDVWSFGVLLWEIFSLGASPYPGVQINEEFCQRLRDGTRMRAPELATPAIRRIMLNCWSGDPKARPAFSELVEILGDLLQGRGLQEEEEVCMAPRSSQSSEEGSFSQVSTMALHIAQADAEDSPPSLQRHSLAARYYNWVSFPGCLARGAETRGSSRMKTFEEFPMTPTTYKGSVDNQTDSGMVLASEEFEQIESRHRQESGFRGTRRTRGA

SEQ ID NO: 5467 - protein, 295 aa, Homo sapiens
MQRGAALCLRLWLCLGLLDGLVSGYSMTPPTLNITEESHVIDTGDSLSISCRGQHPLEWAWPGAQEAPATGDKDSEDTGVVRDCEGTDARPYCKVLLLHEVHANDTGSYVCYYKYIKARIEGTTAASSYVFVRDFEQPFINKPDTLLVNRKDAMWVPCLVSIPGLNVTLRSQSSVLWPDGQEVVWDDRRGMLVSTPLLHDALYLQCETTWGDQDFLSNPFLVHITGNELYDIQLLPRKSLELLVGEKLVLNCTVWAEFNSGVTFDWDYPGKQKIPSSASSGSKDPSWRPRQETSW

SEQ ID NO: 5468 - protein, 142 aa, Homo sapiens
MVELARLDRRRPGSSDRVLFARFSKTEGGARRASPDQEAEDLWLSPLTMEDLVCYSFQVARGMEFLASRKCIHRDLAARNILLSESDVVKICDFGLARDIYKDPDYVRKGSARLPLKWMAPESIFDKVYTTQSDVWSFGVLL

SEQ ID NO: 5469 - protein, 126 aa, Homo sapiens
MAKRVAIVGAGVSGLASIKCCLEEGLEPTCFERSDDLGGLWRFTEHVEEGRASLYKSVVSNSCKEMSCYSDFPFPEDYPNYVPNSQFLEYLKMYANHFDLLKHIQFKSGIQLTEQQLFPISCIRDS

SEQ ID NO: 5470 - protein, 532 aa, Homo sapiens
MAKRVAIVGAGVSGLASIKCCLEEGLEPTCFERSDDLGGLWRFTEHVEEGRASLYKSVVSNSCKEMSCYSDFPFPEDYPNYVPNSQFLEYLKMYANHFDLLKHIQFKTKVCSVTKCSDSAVSGQWEVVTMHEEKQESAIFDAVMVCTGFLTNPYLPLDSFPGINAFKGQYFHSRQYKHPDIFKDKRVLVIGMGNSGTDIAVEASHLAEKVFLSTTGGGWVISRIFDSGYPWDMVFMTRFQNMLRNSLPTPIVTWLMERKINNWLNHANYGLIPEDRTQLKEFVLNDELPGRIITGKVFIRPSIKEVKENSVIFNNTSKEEPIDIIVFATGYTFAFPFLDESVVKVEDGQASLYKYIFPAHLQKPTLAIIGLIKPLGSMIPTGETQARWAVRVLKGVNKLPPPSVMIEEINARKENKPSWFGLCYCKALQSDYITYIDELLTYINAKPNLFSMLLTDPHLALTVFFGPCSPYQFRLTGPGKWEGARNAIMTQWDRTFKVIKARVVQESPSPFESFLKVFSFLALLVAIFLIFL

SEQ ID NO: 5471 - protein, 532 aa, Homo sapiens; identical to SEQ ID NO: 5470

SEQ ID NO: 5472 - protein, 532 aa, Homo sapiens; identical to SEQ ID NO: 5470

SEQ ID NO: 5473 - protein, 469 aa, Homo sapiens
MAKRVAIVGAGVSGLASIKCCLEEGLEPTCFERSDDLGGLWRFTTKVCSVTKCSDSAVSGQWEVVTMHEEKQESAIFDAVMVCTGFLTNPYLPLDSFPGINAFKGQYFHSRQYKHPDIFKDKRVLVIGMGNSGTDIAVEASHLAEKVFLSTTGGGWVISRIFDSGYPWDMVFMTRFQNMLRNSLPTPIVTWLMERKINNWLNHANYGLIPEDRTQLKEFVLNDELPGRIITGKVFIRPSIKEVKENSVIFNNTSKEEPIDIIVFATGYTFAFPFLDESVVKVEDGQASLYKYIFPAHLQKPTLAIIGLIKPLGSMIPTGETQARWAVRVLKGVNKLPPPSVMIEEINARKENKPSWFGLCYCKALQSDYITYIDELLTYINAKPNLFSMLLTDPHLALTVFFGPCSPYQFRLTGPGKWEGARNAIMTQWDRTFKVIKARVVQESPSPFESFLKVFSFLALLVAIFLIFL

SEQ ID NO: 5474 - protein, 131 aa, Homo sapiens
MAKKVAVIGAGVSGLISLKCCVDEGLEPTCFERTEDIGGVWRFKENVEDGRASIYQSVVTNTSKEMSCFSDFPMPEDFPNFLHNSKLLEYFRIFAKKFDLLKYIQFQTTVLSVRKCPDFSSSGQWKVVTQS

SEQ ID NO: 5475 - protein, 535 aa, Homo sapiens [sequence omitted]

SEQ ID NO: 5476 - protein, 153 aa, Homo sapiens
TQPREKTILSKRRCQKAKTKENVEDGRASIYQSVVTNTSKEMSCFSDFPMPEDFPNFLHNSKLLEYFRIFAKKFDLLKYIQFQTTVLSVRKCPDFSSSGQWKVVTQSNGKEQSAVFDAVMVCSGHHILPHIPLKSFPGFYQHQAWHLGHEPYL

SEQ ID NO: 5477 - protein, 218 aa, Homo sapiens
MGKKVAIIGAGVSGLASIRSCLEEGLEPTCFEKSNDIGGLWKFSDHAEEGRASIYKSVFSNSSKEMMCFPDFPFPDDFPNFMHNSKIQEYIIAFAKEKNLLKYIQFKTFVSSVNKHPDFATTGQWDVTTERDGKKESAVFDAVMVCSGHHVYPNLPDYKEPGVFNGKRVLVVGLGNSGCDIATELSRTAEQVMISSRSGSWVMSRVWDNGYPWDMLLV

SEQ ID NO: 5478 - protein, 532 aa, Homo sapiens
MGKKVAIIGAGVSGLASIRSCLEEGLEPTCFEKSNDIGGLWKFSDHAEEGRASIYKSVFSNSSKEMMCFPDFPFPDDFPNFMHNSKIQEYIIAFAKEKNLLKYIQFKTFVSSVNKHPDFATTGQWDVTTERDGKKESAVFDAVMVCSGHHVYPNLPKESFPGLNHFKGKCFHSRDYKEPGVFNGKRVLVVGLGNSGCDIATELSRTAEQVMISSRSGSWVMSRVWDNGYPWDMLLVTRFGTFLKNNLPTAISDWLYVKQMNARFKHENYGLMPLNGVLRKEPVFNDELPASILCGIVSVKPNVKEFTETSAIFEDGTIFEGIDCVIFATGYSFAYPFLDESIIKSRNNEIILFKGVFPPLLEKSTIAVIGFVQSLGAAIPTVDLQSRWAAQVIKGTCTLPSMEDMMNDINEKMEKKRKWFGKSETIQTDYIVYMDELSSFIGAKPNIPWLFLTDPKLAMEVYFGPCSPYQFRLVGPGQWPGARNAILTQWDRSLKPMQTRVVGRLQKPCFFFHWLKLFAIPILLIAVFLVLT

SEQ ID NO: 5479 - protein, 48 aa, Homo sapiens
MGKKVAIIGAGVSGLASIRSCLEEGLEPTCFEKSNDIGGLWKFSRSHE

SEQ ID NO: 5480 - protein, 145 aa, Homo sapiens
MTKKRIAVIGGGVSGLSSIKCCVEEGLEPVCFERTDDIGGLWRFQENPEEGRASIYKSVIINTSKEMMCFSDYPIPDHYPNFMHNAQVLEYFRMYAKEFDLLKYIRFKTTVCSVKKQPDFATSGQWEVVTESEGKKEMNVFDGVM

SEQ ID NO: 5481 - protein, 192 aa, Homo sapiens
MTKKRIAVIGGGVSGLSSIKCCVEEGLEPVCFERTDDIGGLWRFQENPEEGRASIYKSVIINTSKEMMCFSDYPIPDHYPNFMHNAQVLEYFRMYAKEFDLLKYIRFKTTVCSVKKQPDFATSGQWEVVTESEGKKEMNVFDGVMVCTGHHTNAHLPLESFPGIEKFKGQYFHSRDYKNPEGFTGKRVIIIG

SEQ ID NO: 5482 - protein, 533 aa, Homo sapiens
MTKKRIAVIGGGVSGLSSIKCCVEEGLEPVCFERTDDIGGLWRFQENPEEGRASIYKSVIINTSKEMMCFSDYPIPDHYPNFMHNAQVLEYFRMYAKEFDLLKYIRFKTTVCSVKKQPDFATSGQWEVVTESEGKKEMNVFDGVMVCTGHHTNAHLPLESFPGIEKFKGQYFHSRDYKNPEGFTGKRVIIIGIGNSGGDLAVEISQTAKQVFLSTRRGAWILNRVGDYGYPADVLFSSRLTHFIWKICGQSLANKYLEKKINQRFDHEMFGLKPKHRALSQHPTLNDDLPNRIISGLVKVKGNVKEFTETAAIFEDGSREDDIDAVIFATGYSFDFPFLEDSVKVVKNKISLYKKVFPPNLERPTLAIIGLIQPLGAIMPISELQGRWATQVFKGLKTLPSQSEMMAEISKAQEEIDKRYVESQRHTIQGDYIDTMEELADLVGVRPNLLSLAFTDPKLALHLLLGPCTPIHYRVQGPGKWDGARKAILTTDDRIRKPLMTRVVERSSSMTSTMTIGKFMLALAFFAIIIAYF

SEQ ID NO: 5483 - protein, 285 aa, Homo sapiens
MTKKRIAVIGGGVSGLSSIKCCVEEGLEPVCFERTDDIGGLWRFQENPEEGRASIYKSVIINTSKEMMCFSDYPIPDHYPNFMHNAQVLEYFRMYAKEFDLLKYIRFKTTVCSVKKQPDFATSGQWEVVTESEGKKEMNVFDGVMVCTGHHTNAHLPLESFPGIEKFKGQYFHSRDYKNPEGFTGKRVIIIGIGNSGGDLAVEISQTAKQVFLSTRRGAWILNRVGDYGYPADVLFSSRLTHFIWKICGQSLANKYLEKKINQRFDHEMFGLKPKHRSKDIALTE

SEQ ID NO: 5484 - protein, 464 aa, Homo sapiens
MTKKRIAVIGGGVSGLSSIKCCVEEGLEPVCFERTDDIGGLWRFQENPEEGRASIYKSVIINTSKEMMCFSDYPIPDHYPNFMHNAQVLEYFRMYAKEFDLLKYIRFKTTVCSVKKQPDFATSGQWEVVTESEGKKEMNVFDGVMVCTGHHTNAHLPLESFPGIEKFKGQYFHSRDYKNPEGFTGKRVIIIGIGNSGGDLAVEISQTAKQVFLSTRRGAWILNRVGDYGYPADVLFSSRLTHFIWKICGQSLANKYLEKKINQRFDHEMFGLKPKHRALSQHPTLNDDLPNRIISGLVKVKGNVKEFTETAAIFEDGSREDDIDAVIFATGYSFDFPFLEDSVKVVKNKISLYKKVFPPNLERPTLAIIGLIQPLGAIMPISELQGRWATQVFKGLKTLPSQSEMMAEISKAQEEIDKSLTMRKTSDKPKLKNILQIPDYLKTVKIINKESLRNCPGIKGPKET

SEQ ID NO: 5485 - protein, 278 aa, Homo sapiens
MTKKRIAVIGGGVSGLSSIKCCVEEGLEPVCFERTDDIGGLWRFQENPEEGRASIYKSVIINTSKEMMCFSDYPIPDHYPNFMHNAQVLEYFRMYAKEFDLLKYIRFKTTVCSVKKQPDFATSGQWEVVTESEGKKEMNVFDGVMVCTGHHTNAHLPLESFPGIEKFKGQYFHSRDYKNPEGFTGKRVIIIGIGNSGGDLAVEISQTAKQVFLSTRRGAWILNRVGDYGYPADVLFSSRLTHFIWKICGQSLANKYLEKKINQRFDHEMFGLKPKHRL

SEQ ID NO: 5486 - protein, 464 aa, Homo sapiens; identical to SEQ ID NO: 5484

SEQ ID NO: 5487 - protein, 376 aa, Homo sapiens
MQWTSLLLLAGLFSLSQAQYEDDPHWWFHYLRSQQSTYYDPYDPYPYETYEPYPYGVDEGPAYTYGSPSPPDPRDCPQECDCPPNFPTAMYCDNRNLKYLPFVPSRMKYVYFQNNQITSIQEGVFDNATGLLWIALHGNQITSDKVGRKVFSKLRHLERLYLDHNNLTRMPGPLPRSLRELHLDHNQISRVPNNALEGLENLTALYLQHNEIQEVGSSMRGLRSLILLDLSYNHLRKVPDGLPSALEQLYMEHNNVYTVPDSYFRGAPKLLYVRLSHNSLTNNGLASNTFNSSSLLELDLSYNQLQKIPPVNTNLENLYLQGNRINEFSISSFCTVVDVVNFSKLQVLRLDGNEIKRSAMPADAPLCLRLASLIEI

SEQ ID NO: 5488 - protein, 1103 aa, Homo sapiens
LRWTPLNSSTIIGYRITVVAAGEGIPIFEDFVDSSVGYYTVTGLEPGIDYDISVITLINGGESAPTTLTQQTAVPPPTDLRFTNIGPDTMRVTWAPPPSIDLTNFLVRYSPVKNEEDVAELSISPSDNAVVLTNLLPGTEYVVSVSSVYEQHESTPLRGRQKTGLDSPTGIDFSDITANSFTVHWIAPRATITGYRIRHHPEHFSGRPREDRVPHSRNSITLTNLTPGTEYVVSIVALNGREESPLLIGQQSTVSDVPRDLEVVAATPTSLLISWDAPAVTVRYYRITYGETGGNSPVQEFTVPGSKSTATISGLKPGVDYTITVYAVTGRGDSPASSKPISINYRTEIDKPSQMQVTDVQDNSISVKWLPSSSPVTGYRVTTTPKNGPGPTKTKTAGPDQTEMTIEGLQPTVEYVVSVYAQNPSGESQPLVQTAVTTIPAPTDLKFTQVTPTSLSAQWTPPNVQLTGYRVRVTPKEKTGPMKEINLAPDSSSVVVSGLMVATKYEVSVYALKDTLTSRPAQGVVTTLENVSPPRRARVTDATETTITISWRTKTETITGFQVDAVPANGQTPIQRTIKPDVRSYTITGLQPGTDYKIYLYTLNDNARSSPVVIDASTAIDAPSNLRFLATTPNSLLVSWQPPRARITGYIIKYEKPGSPPREVVPRPRPGVTEATITGLEPGTEYTIYVIALKNNQKSEPLIGRKKTDELPQLVTLPHPNLHGPEILDVPSTVQKTPFVTHPGYDTGNGIQLPGTSGQQPSVGQQMIFEEHGFRRTTPPTTATPIRHRPRPYPPNVGEEIQIGHIPREDVDYHLYPHGPGLNPNASTGQEALSQTTISWAPFQDTSEYIISCHPVGTDEEPLQFRVPGTSTSATLTGLTRGATYNVIVEALKDQQRHKVREEVVTVGNSVNEGLNQPTDDSCFDPYTVSHYAVGDEWERMSESGFKLLCQCLGFGSGHFRCDSSRWCHDNGVNYKIGEKWDRQGENGQMMSCTCLGNGKGEFKCDPHEATCYDDGKTYHVGEQWQKEYLGAICSCTCFGGQRGWRCDNCRRPGGEPSPEGTTGQSYNQYSQRYHQRTNTNVNCPIECFMPLDVQADREDSRE

SEQ ID NO: 5489 - protein, 2355 aa, Homo sapiens
MLRGPGPGLLLLAVQCLGTAVPSTGASKSKRQAQQMVQPQSPVAVSQSKPGCYDNGKHYQINQQWERTYLGNALVCTCYGGSRGFNCESKPEAEETCFDKYTGNTYRVGDTYERPKDSMIWDCTCIGAGRGRISCTIANRCHEGGQSYKIGDTWRRPHETGGYMLECVCLGNGKGEWTCKPIAEKCFDHAAGTSYVVGETWEKPYQGWMMVDCTCLGEGSGRITCTSRNRCNDQDTRTSYRIGDTWSKKDNRGNLLQCICTGNGRGEWKCERHTSVQTTSSGSGPFTDVRAAVYQPQPHPQPPPYGHCVTDSGVVYSVGMQWLKTQGNKQMLCTCLGNGVSCQETAVTQTYGGNSNGEPCVLPFTYNGRTFYSCTTEGRQDGHLWCSTTSNYEQDQKYSFCTDHTVLVQTRGGNSNGALCHFPFLYNNHNYTDCTSEGRRDNMKWCGTTQNYDADQKFGFCPMAAHEEICTTNEGVMYRIGDQWDKQHDMGHMMRCTCVGNGRGEWTCIAYSQLRDQCIVDDITYNVNDTFHKRHEEGHMLNCTCFGQGRGRWKCDPVDQCQDSETGTFYQIGDSWEKYVHGVRYQCYCYGRGIGEWHCQPLQTYPSSSGPVEVFITETPSQPNSHPIQWNAPQPSHISKYILRWRPKNSVGRWKEATIPGHLNSYTIKGLKPGVVYEGQLISIQQYGHQEVTRFDFTTTSTSTPVTSNTVTGETTPFSPLVATSESVTEITASSFVVSWVSASDTVSGFRVEYELSEEGDEPQYLDLPSTATSVNIPDLLPGRKYIVNVYQISEDGEQSLILSTSQTTAPDAPPDTTVDQVDDTSIVVRWSRPQAPITGYRIVYSPSVEGSSTELNLPETANSVTLSDLQPGVQYNITIYAVEENQESTPVVIQQETTGTPRSDTVPSPRDLQFVEVTDVKVTIMWTPPESAVTGYRVDVIPVNLPGEHGQRLPISRNTFAEVTGLSPGVTYYFKVFAVSHGRESKPLTAQQTTKLDAPTNLQFVNETDSTVLVRWTPPRAQITGYRLTVGLTRRGQPRQYNVGPSVSKYPLRNLQPASEYTVSLVAIKGNQESPKATGVFTTLQPGSSIPPYNTEVTETTIVITWTPAPRIGFKLGVRPSQGGEAPREVTSDSGSIVVSGLTPGVEYVYTIQVLRDGQERDAPIVNKVVTPLSPPTNLHLEANPDTGVLTVSWERSTTPDITGYRITTTPTNGQQGNSLEEVVHADQSSCTFDNLSPGLEYNVSVYTVKDDKESVPISDTIIPAVPPPTDLRFTNIGPDTMRVTWAPPPSIDLTNFLVRYSPVKNEEDVAELSISPSDNAVVLTNLLPGTEYVVSVSSVYEQHESTPLRGRQKTGLDSPTGIDFSDITANSFTVHWIAPRATITGYRIRHHPEHFSGRPREDRVPHSRNSITLTNLTPGTEYVVSIVALNGREESPLLIGQQSTVSDVPRDLEVVAATPTSLLISWDAPAVTVRYYRITYGETGGNSPVQEFTVPGSKSTATISGLKPGVDYTITVYAVTGRGDSPASSKPISINYRTEIDKPSQMQVTDVQDNSISVKWLPSSSPVTGYRVTTTPKNGPGPTKTKTAGPDQTEMTIEGLQPTVEYVVSVYAQNPSGESQPLVQTAVTNIDRPKGLAFTDVDVDSIKIAWESPQGQVSRYRVTYSSPEDGIHELFPAPDGEEDTAELQGLRPGSEYTVSVVALHDDMESQPLIGTQSTAIPAPTDLKFTQVTPTSLSAQWTPPNVQLTGYRVRVTPKEKTGPMKEINLAPDSSSVVVSGLMVATKYEVSVYALKDTLTSRPAQGVVTTLENVSPPRRARVTDATETTITISWRTKTETITGFQVDAVPANGQTPIQRTIKPDVRSYTITGLQPGTDYKIYLYTLNDNARSSPVVIDASTAIDAPSNLRFLATTPNSLLVSWQPPRARITGYIIKYEKPGSPPREVVPRPRPGVTEATITGLEPGTEYTIYVIALKNNQKSEPLIGRKKTDELPQLVTLPHPNLHGPEILDVPSTVQKTPFVTHPGYDTGNGIQLPGTSGQQPSVGQQMIFEEHGFRRTTPPTTATPIRHRPRPYPPNVGQEALSQTTISWAPFQDTSEYIISCHPVGTDEEPLQFRVPGTSTSATLTGLTRGATYNVIVEALKDQQRHKVREEVVTVGNSVNEGLNQPTDDSCFDPYTVSHYAVGDEWERMSESGFKLLCQCLGFGSGHFRCDSSRWCHDNGVNYKIGEKWDRQGENGQMMSCTCLGNGKGEFKCDPHEATCYDDGKTYHVGEQWQKEYLGAICSCTCFGGQRGWRCDNCRRPGGEPSPEGTTGQSYNQYSQRYHQRTNTNVNCPIECFMPLDVQADREDSRE

SEQ ID NO: 5490 - protein, 2477 aa, Homo sapiens
MLRGPGPGLLLLAVQCLGTAVPSTGASKSKRQAQQMVQPQSPVAVSQSKPGCYDNGKHYQINQQWERTYLGNALVCTCYGGSRGFNCESKPEAEETCFDKYTGNTYRVGDTYERPKDSMIWDCTCIGAGRGRISCTIANRCHEGGQSYKIGDTWRRPHETGGYMLECVCLGNGKGEWTCKPIAEKCFDHAAGTSYVVGETWEKPYQGWMMVDCTCLGEGSGRITCTSRNRCNDQDTRTSYRIGDTWSKKDNRGNLLQCICTGNGRGEWKCERHTSVQTTSSGSGPFTDVRAAVYQPQPHPQPPPYGHCVTDSGVVYSVGMQWLKTQGNKQMLCTCLGNGVSCQETAVTQTYGGNSNGEPCVLPFTYNGRTFYSCTTEGRQDGHLWCSTTSNYEQDQKYSFCTDHTVLVQTRGGNSNGALCHFPFLYNNHNYTDCTSEGRRDNMKWCGTTQNYDADQKFGFCPMAAHEEICTTNEGVMYRIGDQWDKQHDMGHMMRCTCVGNGRGEWTCIAYSQLRDQCIVDDITYNVNDTFHKRHEEGHMLNCTCFGQGRGRWKCDPVDQCQDSETGTFYQIGDSWEKYVHGVRYQCYCYGRGIGEWHCQPLQTYPSSSGPVEVFITETPSQPNSHPIQWNAPQPSHISKYILRWRPKNSVGRWKEATIPGHLNSYTIKGLKPGVVYEGQLISIQQYGHQEVTRFDFTTTSTSTPVTSNTVTGETTPFSPLVATSESVTEITASSFVVSWVSASDTVSGFRVEYELSEEGDEPQYLDLPSTATSVNIPDLLPGRKYIVNVYQISEDGEQSLILSTSQTTAPDAPPDTTVDQVDDTSIVVRWSRPQAPITGYRIVYSPSVEGSSTELNLPETANSVTLSDLQPGVQYNITIYAVEENQESTPVVIQQETTGTPRSDTVPSPRDLQFVEVTDVKVTIMWTPPESAVTGYRVDVIPVNLPGEHGQRLPISRNTFAEVTGLSPGVTYYFKVFAVSHGRESKPLTAQQTTKLDAPTNLQFVNETDSTVLVRWTPPRAQITGYRLTVGLTRRGQPRQYNVGPSVSKYPLRNLQPASEYTVSLVAIKGNQESPKATGVFTTLQPGSSIPPYNTEVTETTIVITWTPAPRIGFKLGVRPSQGGEAPREVTSDSGSIVVSGLTPGVEYVYTIQVLRDGQERDAPIVNKVVTPLSPPTNLHLEANPDTGVLTVSWERSTTPDITGYRITTTPTNGQQGNSLEEVVHADQSSCTFDNLSPGLEYNVSVYTVKDDKESVPISDTIIPEVPQLTDLSFVDITDSSIGLRWTPLNSSTIIGYRITVVAAGEGIPIFEDFVDSSVGYYTVTGLEPGIDYDISVITLINGGESAPTTLTQQTAVPPPTDLRFTNIGPDTMRVTWAPPPSIDLTNFLVRYSPVKNEEDVAELSISPSDNAVVLTNLLPGTEYVVSVSSVYEQHESTPLRGRQKTGLDSPTGIDFSDITANSFTVHWIAPRATITGYRIRHHPEHFSGRPREDRVPHSRNSITLTNLTPGTEYVVSIVALNGREESPLLIGQQSTVSDVPRDLEVVAATPTSLLISWDAPAVTVRYYRITYGETGGNSPVQEFTVPGSKSTATISGLKPGVDYTITVYAVTGRGDSPASSKPISINYRTEIDKPSQMQVTDVQDNSISVKWLPSSSPVTGYRVTTTPKNGPGPTKTKTAGPDQTEMTIEGLQPTVEYVVSVYAQNPSGESQPLVQTAVTNIDRPKGLAFTDVDVDSIKIAWESPQGQVSRYRVTYSSPEDGIHELFPAPDGEEDTAELQGLRPGSEYTVSVVALHDDMESQPLIGTQSTAIPAPTDLKFTQVTPTSLSAQWTPPNVQLTGYRVRVTPKEKTGPMKEINLAPDSSSVVVSGLMVATKYEVSVYALKDTLTSRPAQGVVTTLENVSPPRRARVTDATETTITISWRTKTETITGFQVDAVPANGQTPIQRTIKPDVRSYTITGLQPGTDYKIYLYTLNDNARSSPVVIDASTAIDAPSNLRFLATTPNSLLVSWQPPRARITGYIIKYEKPGSPPREVVPRPRPGVTEATITGLEPGTEYTIYVIALKNNQKSEPLIGRKKTDELPQLVTLPHPNLHGPEILDVPSTVQKTPFVTHPGYDTGNGIQLPGTSGQQPSVGQQMIFEEHGFRRTTPPTTATPIRHRPRPYPPNVGEEIQIGHIPREDVDYHLYPHGPGLNPNASTGQEALSQTTISWAPFQDTSEYIISCHPVGTDEEPLQFRVPGTSTSATLTGLTRGATYNVIVEALKDQQRHKVREEVVTVGNSVNEGLNQPTDDSCFDPYTVSHYAVGDEWERMSESGFKLLCQCLGFGSGHFRCDSSRWCHDNGVNYKIGEKWDRQGENGQMMSCTCLGNGKGEFKCDPHEATCYDDGKTYHVGEQWQKEYLGAICSCTCFGGQRGWRCDNCRRPGGEPSPEGTTGQSYNQYSQRYHQRTNTNVNCPIECFMPLDVQADREDSRE

SEQ ID NO: 5491 - protein, 2176 aa, Homo sapiens
MLRGPGPGLLLLAVQCLGTAVPSTGASKSKRQAQQMVQPQSPVAVSQSKPGCYDNGKHYQINQQWERTYLGNALVCTCYGGSRGFNCESKPEAEETCFDKYTGNTYRVGDTYERPKDSMIWDCTCIGAGRGRISCTIANRCHEGGQSYKIGDTWRRPHETGGYMLECVCLGNGKGEWTCKPIAEKCFDHAAGTSYVVGETWEKPYQGWMMVDCTCLGEGSGRITCTSRNRCNDQDTRTSYRIGDTWSKKDNRGNLLQCICTGNGRGEWKCERHTSVQTTSSGSGPFTDVRAAVYQPQPHPQPPPYGHCVTDSGVVYSVGMQWLKTQGNKQMLCTCLGNGVSCQETAVTQTYGGNSNGEPCVLPFTYNGRTFYSCTTEGRQDGHLWCSTTSNYEQDQKYSFCTDHTVLVQTRGGNSNGALCHFPFLYNNHNYTDCTSEGRRDNMKWCGTTQNYDADQKFGFCPMAAHEEICTTNEGVMYRIGDQWDKQHDMGHMMRCTCVGNGRGEWTCIAYSQLRDQCIVDDITYNVNDTFHKRHEEGHMLNCTCFGQGRGRWKCDPVDQCQDSETGTFYQIGDSWEKYVHGVRYQCYCYGRGIGEWHCQPLQTYPSSSGPVEVFITETPSQPNSHPIQWNAPQPSHISKYILRWRPKNSVGRWKEATIPGHLNSYTIKGLKPGVVYEGQLISIQQYGHQEVTRFDFTTTSTSTPVTSNTVTGETTPFSPLVATSESVTEITASSFVVSWVSASDTVSGFRVEYELSEEGDEPQYLDLPSTATSVNIPDLLPGRKYIVNVYQISEDGEQSLILSTSQTTAPDAPPDTTVDQVDDTSIVVRWSRPQAPITGYRIVYSPSVEGSSTELNLPETANSVTLSDLQPGVQYNITIYAVEENQESTPVVIQQETTGTPRSDTVPSPRDLQFVEVTDVKVTIMWTPPESAVTGYRVDVIPVNLPGEHGQRLPISRNTFAEVTGLSPGVTYYFKVFAVSHGRESKPLTAQQTTKLDAPTNLQFVNETDSTVLVRWTPPRAQITGYRLTVGLTRRGQPRQYNVGPSVSKYPLRNLQPASEYTVSLVAIKGNQESPKATGVFTTLQPGSSIPPYNTEVTETTIVITWTPAPRIGFKLGVRPSQGGEAPREVTSDSGSIVVSGLTPGVEYVYTIQVLRDGQERDAPIVNKVVTPLSPPTNLHLEANPDTGVLTVSWERSTTPDITGYRITTTPTNGQQGNSLEEVVHADQSSCTFDNLSPGLEYNVSVYTVKDDKESVPISDTIIPAVPPPTDLRFTNIGPDTMRVTWAPPPSIDLTNFLVRYSPVKNEEDVAELSISPSDNAVVLTNLLPGTEYVVSVSSVYEQHESTPLRGRQKTGLDSPTGIDFSDITANSFTVHWIAPRATITGYRIRHHPEHFSGRPREDRVPHSRNSITLTNLTPGTEYVVSIVALNGREESPLLIGQQSTVSDVPRDLEVVAATPTSLLISWDAPAVTVRYYRITYGETGGNSPVQEFTVPGSKSTATISGLKPGVDYTITVYAVTGRGDSPASSKPISINYRTEIDKPSQMQVTDVQDNSISVKWLPSSSPVTGYRVTTTPKNGPGPTKTKTAGPDQTEMTIEGLQPTVEYVVSVYAQNPSGESQPLVQTAVTTIPAPTDLKFTQVTPTSLSAQWTPPNVQLTGYRVRVTPKEKTGPMKEINLAPDSSSVVVSGLMVATKYEVSVYALKDTLTSRPAQGVVTTLENVSPPRRARVTDATETTITISWRTKTETITGFQVDAVPANGQTPIQRTIKPDVRSYTITGLQPGTDYKIYLYTLNDNARSSPVVIDASTAIDAPSNLRFLATTPNSLLVSWQPPRARITGYIIKYEKPGSPPREVVPRPRPGVTEATITGLEPGTEYTIYVIALKNNQKSEPLIGRKKTGQEALSQTTISWAPFQDTSEYIISCHPVGTDEEPLQFRVPGTSTSATLTGLTRGATYNVIVEALKDQQRHKVREEVVTVGNSVNEGLNQPTDDSCFDPYTVSHYAVGDEWERMSESGFKLLCQCLGFGSGHFRCDSSRWCHDNGVNYKIGEKWDRQGENGQMMSCTCLGNGKGEFKCDPHEATCYDDGKTYHVGEQWQKEYLGAICSCTCFGGQRGWRCDNCRRPGGEPSPEGTTGQSYNQYSQRYHQRTNTNVNCPIECFMPLDVQADREDSRE

SEQ ID NO: 5492 - protein, 2386 aa, Homo sapiens
MLRGPGPGLLLLAVQCLGTAVPSTGASKSKRQAQQMVQPQSPVAVSQSKPGCYDNGKHYQINQQWERTYLGNALVCTCYGGSRGFNCESKPEAEETCFDKYTGNTYRVGDTYERPKDSMIWDCTCIGAGRGRISCTIANRCHEGGQSYKIGDTWRRPHETGGYMLECVCLGNGKGEWTCKPIAEKCFDHAAGTSYVVGETWEKPYQGWMMVDCTCLGEGSGRITCTSRNRCNDQDTRTSYRIGDTWSKKDNRGNLLQCICTGNGRGEWKCERHTSVQTTSSGSGPFTDVRAAVYQPQPHPQPPPYGHCVTDSGVVYSVGMQWLKTQGNKQMLCTCLGNGVSCQETAVTQTYGGNSNGEPCVLPFTYNGRTFYSCTTEGRQDGHLWCSTTSNYEQDQKYSFCTDHTVLVQTRGGNSNGALCHFPFLYNNHNYTDCTSEGRRDNMKWCGTTQNYDADQKFGFCPMAAHEEICTTNEGVMYRIGDQWDKQHDMGHMMRCTCVGNGRGEWTCIAYSQLRDQCIVDDITYNVNDTFHKRHEEGHMLNCTCFGQGRGRWKCDPVDQCQDSETGTFYQIGDSWEKYVHGVRYQCYCYGRGIGEWHCQPLQTYPSSSGPVEVFITETPSQPNSHPIQWNAPQPSHISKYILRWRPKNSVGRWKEATIPGHLNSYTIKGLKPGVVYEGQLISIQQYGHQEVTRFDFTTTSTSTPVTSNTVTGETTPFSPLVATSESVTEITASSFVVSWVSASDTVSGFRVEYELSEEGDEPQYLDLPSTATSVNIPDLLPGRKYIVNVYQISEDGEQSLILSTSQTTAPDAPPDTTVDQVDDTSIVVRWSRPQAPITGYRIVYSPSVEGSSTELNLPETANSVTLSDLQPGVQYNITIYAVEENQESTPVVIQQETTGTPRSDTVPSPRDLQFVEVTDVKVTIMWTPPESAVTGYRVDVIPVNLPGEHGQRLPISRNTFAEVTGLSPGVTYYFKVFAVSHGRESKPLTAQQTTKLDAPTNLQFVNETDSTVLVRWTPPRAQITGYRLTVGLTRRGQPRQYNVGPSVSKYPLRNLQPASEYTVSLVAIKGNQESPKATGVFTTLQPGSSIPPYNTEVTETTIVITWTPAPRIGFKLGVRPSQGGEAPREVTSDSGSIVVSGLTPGVEYVYTIQVLRDGQERDAPIVNKVVTPLSPPTNLHLEANPDTGVLTVSWERSTTPDITGYRITTTPTNGQQGNSLEEVVHADQSSCTFDNLSPGLEYNVSVYTVKDDKESVPISDTIIPAVPPPTDLRFTNIGPDTMRVTWAPPPSIDLTNFLVRYSPVKNEEDVAELSISPSDNAVVLTNLLPGTEYVVSVSSVYEQHESTPLRGRQKTGLDSPTGIDFSDITANSFTVHWIAPRATITGYRIRHHPEHFSGRPREDRVPHSRNSITLTNLTPGTEYVVSIVALNGREESPLLIGQQSTVSDVPRDLEVVAATPTSLLISWDAPAVTVRYYRITYGETGGNSPVQEFTVPGSKSTATISGLKPGVDYTITVYAVTGRGDSPASSKPISINYRTEIDKPSQMQVTDVQDNSISVKWLPSSSPVTGYRVTTTPKNGPGPTKTKTAGPDQTEMTIEGLQPTVEYVVSVYAQNPSGESQPLVQTAVTNIDRPKGLAFTDVDVDSIKIAWESPQGQVSRYRVTYSSPEDGIHELFPAPDGEEDTAELQGLRPGSEYTVSVVALHDDMESQPLIGTQSTAIPAPTDLKFTQVTPTSLSAQWTPPNVQLTGYRVRVTPKEKTGPMKEINLAPDSSSVVVSGLMVATKYEVSVYALKDTLTSRPAQGVVTTLENVSPPRRARVTDATETTITISWRTKTETITGFQVDAVPANGQTPIQRTIKPDVRSYTITGLQPGTDYKIYLYTLNDNARSSPVVIDASTAIDAPSNLRFLATTPNSLLVSWQPPRARITGYIIKYEKPGSPPREVVPRPRPGVTEATITGLEPGTEYTIYVIALKNNQKSEPLIGRKKTDELPQLVTLPHPNLHGPEILDVPSTVQKTPFVTHPGYDTGNGIQLPGTSGQQPSVGQQMIFEEHGFRRTTPPTTATPIRHRPRPYPPNVGEEIQIGHIPREDVDYHLYPHGPGLNPNASTGQEALSQTTISWAPFQDTSEYIISCHPVGTDEEPLQFRVPGTSTSATLTGLTRGATYNVIVEALKDQQRHKVREEVVTVGNSVNEGLNQPTDDSCFDPYTVSHYAVGDEWERMSESGFKLLCQCLGFGSGHFRCDSSRWCHDNGVNYKIGEKWDRQGENGQMMSCTCLGNGKGEFKCDPHEATCYDDGKTYHVGEQWQKEYLGAICSCTCFGGQRGWRCDNCRRPGGEPSPEGTTGQSYNQYSQRYHQRTNTNVNCPIECFMPLDVQADREDSRE

SEQ ID NO: 5493 - protein, 2296 aa, Homo sapiens
MLRGPGPGLLLLAVQCLGTAVPSTGASKSKRQAQQMVQPQSPVAVSQSKPGCYDNGKHYQINQQWERTYLGNALVCTCYGGSRGFNCESKPEAEETCFDKYTGNTYRVGDTYERPKDSMIWDCTCIGAGRGRISCTIANRCHEGGQSYKIGDTWRRPHETGGYMLECVCLGNGKGEWTCKPIAEKCFDHAAGTSYVVGETWEKPYQGWMMVDCTCLGEGSGRITCTSRNRCNDQDTRTSYRIGDTWSKKDNRGNLLQCICTGNGRGEWKCERHTSVQTTSSGSGPFTDVRAAVYQPQPHPQPPPYGHCVTDSGVVYSVGMQWLKTQGNKQMLCTCLGNGVSCQETAVTQTYGGNSNGEPCVLPFTYNGRTFYSCTTEGRQDGHLWCSTTSNYEQDQKYSFCTDHTVLVQTRGGNSNGALCHFPFLYNNHNYTDCTSEGRRDNMKWCGTTQNYDADQKFGFCPMAAHEEICTTNEGVMYRIGDQWDKQHDMGHMMRCTCVGNGRGEWTCIAYSQLRDQCIVDDITYNVNDTFHKRHEEGHMLNCTCFGQGRGRWKCDPVDQCQDSETGTFYQIGDSWEKYVHGVRYQCYCYGRGIGEWHCQPLQTYPSSSGPVEVFITETPSQPNSHPIQWNAPQPSHISKYILRWRPKNSVGRWKEATIPGHLNSYTIKGLKPGVVYEGQLISIQQYGHQEVTRFDFTTTSTSTPVTSNTVTGETTPFSPLVATSESVTEITASSFVVSWVSASDTVSGFRVEYELSEEGDEPQYLDLPSTATSVNIPDLLPGRKYIVNVYQISEDGEQSLILSTSQTTAPDAPPDTTVDQVDDTSIVVRWSRPQAPITGYRIVYSPSVEGSSTELNLPETANSVTLSDLQPGVQYNITIYAVEENQESTPVVIQQETTGTPRSDTVPSPRDLQFVEVTDVKVTIMWTPPESAVTGYRVDVIPVNLPGEHGQRLPISRNTFAEVTGLSPGVTYYFKVFAVSHGRESKPLTAQQTTKLDAPTNLQFVNETDSTVLVRWTPPRAQITGYRLTVGLTRRGQPRQYNVGPSVSKYPLRNLQPASEYTVSLVAIKGNQESPKATGVFTTLQPGSSIPPYNTEVTETTIVITWTPAPRIGFKLGVRPSQGGEAPREVTSDSGSIVVSGLTPGVEYVYTIQVLRDGQERDAPIVNKVVTPLSPPTNLHLEANPDTGVLTVSWERSTTPDITGYRITTTPTNGQQGNSLEEVVHADQSSCTFDNLSPGLEYNVSVYTVKDDKESVPISDTIIPAVPPPTDLRFTNIGPDTMRVTWAPPPSIDLTNFLVRYSPVKNEEDVAELSISPSDNAVVLTNLLPGTEYVVSVSSVYEQHESTPLRGRQKTGLDSPTGIDFSDITANSFTVHWIAPRATITGYRIRHHPEHFSGRPREDRVPHSRNSITLTNLTPGTEYVVSIVALNGREESPLLIGQQSTVSDVPRDLEVVAATPTSLLISWDAPAVTVRYYRITYGETGGNSPVQEFTVPGSKSTATISGLKPGVDYTITVYAVTGRGDSPASSKPISINYRTEIDKPSQMQVTDVQDNSISVKWLPSSSPVTGYRVTTTPKNGPGPTKTKTAGPDQTEMTIEGLQPTVEYVVSVYAQNPSGESQPLVQTAVTTIPAPTDLKFTQVTPTSLSAQWTPPNVQLTGYRVRVTPKEKTGPMKEINLAPDSSSVVVSGLMVATKYEVSVYALKDTLTSRPAQGVVTTLENVSPPRRARVTDATETTITISWRTKTETITGFQVDAVPANGQTPIQRTIKPDVRSYTITGLQPGTDYKIYLYTLNDNARSSPVVIDASTAIDAPSNLRFLATTPNSLLVSWQPPRARITGYIIKYEKPGSPPREVVPRPRPGVTEATITGLEPGTEYTIYVIALKNNQKSEPLIGRKKTDELPQLVTLPHPNLHGPEILDVPSTVQKTPFVTHPGYDTGNGIQLPGTSGQQPSVGQQMIFEEHGFRRTTPPTTATPIRHRPRPYPPNVGEEIQIGHIPREDVDYHLYPHGPGLNPNASTGQEALSQTTISWAPFQDTSEYIISCHPVGTDEEPLQFRVPGTSTSATLTGLTRGATYNVIVEALKDQQRHKVREEVVTVGNSVNEGLNQPTDDSCFDPYTVSHYAVGDEWERMSESGFKLLCQCLGFGSGHFRCDSSRWCHDNGVNYKIGEKWDRQGENGQMMSCTCLGNGKGEFKCDPHEATCYDDGKTYHVGEQWQKEYLGAICSCTCFGGQRGWRCDNCRRPGGEPSPEGTTGQSYNQYSQRYHQRTNTNVNCPIECFMPLDVQADREDSRE

SEQ ID NO: 5494 - protein, 2446 aa, Homo sapiens
MLRGPGPGLLLLAVQCLGTAVPSTGASKSKRQAQQMVQPQSPVAVSQSKPGCYDNGKHYQINQQWERTYLGNALVCTCYGGSRGFNCESKPEAEETCFDKYTGNTYRVGDTYERPKDSMIWDCTCIGAGRGRISCTIANRCHEGGQSYKIGDTWRRPHETGGYMLECVCLGNGKGEWTCKPIAEKCFDHAAGTSYVVGETWEKPYQGWMMVDCTCLGEGSGRITCTSRNRCNDQDTRTSYRIGDTWSKKDNRGNLLQCICTGNGRGEWKCERHTSVQTTSSGSGPFTDVRAAVYQPQPHPQPPPYGHCVTDSGVVYSVGMQWLKTQGNKQMLCTCLGNGVSCQETAVTQTYGGNSNGEPCVLPFTYNGRTFYSCTTEGRQDGHLWCSTTSNYEQDQKYSFCTDHTVLVQTRGGNSNGALCHFPFLYNNHNYTDCTSEGRRDNMKWCGTTQNYDADQKFGFCPMAAHEEICTTNEGVMYRIGDQWDKQHDMGHMMRCTCVGNGRGEWTCIAYSQLRDQCIVDDITYNVNDTFHKRHEEGHMLNCTCFGQGRGRWKCDPVDQCQDSETGTFYQIGDSWEKYVHGVRYQCYCYGRGIGEWHCQPLQTYPSSSGPVEVFITETPSQPNSHPIQWNAPQPSHISKYILRWRPKNSVGRWKEATIPGHLNSYTIKGLKPGVVYEGQLISIQQYGHQEVTRFDFTTTSTSTPVTSNTVTGETTPFSPLVATSESVTEITASSFVVSWVSASDTVSGFRVEYELSEEGDEPQYLDLPSTATSVNIPDLLPGRKYIVNVYQISEDGEQSLILSTSQTTAPDAPPDTTVDQVDDTSIVVRWSRPQAPITGYRIVYSPSVEGSSTELNLPETANSVTLSDLQPGVQYNITIYAVEENQESTPVVIQQETTGTPRSDTVPSPRDLQFVEVTDVKVTIMWTPPESAVTGYRVDVIPVNLPGEHGQRLPISRNTFAEVTGLSPGVTYYFKVFAVSHGRESKPLTAQQTTKLDAPTNLQFVNETDSTVLVRWTPPRAQITGYRLTVGLTRRGQPRQYNVGPSVSKYPLRNLQPASEYTVSLVAIKGNQESPKATGVFTTLQPGSSIPPYNTEVTETTIVITWTPAPRIGFKLGVRPSQGGEAPREVTSDSGSIVVSGLTPGVEYVYTIQVLRDGQERDAPIVNKVVTPLSPPTNLHLEANPDTGVLTVSWERSTTPDITGYRITTTPTNGQQGNSLEEVVHADQSSCTFDNLSPGLEYNVSVYTVKDDKESVPISDTIIPEVPQLTDLSFVDITDSSIGLRWTPLNSSTIIGYRITVVAAGEGIPIFEDFVDSSVGYYTVTGLEPGIDYDISVITLINGGESAPTTLTQQTAVPPPTDLRFTNIGPDTMRVTWAPPPSIDLTNFLVRYSPVKNEEDVAELSISPSDNAVVLTNLLPGTEYVVSVSSVYEQHESTPLRGRQKTGLDSPTGIDFSDITANSFTVHWIAPRATITGYRIRHHPEHFSGRPREDRVPHSRNSITLTNLTPGTEYVVSIVALNGREESPLLIGQQSTVSDVPRDLEVVAATPTSLLISWDAPAVTVRYYRITYGETGGNSPVQEFTVPGSKSTATISGLKPGVDYTITVYAVTGRGDSPASSKPISINYRTEIDKPSQMQVTDVQDNSISVKWLPSSSPVTGYRVTTTPKNGPGPTKTKTAGPDQTEMTIEGLQPTVEYVVSVYAQNPSGESQPLVQTAVTNIDRPKGLAFTDVDVDSIKIAWESPQGQVSRYRVTYSSPEDGIHELFPAPDGEEDTAELQGLRPGSEYTVSVVALHDDMESQPLIGTQSTAIPAPTDLKFTQVTPTSLSAQWTPPNVQLTGYRVRVTPKEKTGPMKEINLAPDSSSVVVSGLMVATKYEVSVYALKDTLTSRPAQGVVTTLENVSPPRRARVTDATETTITISWRTKTETITGFQVDAVPANGQTPIQRTIKPDVRSYTITGLQPGTDYKIYLYTLNDNARSSPVVIDASTAIDAPSNLRFLATTPNSLLVSWQPPRARITGYIIKYEKPGSPPREVVPRPRPGVTEATITGLEPGTEYTIYVIALKNNQKSEPLIGRKKTDELPQLVTLPHPNLHGPEILDVPSTVQKTPFVTHPGYDTGNGIQLPGTSGQQPSVGQQMIFEEHGFRRTTPPTTATPIRHRPRPYPPNVGQEALSQTTISWAPFQDTSEYIISCHPVGTDEEPLQFRVPGTSTSATLTGLTRGATYNVIVEALKDQQRHKVREEVVTVGNSVNEGLNQPTDDSCFDPYTVSHYAVGDEWERMSESGFKLLCQCLGFGSGHFRCDSSRWCHDNGVNYKIGEKWDRQGENGQMMSCTCLGNGKGEFKCDPHEATCYDDGKTYHVGEQWQKEYLGAICSCTCFGGQRGWRCDNCRRPGGEPSPEGTTGQSYNQYSQRYHQRTNTNVNCPIECFMPLDVQADREDSRE

SEQ ID NO: 5495 - protein, 2330 aa, Homo sapiens
MLRGPGPGLLLLAVQCLGTAVPSTGASKSKRQAQQMVQPQSPVAVSQSKPGCYDNGKHYQINQQWERTYLGNALVCTCYGGSRGFNCESKPEAEETCFDKYTGNTYRVGDTYERPKDSMIWDCTCIGAGRGRISCTIANRCHEGGQSYKIGDTWRRPHETGGYMLECVCLGNGKGEWTCKPIAEKCFDHAAGTSYVVGETWEKPYQGWMMVDCTCLGEGSGRITCTSRNRCNDQDTRTSYRIGDTWSKKDNRGNLLQCICTGNGRGEWKCERHTSVQTTSSGSGPFTDVRAAVYQPQPHPQPPPYGHCVTDSGVVYSVGMQWLKTQGNKQMLCTCLGNGVSCQETAVTQTYGGNSNGEPCVLPFTYNGRTFYSCTTEGRQDGHLWCSTTSNYEQDQKYSFCTDHTVLVQTRGGNSNGALCHFPFLYNNHNYTDCTSEGRRDNMKWCGTTQNYDADQKFGFCPMAAHEEICTTNEGVMYRIGDQWDKQHDMGHMMRCTCVGNGRGEWTCIAYSQLRDQCIVDDITYNVNDTFHKRHEEGHMLNCTCFGQGRGRWKCDPVDQCQDSETGTFYQIGDSWEKYVHGVRYQCYCYGRGIGEWHCQPLQTYPSSSGPVEVFITETPSQPNSHPIQWNAPQPSHISKYILRWRPKNSVGRWKEATIPGHLNSYTIKGLKPGVVYEGQLISIQQYGHQEVTRFDFTTTSTSTPVTSNTVTGETTPFSPLVATSESVTEITASSFVVSWVSASDTVSGFRVEYELSEEGDEPQYLDLPSTATSVNIPDLLPGRKYIVNVYQISEDGEQSLILSTSQTTAPDAPPDTTVDQVDDTSIVVRWSRPQAPITGYRIVYSPSVEGSSTELNLPETANSVTLSDLQPGVQYNITIYAVEENQESTPVVIQQETTGTPRSDTVPSPRDLQFVEVTDVKVTIMWTPPESAVTGYRVDVIPVNLPGEHGQRLPISRNTFAEVTGLSPGVTYYFKVFAVSHGRESKPLTAQQTTKLDAPTNLQFVNETDSTVLVRWTPPRAQITGYRLTVGLTRRGQPRQYNVGPSVSKYPLRNLQPASEYTVSLVAIKGNQESPKATGVFTTLQPGSSIPPYNTEVTETTIVITWTPAPRIGFKLGVRPSQGGEAPREVTSDSGSIVVSGLTPGVEYVYTIQVLRDGQERDAPIVNKVVTPLSPPTNLHLEANPDTGVLTVSWERSTTPDITGYRITTTPTNGQQGNSLEEVVHADQSSCTFDNLSPGLEYNVSVYTVKDDKESVPISDTIIPAVPPPTDLRFTNIGPDTMRVTWAPPPSIDLTNFLVRYSPVKNEEDVAELSISPSDNAVVLTNLLPGTEYVVSVSSVYEQHESTPLRGRQKTGLDSPTGIDFSDITANSFTVHWIAPRATITGYRIRHHPEHFSGRPREDRVPHSRNSITLTNLTPGTEYVVSIVALNGREESPLLIGQQSTVSDVPRDLEVVAATPTSLLISWDAPAVTVRYYRITYGETGGNSPVQEFTVPGSKSTATISGLKPGVDYTITVYAVTGRGDSPASSKPISINYRTEIDKPSQMQVTDVQDNSISVKWLPSSSPVTGYRVTTTPKNGPGPTKTKTAGPDQTEMTIEGLQPTVEYVVSVYAQNPSGESQPLVQTAVTNIDRPKGLAFTDVDVDSIKIAWESPQGQVSRYRVTYSSPEDGIHELFPAPDGEEDTAELQGLRPGSEYTVSVVALHDDMESQPLIGTQSTAIPAPTDLKFTQVTPTSLSAQWTPPNVQLTGYRVRVTPKEKTGPMKEINLAPDSSSVVVSGLMVATKYEVSVYALKDTLTSRPAQGVVTTLENVSPPRRARVTDATETTITISWRTKTETITGFQVDAVPANGQTPIQRTIKPDVRSYTITGLQPGTDYKIYLYTLNDNARSSPVVIDASTAIDAPSNLRFLATTPNSLLVSWQPPRARITGYIIKYEKPGSPPREVVPRPRPGVTEATITGLEPGTEYTIYVIALKNNQKSEPLIGRKKTVQKTPFVTHPGYDTGNGIQLPGTSGQQPSVGQQMIFEEHGFRRTTPPTTATPIRHRPRPYPPNVGQEALSQTTISWAPFQDTSEYIISCHPVGTDEEPLQFRVPGTSTSATLTGLTRGATYNVIVEALKDQQRHKVREEVVTVGNSVNEGLNQPTDDSCFDPYTVSHYAVGDEWERMSESGFKLLCQCLGFGSGHFRCDSSRWCHDNGVNYKIGEKWDRQGENGQMMSCTCLGNGKGEFKCDPHEATCYDDGKTYHVGEQWQKEYLGAICSCTCFGGQRGWRCDNCRRPGGEPSPEGTTGQSYNQYSQRYHQRTNTNVNCPIECFMPLDVQADREDSRE

SEQ ID NO: 5496 - protein, 2240 aa, Homo sapiens
MLRGPGPGLLLLAVQCLGTAVPSTGASKSKRQAQQMVQPQSPVAVSQSKPGCYDNGKHYQINQQWERTYLGNALVCTCYGGSRGFNCESKPEAEETCFDKYTGNTYRVGDTYERPKDSMIWDCTCIGAGRGRISCTIANRCHEGGQSYKIGDTWRRPHETGGYMLECVCLGNGKGEWTCKPIAEKCFDHAAGTSYVVGETWEKPYQGWMMVDCTCLGEGSGRITCTSRNRCNDQDTRTSYRIGDTWSKKDNRGNLLQCICTGNGRGEWKCERHTSVQTTSSGSGPFTDVRAAVYQPQPHPQPPPYGHCVTDSGVVYSVGMQWLKTQGNKQMLCTCLGNGVSCQETAVTQTYGGNSNGEPCVLPFTYNGRTFYSCTTEGRQDGHLWCSTTSNYEQDQKYSFCTDHTVLVQTRGGNSNGALCHFPFLYNNHNYTDCTSEGRRDNMKWCGTTQNYDADQKFGFCPMAAHEEICTTNEGVMYRIGDQWDKQHDMGHMMRCTCVGNGRGEWTCIAYSQLRDQCIVDDITYNVNDTFHKRHEEGHMLNCTCFGQGRGRWKCDPVDQCQDSETGTFYQIGDSWEKYVHGVRYQCYCYGRGIGEWHCQPLQTYPSSSGPVEVFITETPSQPNSHPIQWNAPQPSHISKYILRWRPKNSVGRWKEATIPGHLNSYTIKGLKPGVVYEGQLISIQQYGHQEVTRFDFTTTSTSTPVTSNTVTGETTPFSPLVATSESVTEITASSFVVSWVSASDTVSGFRVEYELSEEGDEPQYLDLPSTATSVNIPDLLPGRKYIVNVYQISEDGEQSLILSTSQTTAPDAPPDTTVDQVDDTSIVVRWSRPQAPITGYRIVYSPSVEGSSTELNLPETANSVTLSDLQPGVQYNITIYAVEENQESTPVVIQQETTGTPRSDTVPSPRDLQFVEVTDVKVTIMWTPPESAVTGYRVDVIPVNLPGEHGQRLPISRNTFAEVTGLSPGVTYYFKVFAVSHGRESKPLTAQQTTKLDAPTNLQFVNETDSTVLVRWTPPRAQITGYRLTVGLTRRGQPRQYNVGPSVSKYPLRNLQPASEYTVSLVAIKGNQESPKATGVFTTLQPGSSIPPYNTEVTETTIVITWTPAPRIGFKLGVRPSQGGEAPREVTSDSGSIVVSGLTPGVEYVYTIQVLRDGQERDAPIVNKVVTPLSPPTNLHLEANPDTGVLTVSWERSTTPDITGYRITTTPTNGQQGNSLEEVVHADQSSCTFDNLSPGLEYNVSVYTVKDDKESVPISDTIIPAVPPPTDLRFTNIGPDTMRVTWAPPPSIDLTNFLVRYSPVKNEEDVAELSISPSDNAVVLTNLLPGTEYVVSVSSVYEQHESTPLRGRQKTGLDSPTGIDFSDITANSFTVHWIAPRATITGYRIRHHPEHFSGRPREDRVPHSRNSITLTNLTPGTEYVVSIVALNGREESPLLIGQQSTVSDVPRDLEVVAATPTSLLISWDAPAVTVRYYRITYGETGGNSPVQEFTVPGSKSTATISGLKPGVDYTITVYAVTGRGDSPASSKPISINYRTEIDKPSQMQVTDVQDNSISVKWLPSSSPVTGYRVTTTPKNGPGPTKTKTAGPDQTEMTIEGLQPTVEYVVSVYAQNPSGESQPLVQTAVTTIPAPTDLKFTQVTPTSLSAQWTPPNVQLTGYRVRVTPKEKTGPMKEINLAPDSSSVVVSGLMVATKYEVSVYALKDTLTSRPAQGVVTTLENVSPPRRARVTDATETTITISWRTKTETITGFQVDAVPANGQTPIQRTIKPDVRSYTITGLQPGTDYKIYLYTLNDNARSSPVVIDASTAIDAPSNLRFLATTPNSLLVSWQPPRARITGYIIKYEKPGSPPREVVPRPRPGVTEATITGLEPGTEYTIYVIALKNNQKSEPLIGRKKTVQKTPFVTHPGYDTGNGIQLPGTSGQQPSVGQQMIFEEHGFRRTTPPTTATPIRHRPRPYPPNVGQEALSQTTISWAPFQDTSEYIISCHPVGTDEEPLQFRVPGTSTSATLTGLTRGATYNVIVEALKDQQRHKVREEVVTVGNSVNEGLNQPTDDSCFDPYTVSHYAVGDEWERMSESGFKLLCQCLGFGSGHFRCDSSRWCHDNGVNYKIGEKWDRQGENGQMMSCTCLGNGKGEFKCDPHEATCYDDGKTYHVGEQWQKEYLGAICSCTCFGGQRGWRCDNCRRPGGEPSPEGTTGQSYNQYSQRYHQRTNTNVNCPIECFMPLDVQADREDSRE

SEQ ID NO: 5497 - protein, 657 aa, Homo sapiens
MLRGPGPGLLLLAVQCLGTAVPSTGASKSKRQAQQMVQPQSPVAVSQSKPGCYDNGKHYQINQQWERTYLGNALVCTCYGGSRGFNCESKPEAEETCFDKYTGNTYRVGDTYERPKDSMIWDCTCIGAGRGRISCTIANRCHEGGQSYKIGDTWRRPHETGGYMLECVCLGNGKGEWTCKPIAEKCFDHAAGTSYVVGETWEKPYQGWMMVDCTCLGEGSGRITCTSRNRCNDQDTRTSYRIGDTWSKKDNRGNLLQCICTGNGRGEWKCERHTSVQTTSSGSGPFTDVRAAVYQPQPHPQPPPYGHCVTDSGVVYSVGMQWLKTQGNKQMLCTCLGNGVSCQETAVTQTYGGNSNGEPCVLPFTYNGRTFYSCTTEGRQDGHLWCSTTSNYEQDQKYSFCTDHTVLVQTRGGNSNGALCHFPFLYNNHNYTDCTSEGRRDNMKWCGTTQNYDADQKFGFCPMAAHEEICTTNEGVMYRIGDQWDKQHDMGHMMRCTCVGNGRGEWTCIAYSQLRDQCIVDDITYNVNDTFHKRHEEGHMLNCTCFGQGRGRWKCDPVDQCQDSETGTFYQIGDSWEKYVHGVRYQCYCYGRGIGEWHCQPLQTYPSSSGPVEVFITETPSQPNSHPIQWNAPQPSHISKYILRWRPVSIPPRNLGY

SEQ ID NO: 5498 - protein, 2267 aa, Homo sapiens
MLRGPGPGLLLLAVQCLGTAVPSTGASKSKRQAQQMVQPQSPVAVSQSKPGCYDNGKHYQINQQWERTYLGNALVCTCYGGSRGFNCESKPEAEETCFDKYTGNTYRVGDTYERPKDSMIWDCTCIGAGRGRISCTIANRCHEGGQSYKIGDTWRRPHETGGYMLECVCLGNGKGEWTCKPIAEKCFDHAAGTSYVVGETWEKPYQGWMMVDCTCLGEGSGRITCTSRNRCNDQDTRTSYRIGDTWSKKDNRGNLLQCICTGNGRGEWKCERHTSVQTTSSGSGPFTDVRAAVYQPQPHPQPPPYGHCVTDSGVVYSVGMQWLKTQGNKQMLCTCLGNGVSCQETAVTQTYGGNSNGEPCVLPFTYNGRTFYSCTTEGRQDGHLWCSTTSNYEQDQKYSFCTDHTVLVQTRGGNSNGALCHFPFLYNNHNYTDCTSEGRRDNMKWCGTTQNYDADQKFGFCPMAAHEEICTTNEGVMYRIGDQWDKQHDMGHMMRCTCVGNGRGEWTCIAYSQLRDQCIVDDITYNVNDTFHKRHEEGHMLNCTCFGQGRGRWKCDPVDQCQDSETGTFYQIGDSWEKYVHGVRYQCYCYGRGIGEWHCQPLQTYPSSSGPVEVFITETPSQPNSHPIQWNAPQPSHISKYILRWRPKNSVGRWKEATIPGHLNSYTIKGLKPGVVYEGQLISIQQYGHQEVTRFDFTTTSTSTPVTSNTVTGETTPFSPLVATSESVTEITASSFVVSWVSASDTVSGFRVEYELSEEGDEPQYLDLPSTATSVNIPDLLPGRKYIVNVYQISEDGEQSLILSTSQTTAPDAPPDTTVDQVDDTSIVVRWSRPQAPITGYRIVYSPSVEGSSTELNLPETANSVTLSDLQPGVQYNITIYAVEENQESTPVVIQQETTGTPRSDTVPSPRDLQFVEVTDVKVTIMWTPPESAVTGYRVDVIPVNLPGEHGQRLPISRNTFAEVTGLSPGVTYYFKVFAVSHGRESKPLTAQQTTKLDAPTNLQFVNETDSTVLVRWTPPRAQITGYRLTVGLTRRGQPRQYNVGPSVSKYPLRNLQPASEYTVSLVAIKGNQESPKATGVFTTLQPGSSIPPYNTEVTETTIVITWTPAPRIGFKLGVRPSQGGEAPREVTSDSGSIVVSGLTPGVEYVYTIQVLRDGQERDAPIVNKVVTPLSPPTNLHLEANPDTGVLTVSWERSTTPDITGYRITTTPTNGQQGNSLEEVVHADQSSCTFDNLSPGLEYNVSVYTVKDDKESVPISDTIIPEVPQLTDLSFVDITDSSIGLRWTPLNSSTIIGYRITVVAAGEGIPIFEDFVDSSVGYYTVTGLEPGIDYDISVITLINGGESAPTTLTQQTAVPPPTDLRFTNIGPDTMRVTWAPPPSIDLTNFLVRYSPVKNEEDVAELSISPSDNAVVLTNLLPGTEYVVSVSSVYEQHESTPLRGRQKTGLDSPTGIDFSDITANSFTVHWIAPRATITGYRIRHHPEHFSGRPREDRVPHSRNSITLTNLTPGTEYVVSIVALNGREESPLLIGQQSTVSDVPRDLEVVAATPTSLLISWDAPAVTVRYYRITYGETGGNSPVQEFTVPGSKSTATISGLKPGVDYTITVYAVTGRGDSPASSKPISINYRTEIDKPSQMQVTDVQDNSISVKWLPSSSPVTGYRVTTTPKNGPGPTKTKTAGPDQTEMTIEGLQPTVEYVVSVYAQNPSGESQPLVQTAVTTIPAPTDLKFTQVTPTSLSAQWTPPNVQLTGYRVRVTPKEKTGPMKEINLAPDSSSVVVSGLMVATKYEVSVYALKDTLTSRPAQGVVTTLENVSPPRRARVTDATETTITISWRTKTETITGFQVDAVPANGQTPIQRTIKPDVRSYTITGLQPGTDYKIYLYTLNDNARSSPVVIDASTAIDAPSNLRFLATTPNSLLVSWQPPRARITGYIIKYEKPGSPPREVVPRPRPGVTEATITGLEPGTEYTIYVIALKNNQKSEPLIGRKKTGQEALSQTTISWAPFQDTSEYIISCHPVGTDEEPLQFRVPGTSTSATLTGLTRGATYNVIVEALKDQQRHKVREEVVTVGNSVNEGLNQPTDDSCFDPYTVSHYAVGDEWERMSESGFKLLCQCLGFGSGHFRCDSSRWCHDNGVNYKIGEKWDRQGENGQMMSCTCLGNGKGEFKCDPHEATCYDDGKTYHVGEQWQKEYLGAICSCTCFGGQRGWRCDNCRRPGGEPSPEGTTGQSYNQYSQRYHQRTNTNVNCPIECFMPLDVQADREDSRE

SEQ ID NO: 5499 - protein, 2265 aa, Homo sapiens
MLRGPGPGLLLLAVQCLGTAVPSTGASKSKRQAQQMVQPQSPVAVSQSKPGCYDNGKHYQINQQWERTYLGNALVCTCYGGSRGFNCESKPEAEETCFDKYTGNTYRVGDTYERPKDSMIWDCTCIGAGRGRISCTIANRCHEGGQSYKIGDTWRRPHETGGYMLECVCLGNGKGEWTCKPIAEKCFDHAAGTSYVVGETWEKPYQGWMMVDCTCLGEGSGRITCTSRNRCNDQDTRTSYRIGDTWSKKDNRGNLLQCICTGNGRGEWKCERHTSVQTTSSGSGPFTDVRAAVYQPQPHPQPPPYGHCVTDSGVVYSVGMQWLKTQGNKQMLCTCLGNGVSCQETAVTQTYGGNSNGEPCVLPFTYNGRTFYSCTTEGRQDGHLWCSTTSNYEQDQKYSFCTDHTVLVQTRGGNSNGALCHFPFLYNNHNYTDCTSEGRRDNMKWCGTTQNYDADQKFGFCPMAAHEEICTTNEGVMYRIGDQWDKQHDMGHMMRCTCVGNGRGEWTCIAYSQLRDQCIVDDITYNVNDTFHKRHEEGHMLNCTCFGQGRGRWKCDPVDQCQDSETGTFYQIGDSWEKYVHGVRYQCYCYGRGIGEWHCQPLQTYPSSSGPVEVFITETPSQPNSHPIQWNAPQPSHISKYILRWRPKNSVGRWKEATIPGHLNSYTIKGLKPGVVYEGQLISIQQYGHQEVTRFDFTTTSTSTPVTSNTVTGETTPFSPLVATSESVTEITASSFVVSWVSASDTVSGFRVEYELSEEGDEPQYLDLPSTATSVNIPDLLPGRKYIVNVYQISEDGEQSLILSTSQTTAPDAPPDTTVDQVDDTSIVVRWSRPQAPITGYRIVYSPSVEGSSTELNLPETANSVTLSDLQPGVQYNITIYAVEENQESTPVVIQQETTGTPRSDTVPSPRDLQFVEVTDVKVTIMWTPPESAVTGYRVDVIPVNLPGEHGQRLPISRNTFAEVTGLSPGVTYYFKVFAVSHGRESKPLTAQQTTKLDAPTNLQFVNETDSTVLVRWTPPRAQITGYRLTVGLTRRGQPRQYNVGPSVSKYPLRNLQPASEYTVSLVAIKGNQESPKATGVFTTLQPGSSIPPYNTEVTETTIVITWTPAPRIGFKLGVRPSQGGEAPREVTSDSGSIVVSGLTPGVEYVYTIQVLRDGQERDAPIVNKVVTPLSPPTNLHLEANPDTGVLTVSWERSTTPDITGYRITTTPTNGQQGNSLEEVVHADQSSCTFDNLSPGLEYNVSVYTVKDDKESVPISDTIIPAVPPPTDLRFTNIGPDTMRVTWAPPPSIDLTNFLVRYSPVKNEEDVAELSISPSDNAVVLTNLLPGTEYVVSVSSVYEQHESTPLRGRQKTGLDSPTGIDFSDITANSFTVHWIAPRATITGYRIRHHPEHFSGRPREDRVPHSRNSITLTNLTPGTEYVVSIVALNGREESPLLIGQQSTVSDVPRDLEVVAATPTSLLISWDAPAVTVRYYRITYGETGGNSPVQEFTVPGSKSTATISGLKPGVDYTITVYAVTGRGDSPASSKPISINYRTEIDKPSQMQVTDVQDNSISVKWLPSSSPVTGYRVTTTPKNGPGPTKTKTAGPDQTEMTIEGLQPTVEYVVSVYAQNPSGESQPLVQTAVTTIPAPTDLKFTQVTPTSLSAQWTPPNVQLTGYRVRVTPKEKTGPMKEINLAPDSSSVVVSGLMVATKYEVSVYALKDTLTSRPAQGVVTTLENVSPPRRARVTDATETTITISWRTKTETITGFQVDAVPANGQTPIQRTIKPDVRSYTITGLQPGTDYKIYLYTLNDNARSSPVVIDASTAIDAPSNLRFLATTPNSLLVSWQPPRARITGYIIKYEKPGSPPREVVPRPRPGVTEATITGLEPGTEYTIYVIALKNNQKSEPLIGRKKTDELPQLVTLPHPNLHGPEILDVPSTVQKTPFVTHPGYDTGNGIQLPGTSGQQPSVGQQMIFEEHGFRRTTPPTTATPIRHRPRPYPPNVGQEALSQTTISWAPFQDTSEYIISCHPVGTDEEPLQFRVPGTSTSATLTGLTRGATYNVIVEALKDQQRHKVREEVVTVGNSVNEGLNQPTDDSCFDPYTVSHYAVGDEWERMSESGFKLLCQCLGFGSGHFRCDSSRWCHDNGVNYKIGEKWDRQGENGQMMSCTCLGNGKGEFKCDPHEATCYDDGKTYHVGEQWQKEYLGAICSCTCFGGQRGWRCDNCRRPGGEPSPEGTTGQSYNQYSQRYHQRTNTNVNCPIECFMPLDVQADREDSRE

SEQ ID NO: 5500 - protein, 241 aa, Homo sapiens
YLYTLNDNARSSPVVIDASTAIDAPSNLRFLATTPNSLLVSWQPPRARITGYIIKYEKPGSPPREVVPRPRPGVTEATITGLEPGTEYTIYVIALKNNQKSEPLIGRKKTVQKTPFVTHPGYDTGNGIQLPGTSGQQPSVGQQMIFEEHGFRRTTPPTTATPIRHRPRPYPPNVGEEIQIGHIPREDVDYHLYPHGPGLNPNASTGQEALSQTTISWAPFQDTSEYIISCHPVGTDEEPLQ

SEQ ID NO: 5501 - protein, 1894 aa, Homo sapiens
MAPEAGATLRAPRRLSWAALLLLAALLPVASSAAASVDHPLKPRHVKLLSTKMGLKVTWDPPKDATSRPVEHYNIAYGKSLKSLKYIKVNAETYSFLIEDVEPGVVYFVLLTAENHSGVSRPVYRAESPPGGEWIEIDGFPIKGPGPFNETVTEKEVPNKPLRVRVRSSDDRLSVAWKAPRLSGAKSPRRSRGFLLGYGESGRKMNYVPLTRDERTHEIKKLASESVYVVSLQSMNSQGRSQPVYRAALTKRKISEEDELDVPDDISVRVMSSQSVLVSWVDPVLEKQKKVVASRQYTVRYREKGELARWDYKQIANRRVLIENLIPDTVYEFAVRISQGERDGKWSTSVFQRTPESAPTTAPENLNVWPVNGKPTVVAASWDALPETEGKVKEYILSYAPALKPFGAKSLTYPGDTTSALVDGLQPGERYLFKIRATNRRGLGPHSKAFIVAMPTTSKADVEQNTEDNGKPEKPEPSSPSPRAPASSQHPSVPASPQGRNAKDLLLDLKNKILANGGAPRKPQLRAKKAEELDLQSTEITGEEELGSREDSPMSPSDTQDQKRTLRPPSRHGHSVVAPGRTAVRARMPALPRREGVDKPGFSLATQPRPGAPPSASASPAHHASTQGTSHRPSLPASLNDNDLVDSDEDERAVGSLHPKGAFAQPRPALSPSRQSPSSVLRDRSSVHPGAKPASPARRTPHSGAAEEDSSASAPPSRLSPPHGGSSRLLPTQPHLSSPLSKGGKDGEDAPATNSNAPSRSTMSSSVSSHLSSRTQVSEGAEASDGESHGDGDREDGGRQAEATAQTLRARPASGHFHLLRHKPFAANGRSPSRFSIGRGPRLQPSSSPQSTVPSRAHPRVPSHSDSHPKLSSGIHGDEEDEKPLPATVVNDHVPSSSRQPISRGWEDLRRSPQRGASLHRKEPIPENPKSTGADTHPQGKYSSLASKAQDVQQSTDADTEGHSPKAQPGSTDRHASPARPPAARSQQHPSVPRRMTPGRAPQQQPPPPVATSQHHPGPQSRDAGRSPSQPRLSLTQAGRPRPTSQGRSHSSSDPYTASSRGMLPTALQNQDEDAQGSYDDDSTEVEAQDVRAPAHAARAKEAAASLPKHQQVESPTGAGAGGDHRSQRGHAASPARPSRPGGPQSRARVPSRAAPGKSEPPSKRPLSSKSQQSVSAEDDEEEDAGFFKGGKEDLLSSSVPKWPSSSTPRGGKDADGSLAKEEREPAIALAPRGGSLAPVKRPLPPPPGSSPRASHVPSRLPPRSAATVSPVAGTHPWPQYTTRAPPGHFSTTPMLSLRQRMMHARFRNPLSRQPARPSYRQGYNGRPNVEGKVLPGSNGKPNGQRIINGPQGTKWVVDLDRGLVLNAEGRYLQDSHGNPLRIKLGGDGRTIVDLEGTPVVSPDGLPLFGQGRHGTPLANAQDKPILSLGGKPLVGLEVIKKTTHPPTTTMQPTTTTTPLPTTTTPRPTTATTRRTTTTRRTTTRRPTTTVRTTTRTTTTTTPTPTTPIPTCPPGTLERHDDDGNLIMSSNGIPECYAEEDEFSGLETDTAVPTEEAYVIYDEDYEFETSRPPTTTEPSTTATTPRVIPEEGAISSFPEEEFDLAGRKRFVAPYVTYLNKDPSAPCSLTDALDHFQVDSLDEIIPNDLKKSDLPPQHAPRNITVVAVEGCHSFVIVDWDKATPGDVVTGYLVYSASYEDFIRNKWSTQASSVTHLPIENLKPNTRYYFKVQAQNPHGYGPISPSVSFVTESDNPLLVVRPPGGEPIWIPFAFKHDPSYTDCHGRQYVKRTWYRKFVGVVLCNSLRYKIYLSDNLKDTFYSIGDSWGRGEDHCQFVDSHLDGRTGPQSYVEALPTIQGYYRQYRQEPVRFGNIGFGTPYYYVGWYECGVSIPGKW

SEQ ID NO: 5502 - protein, 1790 aa, Homo sapiens
  SITE 1: note = misc_feature - Xaa can be any naturally occurring amino acid
XPRHVKLLSTKMGLKVTWDPPKDATSRPVEHYNIAYGKSLKSLKYIKVNAETYSFLIEDVEPGVVYFVLLTAENHSGVSRPVYRAESPPGGEWIEIDGFPIKGPGPFNETVTEKEVPNKPLRVRVRSSDDRLSVAWKAPRLSGAKSPRRSRGFLLGYGESGRKMNYVPLTRDERTHEIKKLASESVYVVSLQSMNSQGRSQPVYRAALTKRKISEEDELDVPDDISVRVMSSQSVLVSWVDPVLEKQKKVVASRQYTVRYREKGELARWDYKQIANRRVLIENLIPDTVYEFAVRISQGERDGKWSTSVFQRTPESAPTTAPENLNVWPVNGKPTVVAASWDALPETEGKVKASKADVEQNTEDNGKPEKPEPSSPSPRAPASSQHPSVPASPQGRNAKDLLLDLKNKILANGGAPRKPQLRAKKAEELDLQSTEITGEEELGSREDSPMSPSDTQDQKRTLRPPSRHGHSVVAPGRTAVRARMPALPRREGVDKPGFSLATQPRPGAPPSASASPAHHASTQGTSHRPSLPASLNDNDLVDSDEDERAVGSLHPKGAFAQPRPALSPSRQSPSSVLRDRSSVHPGAKPASPARRTPHSGAAEEDSSASAPPSRLSPPHGGSSRLLPTQPHLSSPLSKGGKDGEDAPATNSNAPSRSTMSSSVSSHLSSRTQVSEGAEASDGESHGDGDREDGGRQAEATAQTLRARPASGHFHLLRHKPFAANGRSPSRFSIGRGPRLQPSSSPQSTVPSRAHPRVPSHSDSHPKLSSGIHGDEEDEKPLPATVVNDHVPSSSRQPISRGWEDLRRSPQRGASLHRKEPIPENPKSTGADTHPQGKYSSLASKAQDVQQSTDADTEGHSPKAQPGSTDRHASPARPPAARSQQHPSVPRRMTPGRAPQQQPPPPVATSQHHPGPQSRDAGRSPSQPRLSLTQAGRPRPTSQGRSHSSSDPYTASSRGMLPTALQNQDEDAQGSYDDDSTEVEAQDVRAPAHAARAKEAAASLPKHQQVESPTGAGAGGDHRSQRGHAASPARPSRPGGPQSRARVPSRAAPGKSEPPSKRPLSSKSQQSVSAEDDEEEDAGFFKGGKEDLLSSSVPKWPSSSTPRGGKDADGSLAKEEREPAIALAPRGGSLAPVKRPLPPPPGSSPRASHVPSRLPPRSAATVSPVAGTHPWPQYTTRAPPGHFSTTPMLSLRQRMMHARFRNPLSRQPARPSYRQGYNGRPNVEGKVLPGSNGKPNGQRIINGPQGTKWVVDLDRGLVLNAEGRYLQDSHGNPLRIKLGGDGRTIVDLEGTPVVSPDGLPLFGQGRHGTPLANAQDKPILSLGGKPLVGLEVIKKTTHPPTTTMQPTTTTTPLPTTTTPRPTTATTRRTTTTRRTTTRRPTTTVRTTTRTTTTTTPTPTTPIPTCPPGTLERHDDDGNLIMSSNGIPECYAEEDEFSGLETDTAVPTEEAYVIYDEDYEFETSRPPTTTEPSTTATTPRVIPEEGAISSFPEEEFDLAGRKRFVAPYVTYLNKDPSAPCSLTDALDHFQVDSLDEIIPNDLKKSDLPPQHAPRNITVVAVEGCHSFVIVDWDKATPGDVVTGYLVYSASYEDFIRNKWSTQASSVTHLPIENLKPNTRYYFKVQAQNPHGYGPISPSVSFVTESDNPLLVVRPPGGEPIWIPFAFKHDPSYTDCHGRQYVKRTWYRKFVGVVLCNSLRYKIYLSDNLKDTFYSIGDSWGRGEDHCQFVDSHLDGRTGPQSYVEALPTIQGYYRQYRQEPVRFGNIGFGTPYYYVGWYECGVSIPGKW

SEQ ID NO: 5503 - protein, 733 aa, Homo sapiens
MAGGRETCLPLIGFILICLKMVASAKSAPEIPTIDQAYSKLSNSITVEWATVPGATSYLLTAEDGDTVIETTVANSPGTVTGLKAATWYEITIRSISAAGRSQASPPKQAKTVLAAPILEVSSPSSDSILVQWEAVYMAIAFSVSIMRANGLGSIWKENTTNTSLTFTSLEAGTLYTIKAYAWNANRIPGDDSTCNQRTSPRAPANIQVSFDSGALKASFSWARAEGAFNYTVMALSDSSELTCSTTFSSCTISSLQCGTEYLISVLASNDAGSSKSSSAMTLKTVACAPGRVTIQEDPPGHLSVAWSSVDLGDYYVVFVKSDDGLEVHCNTSLTQCNFLSECGFTYFISVFVYNKAGQSPLGDIFNYTTAPCCPSDINPVLVSSDRVEIVWSPVRGAELYETKAVDGYNMVECNDTTPACTLSALECDTKYNITVYSFNEVRGSNMSCTPQFITTAPCSPEIKNVSRDAFSMINVHWRSTNDDATYTVTAQGEKGLYQCSSTGESCTMRGLPCGSVFSVTAVAETQAGRSLPSYSVPLETVPCCPTGLTVTQITQSVINVSWTIGRVAQTHVAVLESHTGQSKCHTHQNHCLLGCITCGINYTVTLKAISATGLTADCSYQSYFSGACCPLGVKLYRLGPNGIRIYWQASRGSANYSTDLYGSKGIFTCTPSAGLSFCDVTEIPCGDVYTVMVSPVAKTGLKLTFCPKKIYSVTCSGSTLGMVIYRGKRNEE

SEQ ID NO: 5504 - protein, 499 aa, Homo sapiens
  SITE 1: note = misc_feature - Xaa can be any naturally occurring amino acid
XEGAFNYTVMALSDSSELTCSTTFSSCTISSLQCGTEYLISVLASNDAGSSKSSSAMTLKTVACAPGRVTIQEDPPGHLSVAWSSVDLGDYYVVFVKSDDGLEVHCNTSLTQCNFLSECGFTYFISVFVYNKAGQSPLGDIFNYTTAPCCPSDINPVLVSSDRVEIVWSPVRGAELYETKAVDGYNMVECNDTTPACTLSALECDTKYNITVYSFNEVRGSNMSCTPQFITTAPCSPEIKNVSRDAFSMINVHWRSTNDDATYTVTAQGEKGLYQCSSTGESCTMRGLPCGSVFSVTAVAETQAGRSLPSYSVPLETVPCCPTGLTVTQITQSVINVSWTIGRVAQTHVAVLESHTGQSKCHTHQNHCLLGCITCGINYTVTLKAISATGLTADCSYQSYFSGACCPLGVKLYRLGPNGIRIYWQASRGSANYSTDLYGSKGIFTCTPSAGLSFCDVTEIPCGDVYTVMVSPVAKTGLKLTFCPKKIYSVIYRGKRNEE

SEQ ID NO: 5505 - protein, 46 aa, Homo sapiens
MAVSDVPSLSVGKEVQWEKLIAKAASIRDICHINMVQICWQLFLKC

SEQ ID NO: 5506 - protein, 1237 aa, Homo sapiens
MAVSDVPSLSVGKEVQWEKLIAKAASIRDICKQRPYQHGADMLAAISQVLNECTKPDQATPAALVLQGLHALCQAEVVCIRSTWNALSPKLSCDTRPLILKTLSELFSLVPSLTVNTTEYENFKVQVLSFLWTHTQNKDPIVANAAYRSLANFSAGEHTILHLPEKIRPEIPIPEELDDDEDVEDVDLSVPGSCYLKLLSLTPPLVLPALEEFFTSLVKQEMVNMPRGIYHSALKGGARSDQGKTVAGIPNFILKMYETNKQPGLKPGLAGGMLFCYDVSMYQSKDGKPLNRLMASRGRSFKQTSLALVHEVHIQLSEWHRAIFLPQAWLAYMNRAYHAILQGRLGELELQLKHGKEEPEEVQYKKSTAWLWVRDMLTDEITKAAAKESPVVKGNALLALSSLAVVVSRHEASLSSDSDGLLEVQPNFLSMKEWVSMVLDTLLVIVDSHYQPRGQLLSWFYYKSYSGENTASAIARSAAATALSLLVPVFIISCKEKVEEILNMLTARLPGKPSADESQAVQIHMGLALGMFLSRLCEEKLSDISGQEMNLLLMKSLDALENCCFDTSLEYNTGCILGVGLVLSLMSHSSQMQSRVHVAALLRKLSAHVDDSGSQSRTFQEVLAYTLSCVCTSAFSAGIIEATEAEDVMNKLRLLVENSQQTSGFALALGNIVHGLSVCGHGKAEDLGSKLLPAWIRIVLTEGTPTMLCLAALHGMVALVGSEGDVMQLKSEAIQTSHFQGRLNEVIRTLTQVISVSGVIGLQSNAVWLLGHLHLSTLSSSQSRASVPTDYSYLPESSFIGAAIGFFITGGKKGPESVPPSLLKVVMKPIATVGESYQYPPVNWAALLSPLMRLNFGEEIQQLCLEIMVTQAQSSQNAAALLGLWVTPPLIHSLSLNTKRYLLISAPLWIKHISDEQILGFVENLMVAVFKAASPLGSPELCPSALHGLSQAMKLPSPAHHLWSLLSEATGKIFDLLPNKIRRKDLELYISIAKCLLEMTDDDANRIAQVTKSNIEKAAFVKLYLVSQGRFPLVNLTDMLSVAVQHREKEVLAWMILHSLYQARIVSHANTGVLKRMEWLLELMGYIRNVAYQSTSFHNTALDKALDFFLLIFATAVVAWADHTAPLLLGLSASWLPWHQENGPAGPVPSFLGRSPMHRVTLQEVLTLLPNSMALLLQKEPWKEQTQKFIDWLFSIMESPKEALSAQSRDLLKATLLSLRVLPEFKKKAVWTRAYGW

SEQ ID NO: 5507 - protein, 99 aa, Homo sapiens
MLTARLPGKPSADESQAVQIHMGLALGMFLSRLCEEKLSDISGQEMNLLLMKSLDALENCCFDTSLEYNTGCILGVGLVLSLMSHSSQMQSRVHVAALL

SEQ ID NO: 5508 - protein, 128 aa, Homo sapiens
MLTARLPGKPSADESQAVQIHMGLALGMFLSRLCEEKLSDISGQEMNLLLMKSLDALENCCFDTSLEYNTGCILGVGLVLSLMSHSSQMQSRVHVAALLRKLSAHVDDSGSQSRTFQEVLAYTLSCVC

SEQ ID NO: 5509 - protein, 180 aa, Homo sapiens
MPKVFSVYFVCLCPALGKICDISGQEMNLLLMKSLDALENCCFDTSLEYNTGCILGVGLVLSLMSHSSQMQSRVHVAALLRKLSAHVDDSGSQSRTFQEVLAYTLSCVCTSAFSAGIIEATEAEDVMNKLRLLVENSQQTSGFALALGNIVHGLSVCGHGKAEDLGSKLLPAWIRIVLTE

SEQ ID NO: 5510 - protein, 1801 aa, Homo sapiens
MSDDIRKRFEFPNSLIQSQAVGHLIAAVLKENGFSEKIHQSTNQTPALNLLWEKCCSDNVVVRTACCEGLVALVAQDHAEFSYVLNGILNLIPSTRNTHGLIKAIMHLLQMQALKEGQGGEKNIQSIYTIRNHPHPLITVLEHRPDCWPVFLQQLTAFFQQCPERLEVSCIQIMAPFLWYLYCEPSQLQEYAKLRLALLKVLLQPQVLCDKDQPSILEQQILQLCCDIVPCLQVKDLIQTTEAMMFIEEVCLSLLRHPVFWKIQLTQMSLQLLCVSEVSLKITGECSSSIHLLEHSVELLKEDFPVELVIIGIALLLLQTPASQQKPILNLALKLLSVTEDQKIPKSSLLLVMPILQILSSTALEDCISVDEEGPSRQQLALNLLEMIQQECYRDDHQKLSYKLVCPVTSMYGTIFTAWRILEVMTDSSAASDWLASVESLLPITAVIPAPAFLLLAHLLVEDKGQNLHQILKVTTELAQADSSQVPNLIPVLMFKLGRPLEPILYNDILYTLPKLGVHKVCIGQILRIIQLLGTTPRLRAVTLRLLTSLWEKQDRVYPELQRFMAVSDVPSLSVGKEVQWEKLIAKAASIRDICKQRPYQHGADMLAAISQVLNECTKPDQATPAALVLQGLHALCQAEVVCIRSTWNALSPKLSCDTRPLILKTLSELFSLVPSLTVNTTEYENFKVQVLSFLWTHTQNKDPIVANAAYRSLANFSAGEHTILHLPEKIRPEIPIPEELDDDEDVEDVDLSVPGSCYLKLLSLTPPLVLPALEEFFTSLVKQEMVNMPRGIYHSALKGGARSDQGKTVAGIPNFILKMYETNKQPGLKPGLAGGMLFCYDVSMYQSKDGKPLNRLMASRGRSFKQTSLALVHEVHIQLSEWHRAIFLPQAWLAYMNRAYHAILQGRLGELELQLKHGKEEPEEVQYKKSTAWLWVRDMLTDEITKAAAKESPVVKGNALLALSSLAVVVSRHEASLSSDSDGLLEVQPNFLSMKEWVSMVLDTLLVIVDSHYQPRGQLLSWFYYKSYSGENTASAIARSAAATALSLLVPVFIISCKEKVEEILNMLTARLPGKPSADESQAVQIHMGLALGMFLSRLCEEKLSDISGQEMNLLLMKSLDALENCCFDTSLEYNTGCILGVGLVLSLMSHSSQMQSRVHVAALLRKLSAHVDDSGSQSRTFQEVLAYTLSCVCTSAFSAGIIEATEAEDVMNKLRLLVENSQQTSGFALALGNIVHGLSVCGHGKAEDLGSKLLPAWIRIVLTEGTPTMLCLAALHGMVALVGSEGDVMQLKSEAIQTSHFQGRLNEVIRTLTQVISVSGVIGLQSNAVWLLGHLHLSTLSSSQSRASVPTDYSYLPESSFIGAAIGFFITGGKKGPESVPPSLLKVVMKPIATVGESYQYPPVNWAALLSPLMRLNFGEEIQQLCLEIMVTQAQSSQNAAALLGLWVTPPLIHSLSLNTKRYLLISAPLWIKHISDEQILGFVENLMVAVFKAASPLGSPELCPSALHGLSQAMKLPSPAHHLWSLLSEATGKIFDLLPNKIRRKDLELYISIAKCLLEMTDDDANRIAQVTKSNIEKAAFVKLYLVSQGRFPLVNLTDMLSVAVQHREKEVLAWMILHSLYQARIVSHANTGVLKRMEWLLELMGYIRNVAYQSTSFHNTALDKALDFFLLIFATAVVAWADHTAPLLLGLSASWLPWHQENGPAGPVPSFLGRSPMHRVTLQEVLTLLPNSMALLLQKEPWKEQTQKFIDWLFSIMESPKEALSAQSRDLLKATLLSLRVLPEFKKKAVWTRAYGW

SEQ ID NO: 5511 - protein, 1801 aa, Homo sapiens; identical to SEQ ID NO: 5510

SEQ ID NO: 5512 - protein, 181 aa, Homo sapiens
MLPAATEGQKDMVWKWMPLLLLLVCVATMCSAQDRTDLLNVCMDAKHHKTKPGPEDKLHDQCSPWKKNACCTASTSQELHKDTSRLYNFNWDHCGKMEPACKRHFIQDTCLYECSPNLGPWIQQVNQSWRKERFLDVPLCKEDCQRWWEDCHTSHTCKSNWHRGWDWTSGVNKCPAGALCR

SEQ ID NO: 5513 - protein, 198 aa, Homo sapiens
MLPAATELRLQGQKDMVWKWMPLLLLLVCVATMCSAQDRTDLLNVCMDAKHHKTKPGPEDKLHDQCSPWKKNACCTASTSQELHKDTSRLYNFNWDHCGKMEPACKRHFIQDTCLYECSPNLGPWIQQVNQSWRKERFLDVPLCKEDCQRWWEDCHTSHTCKSNWHRGWDWTSGVNKCPAGALCRTFESYFPTPAALC

SEQ ID NO: 5514 - protein, 214 aa, Homo sapiens
MLPAATEVQCSPWKKNACCTASTSQELHKDTSRLYNFNWDHCGKMEPACKRHFIQDTCLYECSPNLGPWIQQVNQSWRKERFLDVPLCKEDCQRWWEDCHTSHTCKSNWHRGWDWTSGVNKCPAGALCRTFESYFPTPAALCEGLWSHSYKVSNYSRGSGRCIQMWFDSAQGNPNEEVARFYAAAMHVNAGEMLHGTGGLLLSLALMLQLWLLG

SEQ ID NO: 5515 - protein, 210 aa, Homo sapiens
MLPAATEVQGQKDMVWKWMPLLLLLVCVATMCSAQDRTDLLNVCMDAKHHKTKPGPEDKLHDQCSPWKKNACCTASTSQELHKDTSRLYNFNWDHCGKMEPACKRHFIQDTCLYECSPNLGPWIQQVNQSWRKERFLDVPLCKEDCQRWWEDCHTSHTCKSNWHRGWDWTSGVNKCPAGALCRTFESYFPTPAALCEGLWSHSYKVSNYS

SEQ ID NO: 5516 - protein, 148 aa, Homo sapiens
MLPAATEVQKDHAGSCGEGNLKGKKLEEGRLDTKHRAMLRLQGQKDMVWKWMPLLLLLVCVATMCSAQDRTDLLNVCMDAKHHKTKPGPEDKLHDQCSPWKKNACCTASTSQELHKDTSRLYNFNWDHCGKMEPACKRHFIQDTCLYE

SEQ ID NO: 5517 - protein, 251 aa, Homo sapiens
MLPAATEVQLRLQGQKDMVWKWMPLLLLLVCVATMCSAQDRTDLLNVCMDAKHHKTKPGPEDKLHDQCSPWKKNACCTASTSQELHKDTSRLYNFNWDHCGKMEPACKRHFIQDTCLYECSPNLGPWIQQVNQSWRKERFLDVPLCKEDCQRWWEDCHTSHTCKSNWHRGWDWTSAALCEGLWSHSYKVSNYSRGSGRCIQMWFDSAQGNPNEEVARFYAAAMHVNAGEMLHGTGGLLLSLALMLQLWLLG

SEQ ID NO: 5518 - protein, 244 aa, Homo sapiens
MLPAATEVQLRLQGQKDMVWKWMPLLLLLVCVATMCSAQDRTDLLNVCMDAKHHKTKPGPEDKLHDQCSPWKKNACCTASTSQELHKDTSRLYNFNWDHCGKMEPACSATSSRTPVSMSAHQPGALDPAGIRAGAKNASWMCPYAKRTVSAGGRIVTPPTRARATGTEDGTGPQELTSAQLGLSAAPLSPTSPLQLPFVKASGVTHTRSATTAEGAAAASRCGLIQPRATPTRKWRGSMLQPCM

SEQ ID NO: 5519 - protein, 169 aa, Homo sapiens
MVWKWMPLLLLLVCVATMCSAQDRTDLLNVCMDAKHHKTKPGPEDKLHDQCSPWKKNACCTASTSQELHKDTSRLYNFNWDHCGKMEPACKRHFIQDTCLYECSPNLGPWIQQVNQSWRKERFLDVPLCKEDCQRWWEDCHTSHTCKSNWHRGWDWTSAALCEGLWSHS

SEQ ID NO: 5520 - protein, 171 aa, Homo sapiens
MVWKWMPLLLLLVCVATMCSAQDRTDLLNVCMDAKHHKTKPGPEDKLHDQCSPWKKNACCTASTSQELHKDTSRLYNFNWDHCGKMEPACKRHFIQDTCLYECSPNLGPWIQQVNQSWRKERFLDVPLCKEDCQRWWEDCHTSHTCKSNWHRGWDWTSGVNKCPAGALCRT

SEQ ID NO: 5521 - protein, 255 aa, Homo sapiens
MVWKWMPLLLLLVCVATMCSAQDRTDLLNVCMDAKHHKTKPGPEDKLHDQCSPWKKNACCTASTSQELHKDTSRLYNFNWDHCGKMEPACKRHFIQDTCLYECSPNLGPWIQQVNQSWRKERFLDVPLCKEDCQRWWEDCHTSHTCKSNWHRGWDWTSGVNKCPAGALCRTFESYFPTPAALCEGLWSHSYKVSNYSRGSGRCIQMWFDSAQGNPNEEVARFYAAAMHVNAGEMLHGTGGLLLSLALMLQLWLLG

SEQ ID NO: 5522 - protein, 74 aa, Homo sapiens
MAWQMMQLLLLALVTAAGSAQPRSARARTDLLNVCMNAKHHKTQPSPEDELYGQCSPWKKNACCTASTSQELHK

SEQ ID NO: 5523 - protein, 104 aa, Homo sapiens
MAWQMMQLLLLALVTAAGSAQPRSARARTDLLNVCMNAKHHKTQPSPEDELYGQCSPWKKNACCTASTSQELHKDTSRLYNFNWDHCGKMEPTCKRHFIQDSCL

SEQ ID NO: 5524 - protein, 178 aa, Homo sapiens
MDMAWQMMQLLLLALVTAAGSAQPRSARARTDLLNVCMNAKHHKTQPSPEDELYGQCSPWKKNACCTASTSQELHKDTSRLYNFNWDHCGKMEPTCKRHFIQDSCLYECSPNLGPWIRQVNQSWRKERILNVPLCKEDCERWWEDCRTSYTCKSNWHKGWNWTSGINECPAGALCSTF

SEQ ID NO: 5525 - protein, 245 aa, Homo sapiens
MDMAWQMMQLLLLALVTAAGSAQPRSARARTDLLNVCMNAKHHKTQPSPEDELYGQCSPWKKNACCTASTSQELHKDTSRLYNFNWDHCGKMEPTCKRHFIQDSCLYECSPNLGPWIRQVNQSWRKERILNVPLCKEDCERWWEDCRTSYTCKSNWHKGWNWTSGINECPAGALCSTFESYFPTPAALCEGLWSHSFKVSNYSRGSGRCIQMWFDSAQGNPNEEVAKFYAAAMNAGAPSRGIIDS

SEQ ID NO: 5526 - protein, 172 aa, Homo sapiens
MDMAWQMMQLLLLALVTAAGSAQPRSARARTDLLNVCMNAKHHKTQPSPEDELYGQVGAPQGPSPGSVPLDDLPGAEEPEYGGDGCGGERLSPVSSPPSAVPGRRMPAARPAPARSCTRTPPACTTLTGITVVRWNPPASATLSRTAVSMSAHPTWGPGSGRSTRAGAKSAF

SEQ ID NO: 5527 - protein, 86 aa, Homo sapiens
MGLSAAAPLWGPPGLLLAIALHPALSVPPRRDYCVLGAGPAGLQMAYFLQRAGRDYAVFERAPRPGSFFTRYPRHRKLISINKRYT

SEQ ID NO: 5528 - protein, 684 aa, Homo sapiens
MGLSAAAPLWGPPGLLLAIALHPALSVPPRRDYCVLGAGPAGLQMAYFLQRAGRDYAVFERAPRPGSFFTRYPRHRKLISINKRYTGKANAEFNLRHDWNSLLSHDPRLLFRHYSRAYFPDARDMVRYLGDFADTLGLRVQYNTTIAHVTLDKDRQAWNGHYFILTDQKGQVHQCSVLFVATGLSVPNQVDFPGSEYAEGYESVSVDPEDFVGQNVLILGRGNSAFETAENILGVTNFIHMLSRSRVRLSWATHYVGDLRAINNGLLDTYQLKSLDGLLESDLTDLAILKDSKGKFHVTPKFFLEEANTNQSADSITLPQDDNDNFAMRVPYDRVIRCLGWNFDFSIFNKSLRLNSGNAFGKKYPLIRASYESKGSRGLFILGTASHSVDYRKSAGGFIHGFRYTVRAVHRLLEHRHHSVTWPATELPITQLTSSIVRRVNEASGLYQMFGVLADVILLKENSTAFEYLEEFPIQMLAQLETLTGRKAKHGLFVINMEYGRNFSGPDKDVFFDDRSVGHTEDAWQSNFLHPVIYYYRYLPTEQEVRFRPAHWPLPRPTAIHHIVEDFLTDWTAPIGHILPLRRFLENCLDTDLRSFYAESCFLFALTRQKLPPFCQQGYLRMQGLVSTESLWQHRVESRLLRDYAPTGRRLEDSSQQLGDQEPLGSPLAPGPLAQSVDSNKEEL

SEQ ID NO: 5529 - protein, 684 aa, Homo sapiens; identical to SEQ ID NO: 5528

SEQ ID NO: 5530 - protein, 684 aa, Homo sapiens; identical to SEQ ID NO: 5528

SEQ ID NO: 5531 - protein, 157 aa, Homo sapiens
MLPEQGPQPSTMPLWCLLAACTSLPRQAATMLEEAASPNEAVHASTSGSGALTDQTFTDLSAAEASSEEVPDFMEVPHSVHHKINCFFYLEKQLCQLPSPLCLSSLLTLKLKTTVPAPGRWWSFQPHKAFPLLVGTPGSWQSTIDPAWAAPSQPSPG

SEQ ID NO: 5532 - protein, 57 aa, Homo sapiens
MAAVRALVASRLAAASAFTSLSPGGRTPSQRAALHLSVPRPAARVALDPGAPEPWRG

SEQ ID NO: 5533 - protein, 237 aa, Homo sapiens
MAAVRALVASRLAAASAFTSLSPGGRTPSQRAALHLSVPRPAARVALVLSGCGVYDGTEIHEASAILVHLSRGGAEVQIFAPDVPQMHVIDHTKGQPSEGESRNVLTESARIARGKITDLANLSAANHDAAIFPGGFGAAKNLLCCIAPVLAAKVLRGVEVTVGHEQEEGGKWPYAGTAEAIKALGAKHCVKEVVEAHVDQKNKVVTTPAFMCETALHYIHDGIGAMVRKVLELTGK

SEQ ID NO: 5534 - protein, 268 aa, Homo sapiens
MAAVRALVASRLAAASAFTSLSPGGRTPSQRAALHLSVPRPAARVALVLSGCGVYDGTEIHEASAILVHLSRGGAEVQIFAPDVPQMHVIDHTKGQPSEGESRNVLTESARIARGKITDLANLSAANHDAAIFPGGFGAAKNLSTFAVDGKDCKVNKEVERVLKEFHQAGKPIGLCCIAPVLAAKVLRGVEVTVGHEQEEGGKWPYAGTAEAIKALGAKHCVKEVVEAHVDQKNKVVTTPAFMCETALHYIHDGIGAMVRKVLELTGK

SEQ ID NO: 5535 - protein, 182 aa, Homo sapiens
MHVIDHTKGQPSEGESRNVLTESARIARGKITDLANLSAANHDAAIFPGGFGAAKNLSTFAVDGKDCKVNKEVERVLKEFHQAGKPIGLCCIAPVLAAKVLRGVEVTVGHEQEEGGKWPYAGTAEAIKALGAKHCVKEVVEAHVDQKNKVVTTPAFMCETALHYIHDGIGAMVRKVLELTGK

SEQ ID NO: 5536 - protein, 224 aa, Homo sapiens; identical to SEQ ID NO: 1864

SEQ ID NO: 5537 - protein, 106 aa, Homo sapiens
  SITE 1: note = misc_feature - Xaa can be any naturally occurring amino acid
XDGTEIHEASAILVHLSRGGAEVQIFAPDVPQMHVIDHTKGQPSEGESRNVLTESARIARGKITDLANLSAANHDAAIFPGGFGAAKNLGSPYSDPAKHRSLGLQL

SEQ ID NO: 5538 - protein, 137 aa, Homo sapiens
  SITE 1: note = misc_feature - Xaa can be any naturally occurring amino acid
XDGTEIHEASAILVHLSRGGAEVQIFAPDVPQMHVIDHTKGQPSEGESRNVLTESARIARGKITDLANLSAANHDAAIFPGGFGAAKNLSTFAVDGKDCKVNKEVERVLKEFHQAGKPIGGSPYSDPAKHRSLGLQL

SEQ ID NO: 5539 - protein, 537 aa, Homo sapiens
MLNTLQTNAGYLEQVKRQRGDPQTQLEAMELYLARSGLQVEDLDRLNIIHVTGTKGKGSTCAFTECILRSYGLKTGFFSSPHLVQVRERIRINGQPISPELFTKYFWRLYHRLEETKDGSCVSMPPYFRFLTLMAFHVFLQEKVDLAVVEVGIGGAYDCTNIIRKPVVCGVSSLGIDHTSLLGDTVEKIAWQKGGIFKQGVPAFTVLQPEGPLAVLRDRAQQISCPLYLCPMLEALEEGGPPLTLGLEGEHQRSNAALALQLAHCWLQRQDRHGAGEPKASRPGLLWQLPLAPVFQPTSHMRLGLRNTEWPGRTQVLRRGPLTWYLDGAHTASSAQACVRWFRQALQGRERPSGGPEVRVLLFNATGDRDPAALLKLLQPCQFDYAVFCPNLTEVSSTGNADQQNFTVTLDQVLLRCLEHQQHWNHLDEEQASPDLWSAPSPEPGGSASLLLAPHPPHTCSASSLVFSCISHALQWISQGRDPIFQPPSPPKGLLTHPVAHSGASILREAAAIHVLVTGSLHLVGGVLKLLEPALSQ

SEQ ID NO: 5540 - protein, 265 aa, Homo sapiens
MLNTLQTNAGYLEQVKRQRGDPQTQLEAMELYLARSGLQVEDLDRLNIIHVTGTKGKGSTCAFTECILRSYGLKTGFFSSPHLVQVRERIRINGQPISPELFTKYFWRLYHRLEETKDGSCVSMPPYFRFLTLMAFHVFLQEKVDLAVVEVGIGGAYDCTNIIRKPVVCGVSSLGIDHTSLLGDTVEKIAWQKGGIFKQGVPAFTVLQPEGPLAVLRDRAQQISVLGSQRHPGQGSCGSCPWHLCSSPHPTCGSGFGTRSGRAGR

SEQ ID NO: 5541 - protein, 194 aa, Homo sapiens
MLNTLQTNAGYLEQVKRQRGDPQTQLEAMELYLARSGLQVEDLDRLNIIHVTGTKGKGSTCAFTECILRSYGLKTGFFSSPHLVQVRERIRINGQPISPELFTKYFWRLYHRLEETKVDLAVVEVGIGGAYDCTNIIRKPVVCGVSSLGIDHTSLLGDTVEKIAWQKGGIFKQGVPAFTVLQPEGPLAVLRDRA

SEQ ID NO: 5542 - protein, 375 aa, Homo sapiens
MSRARSHLRAALFLAAASARGITTQVAARRGLSAWPVPQEPSMEYQDAVRMLNTLQTNAGYLEQVKRQRGDPQTQLEAMELYLARSGLQVEDLDRLNIIHVTGTKGKGSTCAFTECILRSYGLKTGFFSSPHLVQVRERIRINGQPISPELFTKYFWRLYHRLEETKDGSCVSMPPYFRFLTLMAFHVFLQEKVDLAVVEVGIGGAYDCTNIIRKPVVCGVSSLGIDHTSLLGDTVEKIAWQKGGIFKQGVPAFTVLQPEGPLAVLRDRAQQISVLGSQRHPGQGSCGSCPWHLCSSPHPTCGSGFGTRSGRAGRRCCGAGPSPGTWTVRTPPAARRPACAGSARRCRAARGRAVAPRFESCSSMLPGTGTRRPC

SEQ ID NO: 5543 - protein, 587 aa, Homo sapiens
MSRARSHLRAALFLAAASARGITTQVAARRGLSAWPVPQEPSMEYQDAVRMLNTLQTNAGYLEQVKRQRGDPQTQLEAMELYLARSGLQVEDLDRLNIIHVTGTKGKGSTCAFTECILRSYGLKTGFFSSPHLVQVRERIRINGQPISPELFTKYFWRLYHRLEETKDGSCVSMPPYFRFLTLMAFHVFLQEKVDLAVVEVGIGGAYDCTNIIRKPVVCGVSSLGIDHTSLLGDTVEKIAWQKGGIFKQGVPAFTVLQPEGPLAVLRDRAQQISCPLYLCPMLEALEEGGPPLTLGLEGEHQRSNAALALQLAHCWLQRQDRHGAGEPKASRPGLLWQLPLAPVFQPTSHMRLGLRNTEWPGRTQVLRRGPLTWYLDGAHTASSAQACVRWFRQALQGRERPSGGPEVRVLLFNATGDRDPAALLKLLQPCQFDYAVFCPNLTEVSSTGNADQQNFTVTLDQVLLRCLEHQQHWNHLDEEQASPDLWSAPSPEPGGSASLLLAPHPPHTCSASSLVFSCISHALQWISQGRDPIFQPPSPPKGLLTHPVAHSGASILREAAAIHVLVTGSLHLVGGVLKLLEPALSQ

SEQ ID NO: 5544 - protein, 375 aa, Homo sapiens; identical to SEQ ID NO: 5542

SEQ ID NO: 5545 - protein, 561 aa, Homo sapiens
MSRARSHLRAALFLAAASARGITTQVAARRGLSAWPVPQEPSMEYQDAVRMLNTLQTNAGYLEQVKRQRGDPQTQLEAMELYLARSGLQVEDLDRLNIIHVTGTKGKGSTCAFTECILRSYGLKTGFFSSPHLVQVRERIRINGQPISPELFTKYFWRLYHRLEETKVDLAVVEVGIGGAYDCTNIIRKPVVCGVSSLGIDHTSLLGDTVEKIAWQKGGIFKQGVPAFTVLQPEGPLAVLRDRAQQISCPLYLCPMLEALEEGGPPLTLGLEGEHQRSNAALALQLAHCWLQRQDRHGAGEPKASRPGLLWQLPLAPVFQPTSHMRLGLRNTEWPGRTQVLRRGPLTWYLDGAHTASSAQACVRWFRQALQGRERPSGGPEVRVLLFNATGDRDPAALLKLLQPCQFDYAVFCPNLTEVSSTGNADQQNFTVTLDQVLLRCLEHQQHWNHLDEEQASPDLWSAPSPEPGGSASLLLAPHPPHTCSASSLVFSCISHALQWISQGRDPIFQPPSPPKGLLTHPVAHSGASILREAAAIHVLVTGSLHLVGGVLKLLEPALSQ

SEQ ID NO: 5546 - protein, 1976 aa, Homo sapiens
MGVLKVWLGLALALAEFAVLPHHSEGACVYQDSLLADATIWKPDSCQSCRCHGDIVICKPAVCRNPQCAFEKGEVLQIAANQCCPECVLRTPGSCHHEKKIHEHGTEWASSPCSVCSCNHGEVRCTPQPCPPLSCGHQELAFIPEGSCCPVCVGLGKPCSYEGHVFQDGEDWRLSRCAKCLCRNGVAQCFTAQCQPLFCNQDETVVRVPGKCCPQCSARSCSAAGQVYEHGEQWSENACTTCICDRGEVRCHKQACLPLRCGKGQSRARRHGQCCEECVSPAGSCSYDGVVRYQDEMWKGSACEFCMCDHGQVTCQTGECAKVECARDEELIHLDGKCCPECISRNGYCVYEETGEFMSSNASEVKRIPEGEKWEDGPCKVCECRGAQVTCYEPSCPPCPVGTLALEVKGQCCPDCTSVHCHPDCLTCSQSPDHCDLCQDPTKLLQNGWCVHSCGLGFYQAGSLCLACQPQCSTCTSGLECSSCQPPLLMRHGQCVPTCGDGFYQDRHSCAVCHESCAGCWGPTEKHCLACRDPLHVLRDGGCESSCGKGFYNRQGTCSACDQSCDSCGPSSPRCLTCTEKTVLHDGKCMSECPGGYYADATGRCKVCHNSCASCSGPTPSHCTACSPPKALRQGHCLPRCGEGFYSDHGVCKACHSSCLACMGPAPSHCTGCKKPEEGLQVEQLSDVGIPSGECLAQCRAHFYLESTGICEACHQSCFRCAGKSPHNCTDCGPSHVLLDGQCLSQCPDGYFHQEGSCTECHPTCRQCHGPLESDCISCYPHISLTNGNCRTSCREEQFLNLVGYCADCHHLCQHCAADLHNTGSICLRCQNAHYLLLGDHCVPDCPSGYYAERGACKKCHSSCRTCQGRGPFSCSSCDTNLVLSHTGTCSTTCFPGHYLDDNHVCQPCNTHCGSCDSQASCTSCRDPNKVLLFGECQYESCAPQYYLDFSTNTCKECDWSCSACSGPLKTDCLQCMDGYVLQDGACVEQCLSSFYQDSGLCKNCDSYCLQCQGPHECTRCKGPFLLLEAQCVQECGKGYFADHAKHKCTACPQGCLQCSHRDRCHLCDHGFFLKSGLCVYNCVPGFSVHTSNETCSGKIHTPSLHVNGSLILPIGSIKPLDFSLLNVQDQEGRVEDLLFHVVSTPTNGQLVLSRNGKEVQLDKAGRFSWKDVNEKKVRFVHSKEKLRKGYLFLKISDQQFFSEPQLINIQAFSTQAPYVLRNEVLHISRGERATITTQMLDIRDDDNPQDVVIEIIDPPLHGQLLQTLQSPATPIYQFQLDELSRGLLHYAHDGSDSTSDVAVLQANDGHSFHNILFQVKTVPQNDRGLQLVANSMVWVPEGGMLQITNRILQAEAPGASAEEIIYKITQDYPQFGEVVLLVNMPADSPADEGQHLPDGRTATPTSTFTQQDINEGIVWYRHSGAPAQSDSFRFEVSSASNAQTRLESHMFNIAILPQTPEAPKVSLEASLHMTAREDGLTVIQPHSLSFINSEKPSGKIVYNITLPLHPNQGIIEHRDHPHSPIRYFTQEDINQGKVMYRPPPAAPHLQELMAFSFAGLPESVKFHFTVSDGEHTSPEMVLTIHLLPSDQQLPVFQVTAPRLAVSPGGSTSVGLQVVVRDAETAPKELFFELRRPPQHGVLLKHTAEFRRPMATGDTFTYEDVEKNALQYIHDGSSTREDSMEISVTDGLTVTMLEVRVEVSLSEDRGPRLAAGSSLSITVASKSTAIITRSHLAYVDDSSPDPEIWIQLNYLPSYGTLLRISGSEVEELSEVSNFTMEDINNKKIRYSAVFETDGHLVTDSFYFSVSDMDHNHLDNQIFTIMITPAENPPPVIAFADLITVDEGGRAPLSFHHFFATDDDDNLQRDAIIKLSALPKYGCIENTGTGDRFGPETASDLEASFPIQDVLENYIYYFQSVHESIEPTHDIFSFYVSDGTSRSEIHSINITIEVKTLEVGKVEPLTTIFHTIRELSL

SEQ ID NO: 5547 - protein, 4012 aa, Homo sapiens
MGVLKVWLGLALALAEFAVLPHHSEGACVYQDSLLADATIWKPDSCQSCRCHGDIVICKPAVCRNPQCAFEKGEVLQIAANQCCPECVLRTPGSCHHEKKIHEHGTEWASSPCSVCSCNHGEVRCTPQPCPPLSCGHQELAFIPEGSCCPVCVGLGKPCSYEGHVFQDGEDWRLSRCAKCLCRNGVAQCFTAQCQPLFCNQDETVVRVPGKCCPQCSARSCSAAGQVYEHGEQWSENACTTCICDRGEVRCHKQACLPLRCGKGQSRARRHGQCCEECVSPAGSCSYDGVVRYQDEMWKGSACEFCMCDHGQVTCQTGECAKVECARDEELIHLDGKCCPECISRNGYCVYEETGEFMSSNASEVKRIPEGEKWEDGPCKVCECRGAQVTCYEPSCPPCPVGTLALEVKGQCCPDCTSVHCHPDCLTCSQSPDHCDLCQDPTKLLQNGWCVHSCGLGFYQAGSLCLACQPQCSTCTSGLECSSCQPPLLMRHGQCVPTCGDGFYQDRHSCAVCHESCAGCWGPTEKHCLACRDPLHVLRDGGCESSCGKGFYNRQGTCSACDQSCDSCGPSSPRCLTCTEKTVLHDGKCMSECPGGYYADATGRCKVCHNSCASCSGPTPSHCTACSPPKALRQGHCLPRCGEGFYSDHGVCKACHSSCLACMGPAPSHCTGCKKPEEGLQVEQLSDVGIPSGECLAQCRAHFYLESTGICEACHQSCFRCAGKSPHNCTDCGPSHVLLDGQCLSQCPDGYFHQEGSCTECHPTCRQCHGPLESDCISCYPHISLTNGNCRTSCREEQFLNLVGYCADCHHLCQHCAADLHNTGSICLRCQNAHYLLLGDHCVPDCPSGYYAERGACKKCHSSCRTCQGRGPFSCSSCDTNLVLSHTGTCSTTCFPGHYLDDNHVCQPCNTHCGSCDSQASCTSCRDPNKVLLFGECQYESCAPQYYLDFSTNTCKECDWSCSACSGPLKTDCLQCMDGYVLQDGACVEQCLSSFYQDSGLCKNCDSYCLQCQGPHECTRCKGPFLLLEAQCVQECGKGYFADHAKHKCTACPQGCLQCSHRDRCHLCDHGFFLKSGLCVYNCVPGFSVHTSNETCSGKIHTPSLHVNGSLILPIGSIKPLDFSLLNVQDQEGRVEDLLFHVVSTPTNGQLVLSRNGKEVQLDKAGRFSWKDVNEKKVRFVHSKEKLRKGYLFLKISDQQFFSEPQLINIQAFSTQAPYVLRNEVLHISRGERATITTQMLDIRDDDNPQDVVIEIIDPPLHGQLLQTLQSPATPIYQFQLDELSRGLLHYAHDGSDSTSDVAVLQANDGHSFHNILFQVKTVPQNDRGLQLVANSMVWVPEGGMLQITNRILQAEAPGASAEEIIYKITQDYPQFGEVVLLVNMPADSPADEGQHLPDGRTATPTSTFTQQDINEGIVWYRHSGAPAQSDSFRFEVSSASNAQTRLESHMFNIAILPQTPEAPKVSLEASLHMTAREDGLTVIQPHSLSFINSEKPSGKIVYNITLPLHPNQGIIEHRDHPHSPIRYFTQEDINQGKVMYRPPPAAPHLQELMAFSFAGLPESVKFHFTVSDGEHTSPEMVLTIHLLPSDQQLPVFQVTAPRLAVSPGGSTSVGLQVVVRDAETAPKELFFELRRPPQHGVLLKHTAEFRRPMATGDTFTYEDVEKNALQYIHDGSSTREDSMEISVTDGLTVTMLEVRVEVSLSEDRGPRLAAGSSLSITVASKSTAIITRSHLAYVDDSSPDPEIWIQLNYLPSYGTLLRISGSEVEELSEVSNFTMEDINNKKIRYSAVFETDGHLVTDSFYFSVSDMDHNHLDNQIFTIMITPAENPPPVIAFADLITVDEGGRAPLSFHHFFATDDDDNLQRDAIIKLSALPKYGCIENTGTGDRFGPETASDLEASFPIQDVLENYIYYFQSVHESIEPTHDIFSFYVSDGTSRSEIHSINITIERKNDEPPRMTLQPLRVQLSSGVVISNSSLSLQDLDTPDNELIFVLTKKPDHGHVLWRQTASEPLENGRVLVQGSTFTYQDILAGLVGYVPSVPGMVVDEFQFSLTDGLHVDTGRMKIYTELPASDTPHLAINQGLQLSAGSVARITEQHLKVTDIDSDDHQVMYIMKEDPGAGRLQMMKHGNLEQISIKGPIRSFTQADISQGHVEYSHGTGEPGGSFAFKFDVVDGEGNRLIDKSFSISILEDKSPPVITTNKGLVLDENSVKKITTLQLSATDQDSGPTELIYRITRQPQLGHLEHAASPGIQISSFTQADLTSRNVQYVHSSEAEKHSDAFSFTLSDGVSEVTQTFHITLHPVDDSLPVVQNLGMRVQEGMRKTITEFELKAVDADTEAESVTFTIVQPPRHGTIERTSNGQHFHLTSTFTMKDIYQNRVSYSHDGSNSLKDRFTFTVSDGTNPFFIIEEGGKEIMTAAPQPFRVDILPVDDGTPRIVTNLGLQWLEYMDGKATNLITKKELLTMDPDTEDAQLVYEITTGPKHGFVENKLQPGRAAATFTQEDVNLGLIRYVLHKEKIREMMDSFQFLVKDSKPNVVSDNVFHIQWSLISFKYTSYNVSEKAGSVSVTVQRTGNLNQYAIVLCRTEQGTASSSSRVSSQPGQQDYVEYAGQVQFDEREDTKSCTIVINDDDVFENVESFTVELSMPAYALLGEFTQAKVIINDTEDEPTLEFDKKIYWVNESAGFLFAPIERKGDASSIVSAICYTVPKSAMGSSLYALESGSDFKSRGMSAASRVIFGPGVTMSTCDVMLIDDSEYEEEEEFEIALADASDNARIGRVATAKVLISGPNDASTVSLGNTAFTVSEDAGTVKIPVIRHGTDLSTFASVWCATRPSDPASATPGVDYVPSSRKVEFGPGVIEQYCTLTILDDTQYPVIEGLETFVVFLSSAQGAELTKPFQAVIAINDTFQDVPSMQFAKDLLLVKEKEGVLHVPITRSGDLSYESSVRCYTQSHSAQVMEDFEERQNADSSRITFLKGDKVKNCTVYIHDDSMFEPEEQFRVYLGLPLGNHWSGARIGKNNMATITISNDEDAPTIEFEEAAYQVREPAGPDAIAILNIKVIRRGDQNRTSKVRCSTRDGSAQSGVDYYPKSRVLKFSPGVDHIFFKVEILSNEDREWHESFSLVLGPDDPVEAVLGDVTTATVTILDQEAAGSLILPAPPIVVTLADYDHVEEVTKEGVKKSPSPGYPLVCVTPCDPHFPRYAVMKERCSEAGINQTSVQFSWEVAAPTDGNGARSPFETITDNTPFTSVNHMVLDSIYFSRRFHVRCVAKAVDKVGHVGTPLRSNIVTIGTDSAICHTPVVAGTSRGFQAQSFIATLKYLDVKHKEHPNRIHISVQIPHQDGMLPLISTMPLHNLHFLLSESIYRHQHVCSNLVTTYDLRGISEAGFLDDVVYDSTALGPGYDRPFQFDPSVREPKTIQLYKHLNLKSCVWTFDAYYDMTELIDVCGGSVTADFQVRDSAQSFLTVHVPLYVSYIYVTAPRGWASLEHHTEMEFSFFYDTVLWRTGIQTDSVLSARLQIIRIYIREDGRLVIEFKTHAKFRGQFVMEHHTLPEVKSFVLTPDHLGGIEFDLQLLWSAQTFDSPHQLWRATSSYNRKDYSGEYTIYLIPCTVQPTQPWVDPGEKPLACTAHAPERFLIPIAFQQTNRPVPVVYSLNTEFQLCNNEKVFLMDPNTSDMSLAEMDYKGAFSKGQILYGRVLWNPEQNLNSAYKLQLEKVYLCTGKDGYVPFFDPTGTIYNEGPQYGCIQPNKHLKHRFLLLDRNQPEVTDKYFHDVPFEAHFASELPDFHVVSNMPGVDGFTLKVDALYKVEAGHQWYLQVIYIIGPDTISGPRVQRSLTAPLRRNRRDLVEPDGQLILDDSLIYDNEGDQVKNGTNMKSLNLEMQELAVAASLSQTGASIGSALAAIMLLLLVFLVACFINRKCQKQRKKKPAEDILEEYPLNTKVEVPKRHPDRVEKNVNRHYCTVRNVNILSEPEAAYTFKGAKVKRLNLEVRVHNNLQDGTEV

SEQ ID NO: 5548 - protein, 39 aa, Homo sapiens
MGVLKVWLGLALALAEFAVLPHHSEGACVYQDSLLAEGG

SEQ ID NO: 5549 - protein, 652 aa, Homo sapiens
  SITE 1: note = misc_feature - Xaa can be any naturally occurring amino acid
XCSYEGHVFQDGEDWRLSRCAKCLCRNGVAQCFTAQCQPLFCNQDETVVRVPGKCCPQCSARSCSAAGQVYEHGEQWSENACTTCICDRGEVRCHKQACLPLRCGKGQSRARRHGQCCEECVSPAGSCSYDGVVRYQDEMWKGSACEFCMCDHGQVTCQTGECAKVECARDEELIHLDGKCCPECISRNGYCVYEETGEFMSSNASEVKRIPEGEKWEDGPCKVCECRGAQVTCYEPSCPPCPVGTLALEVKGQCCPDCTSVHCHPDCLTCSQSPDHCDLCQDPTKLLQNGWCVHSCGLGFYQAGSLCLACQPQCSTCTSGLECSSCQPPLLMRHGQCVPTCGDGFYQDRHSCAVCHESCAGCWGPTEKHCLACRDPLHVLRDGGCESSCGKGFYNRQGTCSACDQSCDSCGPSSPRCLTCTEKTVLHDGKCMSECPGGYYADATGRCKVCHNSCASCSGPTPSHCTACSPPKALRQGHCLPRCGEGFYSDHGVCKACHSSCLACMGPAPSHCTGCKKPEEGLQVEQLSDVGIPSGECLAQCRAHFYLESTGICEACHQSCFRCAGKSPHNCTDCGPSHVLLDGQCLSQCPDGYFHQEGSCTECHPTCRQCHGPLESDCISCYPHISLTNGNCRTSCREEQFLNLVGYCAGE

SEQ ID NO: 5550 - protein, 666 aa, Homo sapiens
  SITE 1: note = misc_feature - Xaa can be any naturally occurring amino acid
XGEVLQIAANQCCPECVLRTPGSCHHEKKIHEHGTEWASSPCSVCSCNHGEVRCTPQPCPPLSCGHQELAFIPEGSCCPVCVGLGKPCSYEGHVFQDGEDWRLSRCAKCLCRNGVAQCFTAQCQPLFCNQDETVVRVPGKCCPQCSARSCSAAGQVYEHGEQWSENACTTCICDRGEVRCHKQACLPLRCGKGQSRARRHGQCCEECVSPAGSCSYDGVVRYQDEMWKGSACEFCMCDHGQVTCQTGECAKVECARDEELIHLDGKCCPECISRNGYCVYEETGEFMSSNASEVKRIPEGEKWEDGPCKVCECRGAQVTCYEPSCPPCPVGTLALEVKGQCCPDCTSVHCHPDCLTCSQSPDHCDLCQDPTKLLQNGWCVHSCGLGFYQAGSLCLACQPQCSTCTSGLECSSCQPPLLMRHGQCVPTCGDGFYQDRHSCAVCHESCAGCWGPTEKHCLACRDPLHVLRDGGCESSCGKGFYNRQGTCSACDQSCDSCGPSSPRCLTCTEKTVLHDGKCMSECPGGYYADATGRCKVCHNSCASCSGPTPSHCTACSPPKALRQGHCLPRCGEGFYSDHGVCKACHSSCLACMGPAPSHCTGCKKPEEGLQVEQLSDVGIPSGECLAQCRAHFYLESTGICEGQNLDFCQNLEVISAVCLGISSTEN

SEQ ID NO: 5551 - protein, 426 aa, Homo sapiens
  SITE 1: note = misc_feature - Xaa can be any naturally occurring amino acid
XTLPLHPNQGLPESVKFHFTVSDGEHTSPEMVLTIHLLPSDQQLPVFQVTAPRLAVSPGGSTSVGLQVVVRDAETAPKELFFELRRPPQHGVLLKHTAEFRRPMATGDTFTYEDVEKNALQYIHDGSSTREDSMEISVTDGLTVTMLEVRVEVSLSEDRGPRLAAGSSLSITVASKSTAIITRSHLAYVDDSSPDPEIWIQLNYLPSYGTLLRISGSEVEELSEVSNFTMEDINNKKIRYSAVFETDGHLVTDSFYFSVSDMDHNHLDNQIFTIMITPAENPPPVIAFADLITVDEGGRAPLSFHHFFATDDDDNLQRDAIIKLSALPKYGCIENTGTGDRFGPETASDLEASFPIQDVLENYIYYFQSVHESIEPTHDIFSFYVSDGTSRSEIHSINITIEVKTLEVGKVEPLTTIFHTIRELSL

SEQ ID NO: 5552 - protein, 222 aa, Homo sapiens
MLDESLAVRRSKKCKEMIMHWEKKEDIDIVNTVDQLDKTAPRITLLHSPSQVGLLKNGCYGIYITSRVLKASDPDTEDDQIIFKILQGPKHGHLENTTTGEFIHEKFSQKDLNSKTILYIINPSLEVNSDTVEFQIMDPTGNSATPQILELKWSHIEWSQTEYEVCENVGLLPLEIIRRGYSMDSAFVGIKVNQVSAAVGKDFTVIPSKLIQFDPGSSILCL

SEQ ID NO: 5553 - protein, 2179 aa, Homo sapiens
MNSLSWGAANAVLLLLLLAWASPTFISINRGVRVMKGHSAFLSGDDLKFAIPKEKDACKVEVVMNEPITQRVGKLTPQVFDCHFLPNEVKYVHNGCPILDEDTVKLRLYRFTERDTFIETFILWVYLLEPDCNIIHMSNNVLEVPEFNGLSQAIDKNLLRFDYDRMASLECTVSLDTARTRLPAHGQMVLGEPRPEEPRGDQPHSFFPESQLRAKLKCPGGSCTPGLKKIGSLKVSCEEFLLMGLRYQHLDPPSPNIDYISIQLDLTDTRSKIVYKSESAWLPVYIRAGIPNQIPKAAFMAVFILEVDQFILTSLTTSVLDCEEDETPKPLLVFNITKAPLQGYVTHLLDHTRPISSFTWKDLSDMQIAYQPPNSSHSERRHDEVELEVYDFFFERSAPMTVHISIRTADTNAPRVSWNTGLSLLEGQSRAITWEQFQVVDNDDIGAVRLVTVGGLQHGWLTLRGGKGFLFTVADLQAGVVRYHHDDSDSTKDFVVFRIFDGHHSIRHKFPINVLPKDDSPPFLITNVVIELEEGQTILIQGSMLRASDVDASDDYIFFNITKPPQAGEIMKKPGPGLIGYPVHGFLQRDLFNGIIYYRHFGGEIFEDSFQFVLWDSHEPPNLSVPQVATIHITPVDDQLPKEAPGVSRHLVVKETEVAYITKKQLHFIDSESYDRELVYTITTPPFFSFSHRHLDAGKLFMVDSIPKVVKNPTALELRSFTQHAVNYMKVAYMPPMQDIGPHCRDVQFTFSVSNQHGGTLHGICFNITILPVDNQVPEAFTNPLKVTEGGQSIISTEHILISDADTKLDNIDLSLRELPLHGRVELNGFPLNSGGTFSWGDLHTLKVRYQHDGTEVLQDDLLLEVTDGTNSAEFVLHVEVFPVNDEPPVLKADLMPVMNCSEGGEVVITSEYIFATDVDSDNLKLMFVIAREPQHGVVRRAGVTVDQFSQRDVISEAVTYKHTGGEIGLMPCFDTITLVVSDGEAGPFVNGCCYNGPNPSVPLHASFPVYDLNITVYPVDNQPPSIAIGPVFVVDEGCSTALTVNHLSATDPDTAADDLEFVLVSPPQFGYLENILPSVGFEKSNIGISIDSFQWKDMNAFHINYVQSRHLRIEPTADQFTVYVTDGKHHSLEIPFSIIINPTNDEAPDFVVQNITVCEGQMKELDSSIISAVDLDIPQDALLFSITQKPRHGLLIDRGFSKDFSENKQPANPHQKHAPVHSFSMELLKTGMRLTYMHDDSESLADDFTIQLSDGKHKILKTISVEVIPVNDEKPMLSKKAEIAMNMGETRIISSAILSAIDEDSPREKIYYVFERLPQNGQLQLKIGRDWVPLSPGMKCTQEEVDLNLLRYTHTGAMDSQNQDSFTFYLWDGNNRSPALDCQITIKDMEKGDIVILTKPLVVSKGDRGFLTTTTLLAVDGTDKPEELLYVITSPPRYGQIEYVHYPGVPITNFSQMDVVGQTVCYVHKSKVTVSSDRFRFIISNGLRTEHGVFEITLETVDRALPVVTRNKGLRLAQGAVGLLSPDLLQLTDPDTPAENLTFLLVQLPQHGQLYLWGTGLLQHNFTQQDVDSKNVAYRHSGGDSQTDCFTFMATDGTNQGFIVNGRVWEEPVLFTIQVDQLDKTAPRITLLHSPSQVGLLKNGCYGIYITSRVLKASDPDTEDDQIIFKILQGPKHGHLENTTTGEFIHEKFSQKDLNSKTILYIINPSLEVNSDTVEFQIMDPTGNSATPQILELKWSHIEWSQTEYEVCENVGLLPLEIIRRGYSMDSAFVGIKVNQVSAAVGKDFTVIPSKLIQFDPGMSTKMWNIAITYDGLEEDDEVFEVILNSPVNAVLGTKTKAAVKILDSKGGQCHPSYSSNQSKHSTWEKGIWHLLPPGSSSSTTSGSFHLERRPLPSSMQLAVIRGDTLRGFDSTDLSQRKLRTRGNGKTVRPSSVYRNGTDIIYNYHGIVSLKLEDDSFPTHKRKAKVSIISQPQKTIKVAELPQADKVESTTDSHFPRQDQLPSFPKNCTLELKGLFHFEEGIQKLYQCNGIAWKAWSPQTKDVEDKSCPAGWHQHSGYCHILITEQKGTWNAAAQACREQYLGNLVTVFSRQHMRWLWDIGGRKSFWIGLNDQVHAGHWEWIGGEPVAFTNGRRGPSQRSKLGKSCVLVQRQGKWQTKDCRRAKPHNYVCSRKL

SEQ ID NO: 5554 - protein, 2179 aa, Homo sapiens; identical to SEQ ID NO: 5553

SEQ ID NO: 5555 - protein, 1335 aa, Homo sapiens
MNSLSWGAANAVLLLLLLAWASPTFISINRGVRVMKGHSAFLSGDDLKFAIPKEKDACKVEVVMNEPITQRVGKLTPQVFDCHFLPNEVKYVHNGCPILDEDTVKLRLYRFTERDTFIETFILWVYLLEPDCNIIHMSNNVLEVPEFNGLSQAIDKNLLRFDYDRMASLECTVSLDTARTRLPAHGQMVLGEPRPEEPRGDQPHSFFPESQLRAKLKCPGGSCTPGLKKIGSLKVSCEEFLLMGLRYQHLDPPSPNIDYISIQLDLTDTRSKIVYKSESAWLPVYIRAGIPNQIPKAAFMAVFILEVDQFILTSLTTSVLDCEEDETPKPLLVFNITKAPLQGYVTHLLDHTRPISSFTWKDLSDMQIAYQPPNSSHSERRHDEVELEVYDFFFERSAPMTVHISIRTADTNAPRVSWNTGLSLLEGQSRAITWEQFQVVDNDDIGAVRLVTVGGLQHGWLTLRGGKGFLFTVADLQAGVVRYHHDDSDSTKDFVVFRIFDGHHSIRHKFPINVLPKDDSPPFLITNVVIELEEGQTILIQGSMLRASDVDASDDYIFFNITKPPQAGEIMKKPGPGLIGYPVHGFLQRDLFNGIIYYRHFGGEIFEDSFQFVLWDSHEPPNLSVPQVATIHITPVDDQLPKEAPGVSRHLVVKETEVAYITKKQLHFIDSESYDRELVYTITTPPFFSFSHRHLDAGKLFMVDSIPKVVKNPTALELRSFTQHAVNYMKVAYMPPMQDIGPHCRDVQFTFSVSNQHGGTLHGICFNITILPVDNQVPEAFTNPLKVTEGGQSIISTEHILISDADTKLDNIDLSLRELPLHGRVELNGFPLNSGGTFSWGDLHTLKVRYQHDGTEVLQDDLLLEVTDGTNSAEFVLHVEVFPVNDEPPVLKADLMPVMNCSEGGEVVITSEYIFATDVDSDNLKLMFVIAREPQHGVVRRAGVTVDQFSQRDVISEAVTYKHTGGEIGLMPCFDTITLVVSDGEAGPFVNGCCYNGPNPSVPLHASFPVYDLNITVYPVDNQPPSIAIGPVFVVDEGCSTALTVNHLSATDPDTAADDLEFVLVSPPQFGYLENILPSVGFEKSNIGISIDSFQWKDMNAFHINYVQSRHLRIEPTADQFTVYVTDGKHHSLEIPFSIIINPTNDEAPDFVVQNITVCEGQMKELDSSIISAVDLDIPQDALLFSITQKPRHGLLIDRGFSKDFSENKQPANPHQKHAPVHSFSMELLKTGMRLTYMHDDSESLADDFTIQLSDGKHKILKTISVEVIPVNDEKPMLSKKAEIAMNMGETRIISSAILSAIDEDSPREKIYYVFERLPQNGQLQLKECQLRCGI

SEQ ID NO: 5556 - protein, 715 aa, Homo sapiens
MVTQESMLKAALPLFTRFIISNGLRTEHGVFEITLETVDRALPVVTRNKGLRLAQGAVGLLSPDLLQLTDPDTPAENLTFLLVQLPQHGQLYLWGTGLLQHNFTQQDVDSKNVAYRHSGGDSQTDCFTFMATDGTNQGFIVNGRVWEEPVLFTIQVDQLDKTAPRITLLHSPSQVGLLKNGCYGIYITSRVLKASDPDTEDDQIIFKILQGPKHGHLENTTTGEFIHEKFSQKDLNSKTILYIINPSLEVNSDTVEFQIMDPTGNSATPQILELKWSHIEWSQTEYEVCENVGLLPLEIIRRGYSMDSAFVGIKVNQVSAAVGKDFTVIPSKLIQFDPGMSTKMWNIAITYDGLEEDDEVFEVILNSPVNAVLGTKTKAAVKILDSKGGQCHPSYSSNQSKHSTWEKGIWHLLPPGSSSSTTSGSFHLERRPLPSSMQLAVIRGDTLRGFDSTDLSQRKLRTRGNGKTVRPSSVYRNGTDIIYNYHGIVSLKLEDDSFPTHKRKAKVSIISQPQKTIKVAELPQADKVESTTDSHFPRQDQLPSFPKNCTLELKGLFHFEEGIQKLYQCNGIAWKAWSPQTKDVEDKSCPAGWHQHSGYCHILITEQKGTWNAAAQACREQYLGNLVTVFSRQHMRWLWDIGGRKSFWIGLNDQVHAGHWEWIGGEPVAFTNGRRGPSQRSKLGKSCVLVQRQGKWQTKDCRRAKPHNYVCSRKL

SEQ ID NO: 5557 - protein, 2139 aa, Homo sapiens
MAGASRHPTGTPRQLLVALACLLLSRPALQGRASSLGTEPDPALYLPARGALDGTRPDGPSVLIANPGLRVPLGRSLWLDPLRDLVIGVQPGDRCEVTVLDALPRLKGALSPRRFPCTFGPRQVQYTHFGSHSPGRARVLLQLRYDAPTHTLVLPFTLAVDLVFSQLELVTRNRPLVVEKLRSWSRAIDRRVLDFASLKSGATATRRCRLTPLPHEDGPLPKYGRLVDAVGAPLPRGKGVDCEAFLRAGVRYQHTATSSPNRDYVPMMVELLGPEGQDAGSAGVLVREHFQLLVRIRGGAENTPPRPSFMATMMMEVDPLVLTALTPDALAAEDVESDPGDLVFNILNAPTHPPGHPGQQGYVVSTDDPLGLPVSFFTQQELRELKIAYQPPAENSHGERLFQLELEVVDGDGAASDPFAFMVTVKSMNTLVPVASHNRGLVLFEGQSRPLSSTHSIPISDKDNLEEVKMAAVRGLRHGQLVVFGAPAGCKYFTPADLAAGRVVYQHDGSNTYSDNIIFRMEDGHHQVDFLFPLTILPVDDEPPMVNTNTGLSLTEGQVVQISPFVLSATDIDSEDSTIHFVLENQPLKGNEEEPQWELAPGSSHSGHYLGDLLLQQAELPLSTEDEDWHYMEKEGLYEKVVTEWLQRDIMEGRLFYRHLGPHSPQSVMVQLAFHVQDDHDPPNLSKQHIFTIKVQPVDILSPQLYPGTTLEMTVQEYQLTHFQKNFLRYIDQDSDDQNLWYTLLTLPTDTDGNHQVRAGEIVLTDSPDTLIMHFTQAQVNQHKVAYQPPQKLGIAPRVVQFTYQVEDAAGNSVPGTFTLFLQPVDNQPPEVTNRGFAILEGGSFNLSSNELHVTDPDTDIDQIVFILVRGPQHGHLQYFKRCMVPGESFMQADVINGSVSYQHGRDQTTTSDTFHLEVSDGVHHIPITIPISVHPNVANRSPRISLRSSSLLDVSIDVLENKATEITMGVIHGKRKDVGDLMLSFIVKDSPKLGTILVNGLPTERFTQEDLINGRVAYAHTAGEVGFQKQHDAFSLILSKDSYQWVVGNSIIEKVQVQVTVLPVDNVGPKVFVGESFIVYEGEKNSLTLQHLHVEDVDTHQDELLCTVTSQPASGYLEKIASAPGSKMSQSGSPISAFSLRDIQVRHINYVQSIHKGVEPQEDQFTFYCSDGINFSPNVFFPIIILPTNDEQPKLFAHEFKVLEGMSLVIDTQLLNGADADLPPNELHFQLTALPRHGRIIQQLATGSQPIHSFTLKEIQEASTIVYEHDDSETKEDSFEVWLSDGKHTTHRKVPIVVTLVDDETPHLTVNNGLKVEKGHSEIITNRILKATDLDSDDKSLSFVLHSGPQQGLLQRLRKPRGEVRNNLTLGMNFTQDEINRGLICYIHTGQEGIVDIIKFDVTDGVNTLTDHYFYVTIGNLDSVFPEVISKRITLIEGARVTLTNNLLTNSDINSSDEHHFSITRAPSLGHLESSDYAGEPIASFTQLQLASNKISYVHTSNDEKKMDSFEFQVIGELYPVFRTFRIFITDVDNKKPILTIHRLTLQKEDSQLITLLELTVEDSDTPDDLILFTITQVPMHGKILYNGSRPVTTFTKQDLNKNLISYKHDGSETTEDSFSLTVTDGTHTDFYVLPDTALATHKPQVMRVQIRSLDNRLPQITTNRGAPALKRLHTGHMGFLITSKSLKAEDQDSPHRLLKYKVTRGPEHGFIIKTGLGNQSTRVFTQADIDEMKISYVLNEGSNASKDIFYFSVEDNGGNKLTNQPFHLNWAWICLEKEYYIVDEDSTFLEVTLTRRGYLGETSFISIGTKDETAKKDKDFKWKTNKQIQFNPGQTTATWRVRIIPDNEYETSETFQIILSEPLMAVLEFPEMATVEIVDPGDESTVYIPEAEYKIEEDIGELLIPVRRSGDASQELIVICSTRQGSATGTISSTVLFSDYISRPEDHTSILHFDKNETQKTCQVLIIDDSLYEEEESFSVSLRLPVGGQLGARFPTTKVTILADRYDEPVLHFGDAEYHVNESARYVEVCVWRRGTDLSQPSSIAVRSRKSEQESAEAGTDYVGISRNLDFAPGVRMQTFQVTILDDLGQPTLEGPEKFELLLQMPMGAVLGEPNKTTIFIEDTITDCKQSACSSFD

SEQ ID NO: 5558 - protein, 1284 aa, Homo sapiens
MHVFIVGMSLSSVTLASALQVRGEALSEEEIWSLLFLAAEQLLEDLRNDSSDYVVCPWSALLSAAGSLSFQGRVSHIEAAPFKAPELLQGQSEDEQPDASQPLQLCEPLHSILLTMCEDQPHRRCTLQSVLEACRVHEKEVSVYPAPAGLHIRRLVGLVLGTISEVEKRVVEESSSVQQNRSYLLRKRLRGTSSESPAAQAPECLHPCRVSERSTETQSSPEPHWSTLTHSHCSLLVNRALPGADPQDQQAGRRLSSGSVHSAADSSWPTTPSQRGFLQRRSKFSRPEFILLAGEAPMTLHLPGSVVTKKGKSYLALRDLCVVLLNGQHLEVKCDVESTVGAVFNAVTSFANLEELTYFGLAYMKSKEFFFLDSETRLCKIAPEGWREQPQKTSMNTFTLFLRIKFFVSHYGLLQHSLTRHQFYLQLRKDILEERLYCNEEILLQLGVLALQAEFGNYPKEVESKPYFHVEDYIPASLIERMTALRVQVEVSEMHRLSSALWGEDAELKFLRVTQQLPEYGVLVHQVFSEKRRPEEEMALGICAKGVIVYEVKNNSRIAMLRFQWRETGKISTYQKKFTITSSVTGKKHTFVTDSAKTSKYLLDLCSAQHGFNAQMGSGQPSHVLFDHDKFVQMANLSPAHQARSKPLIWIQRLSCSENELFVSRLQGAAGGLLSTSMDNFNVDGSKEAGAEGIGRSPCTGREQLKSACVIQKPMTWDSLSGPPVQSMHAGSKNNRRKSFIAEPGREIVRVTLKRDPHRGFGFVINEGEYSGQADPGIFISSIIPGGPAEKAKTIKPGGQILALNHISLEGFTFNMAVRMIQNSPDNIELIISQSKGVGGNNPDEEKNSTANSGVSSTDILSFGYQGSLLSHTQDQDRNTEELDMAGVQSLVPRLRHQLSFLPLKGAGSSCPPSPPEISAGEIYFVELVKEDGTLGFSVTGGINTSVPYGGIYVKSIVPGGPAAKEGQILQGDRLLQVDGVILCGLTHKQAVQCLTGPGQVARLVLERRVPRSTQQCPSANDSMGDERTAVSLVTALPGRPSSCVSVTDGPKFEVKLKKNANGLGFSFVQMEKESCSHLKSDLVRIKRLFPGQPAEENGAIAAGDIILAVNGRSTEGLIFQEVLHLLRGAPQEVTLLLCRPPPGALPELEQEWQTPELSADKEFTRATCTDSCTSPILDQEDSWRDSASPDAGEGLGLRPESSQKAIREAQWGQNRERPWASSLTHSPESHPHLCKLHQERDESTLATSLEKDVRQNCYSVCDIMRLGRYSFSSPLTRLSTDIF

SEQ ID NO: 5559 - protein, 66 aa, Homo sapiens
MQPLTKDAGMSLSSVTLASALQVRGEALSEEEIWSLLFLAAEQLLEDLRNAPAALRAPALHPADHV

SEQ ID NO: 5560 - protein, 1309 aa, Homo sapiens
MQPLTKDAGMSLSSVTLASALQVRGEALSEEEIWSLLFLAAEQLLEDLRNDSSDYVVCPWSALLSAAGSLSFQGRVSHIEAAPFKAPELLQGQSEDEQPDASQMHVYSLGMTLYWSAGFHVPPHQPLQLCEPLHSILLTMCEDQPHRRCTLQSVLEACRVHEKEVSVYPAPAGLHIRRLVGLVLGTISEVEKRVVEESSSVQQNRSYLLRKRLRGTSSESPAAQAPECLHPCRVSERSTETQSSPEPHWSTLTHSHCSLLVNRALPGADPQDQQAGRRLSSGSVHSAADSSWPTTPSQRGFLQRRSKFSRPEFILLAGEAPMTLHLPGSVVTKKGKSYLALRDLCVVLLNGQHLEVKCDVESTVGAVFNAVTSFANLEELTYFGLAYMKSKEFFFLDSETRLCKIAPEGWREQPQKTSMNTFTLFLRIKFFVSHYGLLQHSLTRHQFYLQLRKDILEERLYCNEEILLQLGVLALQAEFGNYPKEQVESKPYFHVEDYIPASLIERMTALRVQVEVSEMHRLSSALWGEDAELKFLRVTQQLPEYGVLVHQVFSEKRRPEEEMALGICAKGVIVYEVKNNSRIAMLRFQWRETGKISTYQKKFTITSSVTGKKHTFVTDSAKTSKYLLDLCSAQHGFNAQMGSGQPSHVLFDHDKFVQMANLSPAHQARSKPLIWIQRLSCSENELFVSRLQGAAGGLLSTSMDNFNVDGSKEAGAEGIGRSPCTGREQLKSACVIQKPMTWDSLSGPPVQSMHAGSKNNRRKSFIAEPGREIVRVTLKRDPHRGFGFVINEGEYSGQADPGIFISSIIPGGPAEKAKTIKPGGQILALNHISLEGFTFNMAVRMIQNSPDNIELIISQSKGVGGNNPDEEKNSTANSGVSSTDILSFGYQGSLLSHTQDQDRNTEELDMAGVQSLVPRLRHQLSFLPLKGAGSSCPPSPPEISAGEIYFVELVKEDGTLGFSVTGGINTSVPYGGIYVKSIVPGGPAAKEGQILQGDRLLQVDGVILCGLTHKQAVQCLTGPGQVARLVLERRVPRSTQQCPSANDSMGDERTAVSLVTALPGRPSSCVSVTDGPKFEVKLKKNANGLGFSFVQMEKESCSHLKSDLVRIKRLFPGQPAEENGAIAAGDIILAVNGRSTEGLIFQEVLHLLRGAPQEVTLLLCRPPPGALPELEQEWQTPELSADKEFTRATCTDSCTSPILDQEDSWRDSASPDAGEGLGLRPESSQKAIREAQWGQNRERPWASSLTHSPESHPHLCKLHQERDESTLATSLEKDVRQNCYSVCDIMRLGRYSFSSPLTRLSTDIF

SEQ ID NO: 5561 - protein, 1397 aa, Homo sapiens
MQPLTKDAGMSLSSVTLASALQVRGEALSEEEIWSLLFLAAEQLLEDLRNDSSDYVVCPWSALLSAAGSLSFQGRVSHIEAAPFKAPELLQGQSEDEQPDASQMHVYSLGMTLYWSAGFHVPPHQPLQLCEPLHSILLTMCEDQPHRRCTLQSVLEACRVHEKEVSVYPAPAGLHIRRLVGLVLGTISEVEKRVVEESSSVQQNRSYLLRKRLRGTSSESPAAQAPECLHPCRVSERSTETQSSPEPHWSTLTHSHCSLLVNRALPGADPQDQQAGRRLSSGSVHSAADSSWPTTPSQRGFLQRRSKFSRPEFILLAGEAPMTLHLPGSVVTKKGKSYLALRDLCVVLLNGQHLEVKCDVESTVGAVFNAVTSFANLEELTYFGLAYMKSKEFFFLDSETRLCKIAPEGWREQPQKTSMNTFTLFLRIKFFVSHYGLLQHSLTRHQFYLQLRKDILEERLYCNEEILLQLGVLALQAEFGNYPKEQVESKPYFHVEDYIPASLIERMTALRVQVEVSEMHRLSSALWGEDAELKFLRVTQQLPEYGVLVHQVFSEKRRPEEEMALGICAKGVIVYEVKNNSRIAMLRFQWRETGKISTYQKKFTITSSVTGKKHTFVTDSAKTSKYLLDLCSAQHGFNAQMGSGQPSHVLFDHDKFVQMANLSPAHQARSKPLIWIQRLSCSENELFVSRLQGAAGGLLSTSMDNFNVDGSKEAGAEGIGRSPCTGREQLKSACVIQKPMTWDSLSGPPVQSMHAGSKNNRRKSFIAEPGREIVRVTLKRDPHRGFGFVINEGEYSGQADPGIFISSIIPGGPAEKAKTIKPGGQILALNHISLEGFTFNMAVRMIQNSPDNIELIISQSKGVGGNNPDEEKNSTANSGVSSTDILSFGYQGSLLSHTQDQDRNTEELDMAGVQSLVPRLRHQLSFLPLKGAGSSCPPSPPEISAGEIYFVELVKEDGTLGFSVTGGINTSVPYGGIYVKSIVPGGPAAKEGQILQGDRLLQVDGVILCGLTHKQAVQCLTGPGQVARLVLERRVPRSTQQCPSANDSMGDERTAVSLVTALPGRPSSCVSVTDGPKFEVKLKKNANGLGFSFVQMEKESCSHLKSDLVRIKRLFPGQPAEENGAIAAGDIILAVNGRSTEGLIFQEVLHLLRGAPQEVTLLLCRPPPGALPELEQEWQTPELSADKEFTRATCTDSCTSPILDQEDSWRDSASPDAGEGLGLRPESSQKAIREAQWGQNRERPWASSLTHSPESHPHLCKLHQERDESTLATSLEKDVRQNCYSVCDIMRLGSPELDGEDGEGDMYHPCGAPSPTSEDEEYLTINSTCQGQLPCEECLEADSGTIPLPQFCSWGTVPESLPPEESPESGSEWEDLEEPVALEYGALRSLSFGGLNV

SEQ ID NO: 5562 - protein, 325 aa, Homo sapiens
MVCGSPGGMLLLRAGLLALAALCLLRVPGARAAACEPVRIPLCKSLPWNMTKMPNHLHHSTQANAILAIEQFEGLLGTHCSPDLLFFLCAMYAPICTIDFQHEPIKPCKSVCERARQGCEPILIKYRHSWPENLACEELPVYDRGVCISPEAIVTADGADFPMDSSNGNCRGASSERCKCKPIRATQKTYFRNNYNYVIRAKVKEIKTKCHDVTAVVEVKEILKSSLVNIPRDTVNLYTSSGCLCPPLNVNEEYIIMGYEDEERSRLLLVEGSIAEKWKDRLGKKVKRWDMKLRHLGLSKSDSSNSDSTQSQKSGRNSNPRQARN

SEQ ID NO: 5563 - protein, 129 aa, Homo sapiens
MKTLQFFFLFCCWKAICCNSCELTNITIAIEKEECRFCISINTTWCAGYCYTRDLVYKDPARPKIQKTCTFKELVYETVRVPGCAHHADSLYTYPVATQCHCGKCDSDSTDCTVRGLGPSYCSFGEMKE

SEQ ID NO: 5564 - protein, 129 aa, Homo sapiens; identical to SEQ ID NO: 5563

SEQ ID NO: 5565 - protein, 129 aa, Homo sapiens; identical to SEQ ID NO: 5563

SEQ ID NO: 5566 - protein, 695 aa, Homo sapiens
MALLLVSLLAFLSLGSGCHHRICHCSNRVFLCQESKVTEIPSDLPRNAIELRFVLTKLRVIQKGAFSGFGDLEKIEISQNDVLEVIEADVFSNLPKLHEIRIEKANNLLYINPEAFQNLPNLQYLLISNTGIKHLPDVHKIHSLQKVLLDIQDNINIHTIERNSFVGLSFESVILWLNKNGIQEIHNCAFNGTQLDELNLSDNNNLEELPNDVFHGASGPVILDISRTRIHSLPSYGLENLKKLRARSTYNLKKLPTLEKLVALMEASLTYPSHCCAFANWRRQISELHPICNKSILRQEVDYMTQARGQRSSLAEDNESSYSRGFDMTYTEFDYDLCNEVVDVTCSPKPDAFNPCEDIMGYNILRVLIWFISILAITGNIIVLVILTTSQYKLTVPRFLMCNLAFADLCIGIYLLLIASVDIHTKSQYHNYAIDWQTGAGCDAAGFFTVFASELSVYTLTAITLERWHTITHAMQLDCKVQLRHAASVMVMGWIFAFAAALFPIFGISSYMKVSICLPMDIDSPLSQLYVMSLLVLNVLAFVVICGCYIHIYLTVRNPNIVSSSSDTRIAKRMAMLIFTDFLCMAPISFFAISASLKVPLITVSKAKILLVLFHPINSCANPFLYAIFTKNFRRDFFILLSKCGCYEMQAQIYRTETSSTVHNTHPRNGHCSSAPRVTSGSTYILVPLSHLAQN

SEQ ID NO: 5567 - protein, 278 aa, Homo sapiens
MALLLVSLLAFLSLGSGCHHRICHCSNRVFLCQESKVTEIPSDLPRNAIELRFVLTKLRVIQKGAFSGFGDLEKIEISQNDVLEVIEADVFSNLPKLHEIRIEKANNLLYINPEAFQNLPNLQYLLISNTGIKHLPDVHKIHSLQKVLLDIQDNINIHTIERNSFVGLSFESVILWLNKNGIQEIHNCAFNGTQLDELNLSDNNNLEELPNDVFHGASGPVILSELHPICNKSILRQEVDYMTQARGQRSSLAEDNESSYSRGFDMTYTEFDYDLCNE

SEQ ID NO: 5568 - protein, 669 aa, Homo sapiens
MALLLVSLLAFLSLGSGCHHRICHCSNRVFLCQESKVTEIPSDLPRNAIELRFVLTKLRVIQKGAFSGFGDLEKIEISQNDVLEVIEADVFSNLPKLHEIRIEKANNLLYINPEAFQNLPNLQYLLISNTGIKHLPDVHKIHSLQKVLLWLNKNGIQEIHNCAFNGTQLDELNLSDNNNLEELPNDVFHGASGPVILDISRTRIHSLPSYGLENLKKLRARSTYNLKKLPTLEKLVALMEASLTYPSHCCAFANWRRQISELHPICNKSILRQEVDYMTQARGQRSSLAEDNESSYSRGFDMTYTEFDYDLCNEVVDVTCSPKPDAFNPCEDIMGYNILRVLIWFISILAITGNIIVLVILTTSQYKLTVPRFLMCNLAFADLCIGIYLLLIASVDIHTKSQYHNYAIDWQTGAGCDAAGFFTVFASELSVYTLTAITLERWHTITHAMQLDCKVQLRHAASVMVMGWIFAFAAALFPIFGISSYMKVSICLPMDIDSPLSQLYVMSLLVLNVLAFVVICGCYIHIYLTVRNPNIVSSSSDTRIAKRMAMLIFTDFLCMAPISFFAISASLKVPLITVSKAKILLVLFHPINSCANPFLYAIFTKNFRRDFFILLSKCGCYEMQAQIYRTETSSTVHNTHPRNGHCSSAPRVTSGSTYILVPLSHLAQN

SEQ ID NO: 5569 - protein, 152 aa, Homo sapiens
MALLLVSLLAFLSLGSGCHHRICHCSNRVFLCQESKVTEIPSDLPRNAIELRFVLTKLRVIQKGAFSGFGDLEKIEISQNDVLEVIEADVFSNLPKLHEIRIEKANNLLYINPEAFQNLPNLQYLSFSSFVLENAKVENGDHRAFSDRTNAL

SEQ ID NO: 5570 - protein, 215 aa, Homo sapiens
GPVCGLDGKTYRNECALLKARCKEQPELEVQYQGRCKKTCRDVFCPGSSTCVVDQTNNAYCVTCNRICPEPASSEQYLCGNDGVTYSSACHLRKATCLLGRSIGLAYEGKCITKSCEDIQCTGGKKCLWDFKVGRGRCSLCDELCPDSKSDEPVCASDNATYASECAMKEAACSSGVLLEVKHSGSCNSISEDTEEEEEDEDQDYSFPISSILEW

SEQ ID NO: 5571 - protein, 344 aa, Homo sapiens
MVRARHQPGGLCLLLLLLCQFMEDRSAQAGNCWLRQAKNGRCQVLYKTELSKEECCSTGRLSTSWTEEDVNDNTLFKWMIFNGGAPNCIPCKETCENVDCGPGKKCRMNKKNKPRCVCAPDCSNITWKGPVCGLDGKTYRNECALLKARCKEQPELEVQYQGRCKKTCRDVFCPGSSTCVVDQTNNAYCVTCNRICPEPASSEQYLCGNDGVTYSSACHLRKATCLLGRSIGLAYEGKCIKAKSCEDIQCTGGKKCLWDFKVGRGRCSLCDELCPDSKSDEPVCASDNATYASECAMKEAACSSGVLLEVKHSGSCNSISEDTEEEEEDEDQDYSFPISSILEW

SEQ ID NO: 5572 - protein, 317 aa, Homo sapiens
MVRARHQPGGLCLLLLLLCQFMEDRSAQAGNCWLRQAKNGRCQVLYKTELSKEECCSTGRLSTSWTEEDVNDNTLFKWMIFNGGAPNCIPCKETCENVDCGPGKKCRMNKKNKPRCVCAPDCSNITWKGPVCGLDGKTYRNECALLKARCKEQPELEVQYQGRCKKTCRDVFCPGSSTCVVDQTNNAYCVTCNRICPEPASSEQYLCGNDGVTYSSACHLRKATCLLGRSIGLAYEGKCIKAKSCEDIQCTGGKKCLWDFKVGRGRCSLCDELCPDSKSDEPVCASDNATYASECAMKEAACSSGVLLEVKHSGSCN

SEQ ID NO: 5573 - protein, 102 aa, Homo sapiens
  SITE 1: note = misc_feature - Xaa can be any naturally occurring amino acid
XSACHLRKATCLLGRSIGLAYEGKCITKSCEDIQCTGGKKCLWDFKVGRGRCSLCDELCPDSKSDEPVCASDNATYASECAMKEAACSSGVLLEVKHSGSCN

SEQ ID NO: 5574 - protein, 140 aa, Homo sapiens
MWKRWLALALALVAVAWVRAEEELRSKSKICANVFCGAGRECAVTEKGEPTCLCIEQCKPHKRPVCGSNGKTYLNHCELHRDACLTGSKIQVDYDGHCKEKKSVSPSASPVVCYQSNRDELRRRIIQWLEAEIIPDGWFS

SEQ ID NO: 5575 - protein, 308 aa, Homo sapiens
MWKRWLALALALVAVAWVRAEEELRSKSKICANVFCGAGRECAVTEKGEPTCLCIEQCKPHKRPVCGSNGKTYLNHCELHRDACLTGSKIQVDYDGHCKEKKSVSPSASPVVCYQSNRDELRRRIIQWLEAEIIPDGWFSKGSNYSEILDKYFKNFDNGDSRLDSSEFLKFVEQNETAINITTYPDQENNKLLRGLCVDALIELSDENADWKLSFQEFLKCLNPSFNPPEKKCALEDETYADGAETEVDCNRCVCACGNWVCTAMTCDGKNQKGAQTQTEEEMTRYVQELQKHQETAEKTKRVSTKEI

SEQ ID NO: 5576 - protein, 273 aa, Homo sapiens
MWKRWLALALALVAVAWVRAEQCKPHKRPVCGSNGKTYLNHCELHRDACLTGSKIQVDYDGHCKEKKSVSPSASPVVCYQSNRDELRRRIIQWLEAEIIPDGWFSKGSNYSEILDKYFKNFDNGDSRLDSSEFLKFVEQNETAINITTYPDQENNKLLRGLCVDALIELSDENADWKLSFQEFLKCLNPSFNPPEKKCALEDETYADGAETEVDCNRCVCACGNWVCTAMTCDGKNQKGAQTQTEEEMTRYVQELQKHQETAEKTKRVSTKEI

SEQ ID NO: 5577 - protein, 20 aa, Homo sapiens
  SITE 1: note = misc_feature - Xaa can be any naturally occurring amino acid
XSFQEFLKCLNPSFNPPEKK

SEQ ID NO: 5578 - protein, 84 aa, Homo sapiens
MLGGRPRCECAPDCSGLPARLQVCGSDGATYRDECELRAARCRGHPDLSVMYRGRCRKSCEHVVCPRPQSCVVDQTGSAHCVVC

SEQ ID NO: 5579 - protein, 263 aa, Homo sapiens
MRPGAPGPLWPLPWGALAWAVGFVSSMGSGNPAPGGVCWLQQGQEATCSLVLQTDVTRAECCASGNIDTAWSNLTHPGNKINLLGFLGLVHCLPCKDSCDGVECGPGKACRMLGGRPRCECAPDCSGLPARLQVCGSDGATYRDECELRAARCRGHPDLSVMYRGRCRKSCEHVVCPRPQSCVVDQTGSAHCVVCRAAPCPVPSSPGQELCGNNNVTYISSCHMRQATCFLGRSIGVRHAGSCAGTPEEPPGGESAEEEENFV

SEQ ID NO: 5580 - protein, 92 aa, Homo sapiens
MRQATCFLGRSIGVRHAGSCAGADAGRGHRPVLGAGEPPALRPQCSYRPLQAPLRSRQVVSLQKRKRTSCEPAGQAWAWCPRPPIIPCYLLP

SEQ ID NO: 5581 - protein, 40 aa, Homo sapiens
MRQATCFLGRSIGVRHAGSCAGTPEEPPGGESAEEEENFV

SEQ ID NO: 5582 - protein, 40 aa, Homo sapiens; identical to SEQ ID NO: 5581

SEQ ID NO: 5583 - protein, 40 aa, Homo sapiens; identical to SEQ ID NO: 5581

SEQ ID NO: 5584 - protein, 673 aa, Homo sapiens
MKPGGFWLHLTLLGASLPAALGWMDPGTSRGPDVGVGESQAEEPRSFEVTRREGLSSHNELLASCGKKFCSRGSRCVLSLAPEDRVSVTTVTVGLSTVLTCAVHGDLRPPIIWKRNGLTLNFLDLEDINDFGEDDSLYITKVTTIHMGNYTCHASGHEQLFQTHVLQVNVPPVIRVYPESQAQEPGVAASLRCHAEGIPMPRITWLKNGVDVSTQMSKQLSLLANGSELHISSVRYEDTGAYTCIAKNEVGVDEDISSLFIEDSARKTLANILWREEGLSVGNMFYVFSDDGIIVIHPVDCEIQRHLKPTEKIFMSYEEICPQREKNATQPCQWVSAVNVRNRYIYVAQPALSRVLVVDIQAQKVLQSIGVDPLPAKLSYDKSHDQVWVLSWGDVHKSRPSLQVITEASTGQSQHLIRTPFAGVDDFFIPPTNLIINHIRFGFIFNKSDPAVHKVDLETMMPLKTIGLHHHGCVPQAMAHTHLGGYFFIQCRQDSPASAARQLLVDSVTDSVLGPNGDVTGTPHTSPDGRFIVSAAADSPWLHVQEITVRGEIQTLYDLQINSGISDLAFQRSFTESNQYNIYAALHTEPDLLFLELSTGKVGMLKNLKEPPAGPAQPWGGTHRIMRDSGLFGQYLLTPARESLFLINGRQNTLRCEVSGIKGGTTVVWVGEV

SEQ ID NO: 5585 - protein, 842 aa, Homo sapiens
MKPGGFWLHLTLLGASLPAALGWMDPGTSRGPDVGVGESQAEEPRSFEVTRREGLSSHNELLASCGKKFCSRGSRCVLSRKTGEPECQCLEACRPSYVPVCGSDGRFYENHCKLHRAACLLGKRITVIHSKDCFLKGDTCTMAGYARLKNVLLALQTRLQPLQEGDSRQDPASQKRLLVESLFRDLDADGNGHLSSSELAQHVLKKQDLDEDLLGCSPGDLLRFDDYNSDSSLTLREFYMAFQVVQLSLAPEDRVSVTTVTVGLSTVLTCAVHGDLRPPIIWKRNGLTLNFLDLEDINDFGEDDSLYITKVTTIHMGNYTCHASGHEQLFQTHVLQVNVPPVIRVYPESQAQEPGVAASLRCHAEGIPMPRITWLKNGVDVSTQMSKQLSLLANGSELHISSVRYEDTGAYTCIAKNEVGVDEDISSLFIEDSARKTLANILWREEGLSVGNMFYVFSDDGIIVIHPVDCEIQRHLKPTEKIFMSYEEICPQREKNATQPCQWVSAVNVRNRYIYVAQPALSRVLVVDIQAQKVLQSIGVDPLPAKLSYDKSHDQVWVLSWGDVHKSRPSLQVITEASTGQSQHLIRTPFAGVDDFFIPPTNLIINHIRFGFIFNKSDPAVHKVDLETMMPLKTIGLHHHGCVPQAMAHTHLGGYFFIQCRQDSPASAARQLLVDSVTDSVLGPNGDVTGTPHTSPDGRFIVSAAADSPWLHVQEITVRGEIQTLYDLQINSGISDLAFQRSFTESNQYNIYAALHTEPDLLFLELSTGKVGMLKNLKEPPAGPAQPWGGTHRIMRDSGLFGQYLLTPARESLFLINGRQNTLRCEVSGIKGGTTVVWVGEV

SEQ ID NO: 5586 - protein, 157 aa, Homo sapiens
MNPVPQMEMQKSPVFCVAHAGSCRPELFLFGHLGSSWGLDLKEEEPRSFEVTRREGLSSHNELLASCGKKFCSRGSRCVLSRKTGEPECQCLEACRPSYVPVCGSDGRFYENHCKLHRAACLLGKRITVIHSKDCFLKGDTCTMAGYARLKNVLLAL

SEQ ID NO: 5587 - protein, 846 aa, Homo sapiens
MFKCWSVVLVLGFIFLESEGRPTKEGGYGLKSYQPLMRLRHKEKNQESSRVKGFMIQDGPFGSCENKYCGLGRHCVTSRETGQAECACMDLCKRHYKPVCGSDGEFYENHCEVHRAACLKKQKITIVHNEDCFFKGDKCKTTEYSKMKNMLLDLQNQKYIMQENENPNGDDISRKKLLVDQMFKYFDADSNGLVDINELTQVIKQEELGKDLFDCTLYVLLKYDDFNADKHLALEEFYRAFQVIQLSLPEDQKLSITAATVGQSAVLSCAIQGTLRPPIIWKRNNIILNNLDLEDINDFGDDGSLYITKVTTTHVGNYTCYADGYEQVYQTHIFQVNVPPVIRVYPESQAREPGVTASLRCHAEGIPKPQLGWLKNGIDITPKLSKQLTLQANGSEVHISNVRYEDTGAYTCIAKNEAGVDEDISSLFVEDSARKTLANILWREEGLGIGNMFYVFYEDGIKVIQPIECEFQRHIKPSEKLLGFQDEVCPKAEGDEVQRCVWASAVNVKDKFIYVAQPTLDRVLIVDVQSQKVVQAVSTDPVPVKLHYDKSHDQVWVLSWGTLEKTSPTLQVITLASGNVPHHTIHTQPVGKQFDRVDDFFIPTTTLIITHMRFGFILHKDEAALQKIDLETMSYIKTINLKDYKCVPQSLAYTHLGGYYFIGCKPDSTGAVSPQVMVDGVTDSVIGFNSDVTGTPYVSPDGHYLVSINDVKGLVRVQYITIRGEIQEAFDIYTNLHISDLAFQPSFTEAHQYNIYGSSSTQTDVLFVELSSGKVKMIKSLKEPLKAEEWPWNRKNRQIQDSGLFGQYLMTPSKDSLFILDGRLNKLNCEITEVEKGNTVIWVGDA

SEQ ID NO: 5588 - protein, 837 aa, Homo sapiens
MFKCWSVVLVLGFIFLESEGRPTKEGGYGLKSYQPLMRLRHKEKNQESSRVKGFMIQDGPFGSCENKYCGLGRHCVTSRETGQAECACMDLCKRHYKPVCGSDGEFYENHCEVHRAACLKKQKITIVHNEDCFFKGDKCKTTEYSKMKNMLLDLQNQKYIMQENENPNGDDISRKKLLVDQMFKYFDADSNGLVDINELTQVIKQEELGKDLFDCTLYVLLKYDDFNADKHLALEEFYRAFQVIQLSLPEDQKLSITAATVGQSAVLSCAIQGTLRPPIIWKRNNIILNNLDLEDINDFGDDGSLYITKVTTTHVGNYTCYADGYEQVYQTHIFQVNVPPVIRVYPESQAREPGVTASLRCHAEGIPKPQLGWLKNGIDITPKLSKQLTLQANGSEVHISNVRYEDTGAYTCIAKNEAGVDEDISSLFVEDSARKTRLGIGNMFYVFYEDGIKVIQPIECEFQRHIKPSEKLLGFQDEVCPKAEGDEVQRCVWASAVNVKDKFIYVAQPTLDRVLIVDVQSQKVVQAVSTDPVPVKLHYDKSHDQVWVLSWGTLEKTSPTLQVITLASGNVPHHTIHTQPVGKQFDRVDDFFIPTTTLIITHMRFGFILHKDEAALQKIDLETMSYIKTINLKDYKCVPQSLAYTHLGGYYFIGCKPDSTGAVSPQVMVDGVTDSVIGFNSDVTGTPYVSPDGHYLVSINDVKGLVRVQYITIRGEIQEAFDIYTNLHISDLAFQPSFTEAHQYNIYGSSSTQTDVLFVELSSGKVKMIKSLKEPLKAEEWPWNRKNRQIQDSGLFGQYLMTPSKDSLFILDGRLNKLNCEITEVEKGNTVIWVGDA

SEQ ID NO: 5589 - protein, 847 aa, Homo sapiens
MFKCWSVVLVLGFIFLESEGRPTKEGGYGLKSYQPLMRLRHKQEKNQESSRVKGFMIQDGPFGSCENKYCGLGRHCVTSRETGQAECACMDLCKRHYKPVCGSDGEFYENHCEVHRAACLKKQKITIVHNEDCFFKGDKCKTTEYSKMKNMLLDLQNQKYIMQENENPNGDDISRKKLLVDQMFKYFDADSNGLVDINELTQVIKQEELGKDLFDCTLYVLLKYDDFNADKHLALEEFYRAFQVIQLSLPEDQKLSITAATVGQSAVLSCAIQGTLRPPIIWKRNNIILNNLDLEDINDFGDDGSLYITKVTTTHVGNYTCYADGYEQVYQTHIFQVNVPPVIRVYPESQAREPGVTASLRCHAEGIPKPQLGWLKNGIDITPKLSKQLTLQANGSEVHISNVRYEDTGAYTCIAKNEAGVDEDISSLFVEDSARKTLANILWREEGLGIGNMFYVFYEDGIKVIQPIECEFQRHIKPSEKLLGFQDEVCPKAEGDEVQRCVWASAVNVKDKFIYVAQPTLDRVLIVDVQSQKVVQAVSTDPVPVKLHYDKSHDQVWVLSWGTLEKTSPTLQVITLASGNVPHHTIHTQPVGKQFDRVDDFFIPTTTLIITHMRFGFILHKDEAALQKIDLETMSYIKTINLKDYKCVPQSLAYTHLGGYYFIGCKPDSTGAVSPQVMVDGVTDSVIGFNSDVTGTPYVSPDGHYLVSINDVKGLVRVQYITIRGEIQEAFDIYTNLHISDLAFQPSFTEAHQYNIYGSSSTQTDVLFVELSSGKVKMIKSLKEPLKAEEWPWNRKNRQIQDSGLFGQYLMTPSKDSLFILDGRLNKLNCEITEVEKGNTVIWVGDA

SEQ ID NO: 5590 - protein, 138 aa, Homo sapiens
MSSSRVGLRLAACLLNVSEAGRKYIVENIAKAALLDKNGKKHPQVSVLNIFSDQDYKRSVITIATSVDKLGLAEDLVLHVPGCSVFLFGEADLPEKRSLVQRRKQLGWFTRRDFSALQPDLGAAPSQRCGLTACFRAL

SEQ ID NO: 5591 - protein, 147 aa, Homo sapiens
MSSSRVGLRLAACLLNVSEAGRKYIVENIAKAALLDKNGKKHPQVSVLNIFSDQDYKRSVITIATSVDKLGLAEDLVLHVPGCSVFLFGEADLPEKRSLVQRRKQLGWFTRRDFSALQPDLGAAPSQRCGLTGSEHGFCFALFFFFF

SEQ ID NO: 5592 - protein, 114 aa, Homo sapiens
MSSSRVGLRLAACLLNVSEAGRKYIVENIAKAALLDKNGKKHPQVSVLNIFSDQDYKRSVITIATSVDKLGSSVLAACLEAFQAIDMEVQEGIHPCLGAVDLIPIYPLSGVTVE

SEQ ID NO: 5593 - protein, 77 aa, Homo sapiens
MSSSRVGLRLAACLLNVSEAGRKYIVENIAKAALLDKNGKKHPQVSVLNIFSDQDYKRSVITIATSVDKLVDKRNQA

SEQ ID NO: 5594 - protein, 466 aa, Homo sapiens
MRAPGMRSRPAGPALLLLLLFLGAAESVRRAQPPRRYTPDWPSLDSRPLPAWFDEAKFGVFIHWGVFSVPAWGSEWFWWHWQGEGRPQYQRFMRDNYPPGFSYADFGPQFTARFFHPEEWADLFQAAGAKYVVLTTKHHEGFTNWPSPVSWNWNSKDVGPHRDLVGELGTALRKRNIRYGLYHSLLEWFHPLYLLDKKNGFKTQHFVSAKTMPELYDLVNSYKPDLIWSDGEWECPDTYWNSTNFLSWLYNDSPVKDEVVVNDRWGQNCSCHHGGYYNCEDKFKPQSLPDHKWEMCTSIDKFSWGYRRDMALSDVTEESEIISELVQTVSLGGNYLLNIGPTKDGLIVPIFQERLLAVGKWLSINGEAIYASKPWRVQWEKNTTSVWYTSKGSAVYAIFLHWPENGVLNLESPITTSTTKITMLGIQGDLKWSTDPDKGLFISLPQLPPSAVPAEFAWTIKLTGVK

SEQ ID NO: 5595 - protein, 467 aa, Homo sapiens
MRPQELPRLAFPLLLLLLLLLPPPPCPAHSATRFDPTWESLDARQLPAWFDQAKFGIFIHWGVFSVPSFGSEWFWWYWQKEKIPKYVEFMKDNYPPSFKYEDFGPLFTAKFFNANQWADIFQASGAKYIVLTSKHHEGFTLWGSEYSWNWNAIDEGPKRDIVKELEVAIRNRTDLRFGLYYSLFEWFHPLFLEDESSSFHKRQFPVSKTLPELYELVNNYQPEVLWSDGDGGAPDQYWNSTGFLAWLYNESPVRGTVVTNDRWGAGSICKHGGFYTCSDRYNPGHLLPHKWENCMTIDKLSWGYRREAGISDYLTIEELVKQLVETVSCGGNLLMNIGPTLDGTISVVFEERLRQMGSWLKVNGEAIYETHTWRSQNDTVTPDVWYTSKPKEKLVYAIFLKWPTSGQLFLGHPKAILGATEVKLLGHGQPLNWISLEQNGIMVELPQLTIHQMPCKWGWALALTNVI

SEQ ID NO: 5596 - protein, 109 aa, Homo sapiens
QLVETVSCGGNLLMNIGPTLDGTISVVFEERLRQMGSWLKVNGEAIYETHTWRSQNDTVTPDVWYTSKPKEKLVYAIFLKWPTSGQLFLGHPKAILGATEVRGNFTLFL

SEQ ID NO: 5597 - protein, 69 aa, Homo sapiens
KPAHLNANDWATNGVGRKVSHSYGYGLWTQAPWWPWPRIGPQWPPSGSASSTSSPSPKTSGNGSRCGRP

SEQ ID NO: 5598 - protein, 69 aa, Homo sapiens
MELRPWLLWVVAATGTLVLLAADAQGQKVFTNTWAVRIPGGPAVANSVARKHGFLNLGQIFGDYYHFWH

SEQ ID NO: 5599 - protein, 794 aa, Homo sapiens
MELRPWLLWVVAATGTLVLLAADAQGQKVFTNTWAVRIPGGPAVANSVARKHGFLNLGQIFGDYYHFWHRGVTKRSLSPHRPRHSRLQREPQVQWLEQQVAKRRTKRDVYQEPTDPKFPQQWYLSGVTQRDLNVKAAWAQGYTGHGIVVSILDDGIEKNHPDLAGNYDPGASFDVNDQDPDPQPRYTQMNDNRHGTRCAGEVAAVANNGVCGVGVAYNARIGGVRMLDGEVTDAVEARSLGLNPNHIHIYSASWGPEDDGKTVDGPARLAEEAFFRGVSQGRGGLGSIFVWASGNGGREHDSCNCDGYTNSIYTLSISSATQFGNVPWYSEACSSTLATTYSSGNQNEKQIVTTDLRQKCTESHTGTSASAPLAAGIIALTLEANKNLTWRDMQHLVVQTSKPAHLNANDWATNGVGRKVSHSYGYGLLDAGAMVALAQNWTTVAPQRKCIIDILTEPKDIGKRLEVRKTVTACLGEPNHITRLEHAQARLTLSYNRRGDLAIHLVSPMGTRSTLLAARPHDYSADGFNDWAFMTTHSWDEDPSGEWVLEIENTSEANNYGTLTKFTLVLYGTAPEGLPVPPESSGCKTLTSSQACVVCEEGFSLHQKSCVQHCPPGFAPQVLDTHYSTENDVETIRASVCAPCHASCATCQGPALTDCLSCPSHASLDPVEQTCSRQSQSSRESPPQQQPPRLPPEVEAGQRLRAGLLPSHLPEVVAGLSCAFIVLVFVTVFLVLQLRSGFSFRGVKVYTMDRGLISYKGLPPEAWQEECPSDSEEDEGRGERTAFIKDQSAL

SEQ ID NO: 5600 - protein, 794 aa, Homo sapiens; identical to SEQ ID NO: 5599

SEQ ID NO: 5601 - protein, 794 aa, Homo sapiens; identical to SEQ ID NO: 5599

SEQ ID NO: 5602 - protein, 175 aa, Homo sapiens
MELRPWLLWVVAATGTLVLLAADAQGQKVFTNTWAVRIPGGPAVANSVARKHGFLNLGQIFGDYYHFWHRGVTKRSLSPHRPRHSRLQREPQWLEQQVAKRRTKRDVYQEPTDPKFPQQWYLSGVTQRDLNVKAAWAQGYTGHGIVVSILDDGIEKNHPDLAGNYDPGASFDVND

SEQ ID NO: 5603 - protein, 216 aa, Homo sapiens
PNHIHIYSASWGPEDDGKTVDGPARLAEEAFFRGVSQGRGGLGSIFVWASGNGGREHDSCNCDGYTNSIYTLSISSATQFGNVPWYSEACSSTLATTYSSGNQNEKQIVTTDLRQKCTESHTGTSASAPLAAGIIALTLEANKNLTWRDMQHLVVQTSKPAHLNANDWATNGVGRKVSHSYGYGLLDAGAMVALAQNWTTVAPQRKCIIDILTEPK

SEQ ID NO: 5604 - protein, 451 aa, Homo sapiens
MVELGKFERKEFKSSSLQDGHTKMEEAPTHLNSFLKKEGLTFNRKRKWELDSYPIMLWWSPLTGETGRLGQCGADACFFTINRTYLHHHMTKAFLFYGTDFNIDSLPLPRKAHHDWAVFHEESPKNNYKLFHKPVITLFNYTATFSRHSHLPLTTQYLESIEVLKSLRYLVPLQSKNKLRKRLAPLVYVQSDCDPPSDRDSYVRELMTYIEVDSYGECLRNKDLPQQLKNPASMDADGFYRIIAQYKFILAFENAVCDDYITEKFWRPLKLGVVPVYYGSPSITDWLPSNKSAILVSEFSHPRELASYIRRLDSDDRLYEAYVEWKLKGEISNQRLLTALRERKWGVQDVNQDNYIDAFECMVCTKVWANIRLQEKGLPPKRWEAEDTHLSCPEPTVFAFSPLRTPPLSSLREMWISSFEQSKKEAQALRWLVDRNQNFSSQEFWGLVFKD

SEQ ID NO: 5605 - protein, 451 aa, Homo sapiens; identical to SEQ ID NO: 5604

SEQ ID NO: 5606 - protein, 479 aa, Homo sapiens
MVRIQRRKLLASCLCVTATVFLLVTLQVMVELGKFERKEFKSSSLQDGHTKMEEAPTHLNSFLKKEGLTFNRKRKWELDSYPIMLWWSPLTGETGRLGQCGADACFFTINRTYLHHHMTKAFLFYGTDFNIDSLPLPRKAHHDWAVFHEESPKNNYKLFHKPVITLFNYTATFSRHSHLPLTTQYLESIEVLKSLRYLVPLQSKNKLRKRLAPLVYVQSDCDPPSDRDSYVRELMTYIEVDSYGECLRNKDLPQQLKNPASMDADGFYRIIAQYKFILAFENAVCDDYITEKFWRPLKLGVVPVYYGSPSITDWLPSNKSAILVSEFSHPRELASYIRRLDSDDRLYEAYVEWKLKGEISNQRLLTALRERKWGVQDVNQDNYIDAFECMVCTKVWANIRLQEKGLPPKRWEAEDTHLSCPEPTVFAFSPLRTPPLSSLREMWISSFEQSKKEAQALRWLVDRNQNFSSQEFWGLVFKD

SEQ ID NO: 5607 - protein, 492 aa, Homo sapiens
MAAGPIRVVLVLLGVLSVCAASGHGSVAEREAGGEAEWAEPWDGAVFRPPSALGAVGVTRSSGTPRPGREEAGDLPVLLWWSPGLFPHFPGDSERIECARGACVASRNRRALRDSRTRALLFYGTDFRASAAPLPRLAHQSWALLHEESPLNNFLLSHGPGIRLFNLTSTFSRHSDYPLSLQWLPGTAYLRRPVPPPMERAEWRRRGYAPLLYLQSHCDVPADRDRYVRELMRHIPVDSYGKCLQNRELPTARLQDTATATTEDPELLAFLSRYKFHLALENAICNDYMTEKLWRPMHLGAVPVYRGSPSVRDWMPNNHSVILIDDFESPQKLAEFIDFLDKNDEEYMKYLAYKQPGGITNQFLLDSLKHREWGVNDPLLPNYLNGFECFVCDYELARLDAEKAHAASPGDSPVFEPHIAQPSHMDCPVPTPGFGNVEEIPENDSWKEMWLQDYWQGLDQGEALTAMIHNNETEQTKFWDYLHEIFMKRQHL

SEQ ID NO: 5608 - protein, 476 aa, Homo sapiens
MAAGPIRVVLVLLGVLSVCAASGHGSVAEREAGGEAEWAEPWDGAVFRPPSALGAVGVTRSSGTPRPGREEAGDLPVLLWWSPGLFPHFPGDSERIECARGACVASRNRRALRDSRTRALLFYGTDFRASAAPLPRLAHQSWALLHEESPLNNFLLSHGPGIRLFNLTSTFSRHSDYPLSLQWLPGTAYLRRPVPPPMERAEWRRRGYAPLLYLQSHCDVPADRDRYVRELMRHIPVDSYGKCLQNRELPTARLQDTATATTEDPELLAFLSRYKFHLALENAICNDYMTEKLWRPMHLGAVPVYRGSPSVRDWMPNNHSVILIDDFESPQKLAEFIDFLDKNDEEYMKYLAYKQPGGITNQFLLDSLKHREWGVNDPLLPNYLNGFECFVCDYELARLDAEKAHAASPGDSPVFEPHIAQPSHMDCPVPTPGFGNVEEIPENDSSLVQVRDHCICLRFLWPHSEKGRTHNYAAVP

SEQ ID NO: 5609 - protein, 135 aa, Homo sapiens
MNLRKSGTLGHPGSLDETTYERLAEETLDSLAEFFEDLADKPYTFEDYDVSFGSGVLTVKLGGDLGTYVINKQTPNKQIWLSSPSSGPKRYDWTGKNWVYSHDGVSLHELLAAELTKALKTKLDLSSLAYSGKDA

SEQ ID NO: 5610 - protein, 135 aa, Homo sapiens; identical to SEQ ID NO: 5609

SEQ ID NO: 5611 - protein, 171 aa, Homo sapiens
MWTLGRRAVAGLLASPSPAQAQTLTRVPRPAELAPLCGRRGLRTDIDATCTPRRASSNQRGLNQIWNVKKQSVYLMNLRKSGTLGHPGSLDETTYERLAEETLDSLAEFFEDLADKPYTFEDYDVSFGSGVLTVKLGGDLGTYVINKQTPNKQIWLSSPSRLTWLLWLFHP

SEQ ID NO: 5612 - protein, 196 aa, Homo sapiens
MWTLGRRAVAGLLASPSPAQAQTLTRVPRPAELAPLCGRRGLRTDIDATCTPRRASSNQRGLNQIWNVKKQSVYLMNLRKSGTLGHPGSLDETTYERLAEETLDSLAEFFEDLADKPYTFEDYDVSFGSGVLTVKLGGDLGTYVINKQTPNKQIWLSSPSRYVVDLSVMTGLGKTGCTPTTACPSMSCWPQSSLKP

SEQ ID NO: 5613 - protein, 210 aa, Homo sapiens
MWTLGRRAVAGLLASPSPAQAQTLTRVPRPAELAPLCGRRGLRTDIDATCTPRRASSNQRGLNQIWNVKKQSVYLMNLRKSGTLGHPGSLDETTYERLAEETLDSLAEFFEDLADKPYTFEDYDVSFGSGVLTVKLGGDLGTYVINKQTPNKQIWLSSPSSGPKRYDWTGKNWVYSHDGVSLHELLAAELTKALKTKLDLSSLAYSGKDA

SEQ ID NO: 5614 - protein, 210 aa, Homo sapiens; identical to SEQ ID NO: 5613

SEQ ID NO: 5615 - protein, 196 aa, Homo sapiens
MWTLGRRAVAGLLASPSPAQAQTLTRVPRPAELAPLCGRRGLRTDIDATCTPRRASSNQRGLNQIWNVKKQSVYLMNLRKSGTLGHPGSLDETTYERLAEETLDSLAEFFEDLADKPYTFEDYDVSFGVNVAPVAVPSLRKSEDHALQTGHVLDYLCFCLLGFQSASEQRSNPDSVVHRMAGDGVWLCRPGWSAMA

SEQ ID NO: 5616 - protein, 91 aa, Homo sapiens
MWTLGRRAVAGLLASPSPAQAQTLTRVPRPAELAPLCGRRGLRTDIDATCTPRRASSNQRGLNQIWNVKKQSVYLMNLRKSGTLGHPGVVS

SEQ ID NO: 5617 - protein, 19 aa, Homo sapiens
MAELTVEVRGSNGAFYKAI

SEQ ID NO: 5618 - protein, 621 aa, Homo sapiens
MAELTVEVRGSNGAFYKGFIKDVHEDSLTVVFENNWQPERQVPFNEVRLPPPPDIKKEISEGDEVEVYSRANDQEPCGWWLAKVRMMKGEFYVIEYAACDATYNEIVTFERLRPVNQNKTVKKNTFFKCTVDVPEDLREACANENAHKDFKKAVGACRIFYHPETTQLMILSASEATVKRVNILSDMHLRSIRTKLMLMSRNEEATKHLECTKQLAAAFHEEFVVREDLMGLAIGTHGSNIQQARKVPGVTAIELDEDTGTFRIYGESADAVKKARGFLEFVEDFIQVPRNLVGKVIGKNGKVIQEIVDKSGVVRVRIEGDNENKLPREDGMVPFVFVGTKESIGNVQVLLEYHIAYLKEVEQLRMERLQIDEQLRQIGSRSYSGRGRGRRGPNYTSGYGTNSELSNPSETESERKDELSDWSLAGEDDRDSRHQRDSRRRPGGRGRSVSGGRGRGGPRGGKSSISSVLKDPDSNPYSLLDNTESDQTADTDASESHHSTNRRRRSRRRRTDEDAVLMDGMTESDTASVNENGLVTVADYISRAESQSRQRNLPRETLAKNKKEMAKDVIEEHGPSEKAINGPTSASGDDISKLQRTPGEEKINTLKEENTQEAAVLNGVS

SEQ ID NO: 5619 - protein, 539 aa, Homo sapiens
MAELTVEVRGSNGAFYKGFIKDVHEDSLTVVFENNWQPERQVPFNEVRLPPPPDIKKEISEGDEVEVYSRANDQEPCGWWLAKVRMMKGEFYVIEYAACDATYNEIVTFERLRPVNQNKTVKKNTFFKCTVDVPEDLREACANENAHKDFKKAVGACRIFYHPETTQLMILSASEATVKRVNILSDMHLRSIRTKLMLMSRNEEATKHLECTKQLAAAFHEEFVVREDLMGLAIGTHGSNIQQARKVPGVTAIELDEDTGTFRIYGESADAVKKARGFLEFVEDFIQVPRNLVGKVIGKNGKVIQEIVDKSGVVRVRIEGDNENKLPREDGMVPFVFVGTKESIGNVQVLLEYHIAYLKEVEQLRMERLQIDEQLRQIGSRSYSGRGRGRRGPNYTSGYGTNSELSNPSETESERKDELSDWSLAGEDDRDSRHQRDSRRRPGGRGRSVSGGRGRGGPRGGKSSISSVLKDPDSNPYSLLDNTESDQTADTDASESHHSTNRRRRSRRRRTDEDAVLMDGMTESDTASVNENGLGKRCD

SEQ ID NO: 5620 - protein, 490 aa, Homo sapiens
MAELTVEVRGSNGAFYKVYSRANDQEPCGWWLAKVRMMKGEFYVIEYAACDATYNEIVTFERLRPVNQNKTVKKNTFFKCTVDVPEDLREACANENAHKDFKKAVGACRIFYHPETTQLMILSASEATVKRVNILSDMHLRSIRTKLMLMSRNEEATKHLECTKQLAAAFHEEFVVREDLMGLAIGTHGSNIQQARKVPGVTAIELDEDTGTFRIYGESADAVKKARGFLEFVEDFIQVPRNLVGKVIGKNGKVIQEIVDKSGVVRVRIEGDNENKLPREDGMVPFVFVGTKESIGNVQVLLEYHIAYLKEVEQLRMERLQIDEQLRQIGSRSYSGRGRGRRGPNYTSGYGTNSELSNPSETESERKDELSDWSLAGEDDRDSRHQRDSRRRPGGRGRSVSGGRGRGGPRGGKSSISSVLKDPDSNPYSLLDNTESDQTADTDASESHHSTNRRRRSRRRRTDEDAVLMDGMTESDTASVNENGLGKRCD

SEQ ID NO: 5621 - protein, 75 aa, Homo sapiens
MMKGEFYVIEYAACDATYNEIVTFERLRPVNQNKTVKKNTFFKCTVDVPEDLREACANENAHKDFKKAVGACRIF

SEQ ID NO: 5622 - protein, 94 aa, Homo sapiens
MMKGEFYVIEYAACDATYNEIVTFERLRPVNQNKTVKKNTFFKCTVDVPEDLREACANENAHKDFKKAVGACRIFYHPETTQLMILSASEATVK

SEQ ID NO: 5623 - protein, 119 aa, Homo sapiens
MMKGEFYVIEYAACDATYNEIVTFERLRPVNQNKTVKKNTFFKCTVDVPEDLREACANENAHKDFKKAVGACRIFYHPETTQLMILSASEATVKRVNILSDMHLRSIRTKLMLMSRNEE

SEQ ID NO: 5624 - protein, 123 aa, Homo sapiens
MMKGEFYVIEYAACDATYNEIVTFERLRPVNQNKTVKKNTFFKCTVDVPEDLREACANENAHKDFKKAVGACRIFYHPETTQLMILSASEATVKRVNILSDMHLRSIRTKLMLMSRNEEATKH

SEQ ID NO: 5625 - protein, 536 aa, Homo sapiens
MMKGEFYVIEYAACDATYNEIVTFERLRPVNQNKTVKKNTFFKCTVDVPEDLREACANENAHKDFKKAVGACRIFYHPETTQLMILSASEATVKRVNILSDMHLRSIRTKLMLMSRNEEATKHLECTKQLAAAFHEEFVVREDLMGLAIGTHGSNIQQARKVPGVTAIELDEDTGTFRIYGESADAVKKARGFLEFVEDFIQVPRNLVGKVIGKNGKVIQEIVDKSGVVRVRIEGDNENKLPREDGMVPFVFVGTKESIGNVQVLLEYHIAYLKEVEQLRMERLQIDEQLRQIGSRSYSGRGRGRRGPNYTSGYGTNSELSNPSETESERKDELSDWSLAGEDDRDSRHQRDSRRRPGGRGRSVSGGRGRGGPRGGKSSISSVLKDPDSNPYSLLDNTESDQTADTDASESHHSTNRRRRSRRRRTDEDAVLMDGMTESDTASVNENGLVTVADYISRAESQSRQRNLPRETLAKNKKEMAKDVIEEHGPSEKAINGPTSASGDDISKLQRTPGEEKINTLKEENTQEAAVLNGVS

SEQ ID NO: 5626 - protein, 454 aa, Homo sapiens
MMKGEFYVIEYAACDATYNEIVTFERLRPVNQNKTVKKNTFFKCTVDVPEDLREACANENAHKDFKKAVGACRIFYHPETTQLMILSASEATVKRVNILSDMHLRSIRTKLMLMSRNEEATKHLECTKQLAAAFHEEFVVREDLMGLAIGTHGSNIQQARKVPGVTAIELDEDTGTFRIYGESADAVKKARGFLEFVEDFIQVPRNLVGKVIGKNGKVIQEIVDKSGVVRVRIEGDNENKLPREDGMVPFVFVGTKESIGNVQVLLEYHIAYLKEVEQLRMERLQIDEQLRQIGSRSYSGRGRGRRGPNYTSGYGTNSELSNPSETESERKDELSDWSLAGEDDRDSRHQRDSRRRPGGRGRSVSGGRGRGGPRGGKSSISSVLKDPDSNPYSLLDNTESDQTADTDASESHHSTNRRRRSRRRRTDEDAVLMDGMTESDTASVNENGLGKRCD

SEQ ID NO: 5627 - protein, 151 aa, Homo sapiens
MRAVNILVYFFGFFWWFFNVQGFIKDVHEDSLTVVFENNWQPERQVPFNEVRLPPPPDIKKEISEGDEVEVYSRANDQEPCGWWLAKVRMMKGEFYVIEYAACDATYNEIVTFERLRPVNQNKTVKKNTFFKCTVDVPEDLREACANENAH

SEQ ID NO: 5628 - protein, 608 aa, Homo sapiens
MVTEGFIKDVHEDSLTVVFENNWQPERQVPFNEVRLPPPPDIKKEISEGDEVEVYSRANDQEPCGWWLAKVRMMKGEFYVIEYAACDATYNEIVTFERLRPVNQNKTVKKNTFFKCTVDVPEDLREACANENAHKDFKKAVGACRIFYHPETTQLMILSASEATVKRVNILSDMHLRSIRTKLMLMSRNEEATKHLECTKQLAAAFHEEFVVREDLMGLAIGTHGSNIQQARKVPGVTAIELDEDTGTFRIYGESADAVKKARGFLEFVEDFIQVPRNLVGKVIGKNGKVIQEIVDKSGVVRVRIEGDNENKLPREDGMVPFVFVGTKESIGNVQVLLEYHIAYLKEVEQLRMERLQIDEQLRQIGSRSYSGRGRGRRGPNYTSGYGTNSELSNPSETESERKDELSDWSLAGEDDRDSRHQRDSRRRPGGRGRSVSGGRGRGGPRGGKSSISSVLKDPDSNPYSLLDNTESDQTADTDASESHHSTNRRRRSRRRRTDEDAVLMDGMTESDTASVNENGLVTVADYISRAESQSRQRNLPRETLAKNKKEMAKDVIEEHGPSEKAINGPTSASGDDISKLQRTPGEEKINTLKEENTQEAAVLNGVS

SEQ ID NO: 5629 - protein, 247 aa, Homo sapiens
  SITE 1: note = misc_feature - Xaa can be any naturally occurring amino acid
XTNSELSNPSETESERKDELSDWSLAGEDDRDSRHQRDSRRRPGGRGRSVSGGRGRGGPRGGKSSISSVLKDPDSNPYSLLDNTESDQTADTDASESHHSTNRRRRSRRRRTDEDAVLMDGMTESDTASVNENGLDDSEKKPQRRNRSRRRRFRGQAEDRQPVTVADYISRAESQSRQRNLPRETLAKNKKEMAKDVIEEHGPSEKAINGPTSASGDDISKLQRTPGEEKINTLKEENTQEAAVLNG

SEQ ID NO: 5630 - protein, 144 aa, Homo sapiens
MGRGYSGALQARGGLEEPLERGLRGPSFTQSPLHGAAAAYLSAQRDASLPVPGQRSDMQKVTLGLLVFLAGFPVLDANDLEDKNSPFYYDWHSLQVGGLICAGVLCAMGIIIVMSAKCKCKFGQKSGHHPGETPPLITPGSAQS

SEQ ID NO: 5631 - protein, 70 aa, Homo sapiens
MQKVTLGLLVFLAGFPVLDANDLEDKNSPFYYDWHSLQVGGLICAGVLCAMGIIIVMSAKCKCKFGQKSG

SEQ ID NO: 5632 - protein, 87 aa, Homo sapiens
MQKVTLGLLVFLAGFPVLDANDLEDKNSPFYYDWHSLQVGGLICAGVLCAMGIIIVMSAKCKCKFGQKSGHHPGETPPLITPGSAQS

SEQ ID NO: 5633 - protein, 87 aa, Homo sapiens; identical to SEQ ID NO: 5632

SEQ ID NO: 5634 - protein, 87 aa, Homo sapiens; identical to SEQ ID NO: 5632

SEQ ID NO: 5635 - protein, 96 aa, Homo sapiens
MQKVTLGLLVFLAGFPVLDANDLEDKNSPFYYDWHSLQVGGLICAGVLCAMGIIIVMSEWRSSGEQAGRGWGSPPLTTQLSPTGAKCKCKFGQKSG

SEQ ID NO: 5636 - protein, 113 aa, Homo sapiens
MQKVTLGLLVFLAGFPVLDANDLEDKNSPFYYDWHSLQVGGLICAGVLCAMGIIIVMSEWRSSGEQAGRGWGSPPLTTQLSPTGAKCKCKFGQKSGHHPGETPPLITPGSAQS

SEQ ID NO: 5637 - protein, 113 aa, Homo sapiens; identical to SEQ ID NO: 5636

SEQ ID NO: 5638 - protein, 113 aa, Homo sapiens; identical to SEQ ID NO: 5636

SEQ ID NO: 5639 - protein, 116 aa, Homo sapiens
MQKVTLGLLVFLAGFPVLDANDLEDKNSPFYYGAPYIFVKRMGGQMERTQAGTEVPSTFLLDWHSLQVGGLICAGVLCAMGIIIVMSAKCKCKFGQKSGHHPGETPPLITPGSAQS

SEQ ID NO: 5640 - protein, 116 aa, Homo sapiens; identical to SEQ ID NO: 5639

SEQ ID NO: 5641 - protein, 61 aa, Homo sapiens
MQKVTLGLLVFLAGFPVLDANDLEDKNSPFYYGESPCPLSPPHNPTYCLVPRVPIQGWGLT

SEQ ID NO: 5642 - protein, 61 aa, Homo sapiens; identical to SEQ ID NO: 5641

SEQ ID NO: 5643 - protein, 844 aa, Homo sapiens
MGPGAPFARVGWPLPLLVVMAAGVAPVWASHSPHLPRPHSRVPPHPSSERRAVYIGALFPMSGGWPGGQACQPAVEMALEDVNSRRDILPDYELKLIHHDSKCDPGQATKYLYELLYNDPIKIILMPGCSSVSTLVAEAARMWNLIVLSYGSSSPALSNRQRFPTFFRTHPSATLHNPTRVKLFEKWGWKKIATIQQTTEVFTSTLDDLEERVKEAGIEITFRQSFFSDPAVPVKNLKRQDARIIVGLFYETEARKVFCEVYKERLFGKKYVWFLIGWYADNWFKIYDPSINCTVDEMTEAVEGHITTEIVMLNPANTRSISNMTSQEFVEKLTKRLKRHPEETGGFQEAPLAYDAIWALALALNKTSGGGGRSGVRLEDFNYNNQTITDQIYRAMNSSSFEGVSGHVVFDASGSRMAWTLIEQLQGGSYKKIGYYDSTKDDLSWSKTDKWIGGSPPADQTLVIKTFRFLSQKLFISVSVLSSLGIVLAVVCLSFNIYNSHVRYIQNSQPNLNNLTAVGCSLALAAVFPLGLDGYHIGRNQFPFVCQARLWLLGLGFSLGYGSMFTKIWWVHTVFTKKEEKKEWRKTLEPWKLYATVGLLVGMDVLTLAIWQIVDPLHRTIETFAKEEPKEDIDVSILPQLEHCSSRKMNTWLGIFYGYKGLLLLLGIFLAYETKSVSTEKINDHRAVGMAIYNVAVLCLITAPVTMILSSQQDAAFAFASLAIVFSSYITLVVLFVPKMRRLITRGEWQSEAQDTMKTGSSTNNNEEEKSRLLEKENRELEKIIAEKEERVSELRHQLQSRQQLRSRRHPPTPPEPSGGLPRGPPEPPDRLSCDGSRVHLLYK

SEQ ID NO: 5644 - protein, 844 aa, Homo sapiens; identical to SEQ ID NO: 5643

SEQ ID NO: 5645 - protein, 131 aa, Homo sapiens
MLLLLLLAPLFLRPPGAGGAQTPNATSEGCQIIHPPWEGGIRYRGLTRDQVKAINFLPVDYEIEYVCRGEREVVGPKVRKCLANGSWTDMDTPSRCGTLPSETQASALPGLQHGQVWEGAGDQAREAGRQW

SEQ ID NO: 5646 - protein, 97 aa, Homo sapiens
MLLLLLLAPLFLRPPGAGGAQTPNATSEGCQIIHPPWEGGIRYRGLTRDQVKAINFLPVDYEIEYVCRGEREVVGPKVRKCLANGSWTDMDTPSRCV

SEQ ID NO: 5647 - protein, 899 aa, Homo sapiens
MLLLLLLAPLFLRPPGAGGAQTPNATSEGCQIIHPPWEGGIRYRGLTRDQVKAINFLPVDYEIEYVCRGEREVVGPKVRKCLANGSWTDMDTPSRCVNRTPHSERRAVYIGALFPMSGGWPGGQACQPAVEMALEDVNSRRDILPDYELKLIHHDSKCDPGQATKYLYELLYNDPIKIILMPGCSSVSTLVAEAARMWNLIVLSYGSSSPALSNRQRFPTFFRTHPSATLHNPTRVKLFEKWGWKKIATIQQTTEVFTSTLDDLEERVKEAGIEITFRQSFFSDPAVPVKNLKRQDARIIVGLFYETEARKVFCEVYKERLFGKKYVWFLIGWYADNWFKIYDPSINCTVDEMTEAVEGHITTEIVMLNPANTRSISNMTSQEFVEKLTKRLKRHPEETGGFQEAPLAYDAIWALALALNKTSGGGGRSGVRLEDFNYNNQTITDQIYRAMNSSSFEGVSGHVVFDASGSRMAWTLIEQLQGGSYKKIGYYDSTKDDLSWSKTDKWIGGSPPADQTLVIKTFRFLSQKLFISVSVLSSLGIVLAVVCLSFNIYNSHVRYIQNSQPNLNNLTAVGCSLALAAVFPLGLDGYHIGRNQFPFVCQARLWLLGLGFSLGYGSMFTKIWWVHTVFTKKEEKKEWRKTLEPWKLYATVGLLVGMDVLTLAIWQIVDPLHRTIETFAKEEPKEDIDVSILPQLEHCSSRKMNTWLGIFYGYKGLLLLLGIFLAYETKSVSTEKINDHRAVGMAIYNVAVLCLITAPVTMILSSQQDAAFAFASLAIVFSSYITLVVLFVPKMRRLITRGEWQSEAQDTMKTGSSTNNNEEEKSRLLEKENRELEKIIAEKEERVSELRHQLQSRQQLRSRRHPPTPPEPSGGLPRGPPEPPDRLSCDGSRVHLLYK

SEQ ID NO: 5648 - protein, 137 aa, Homo sapiens
MLLLLLLAPLFLRPPGAGGAQTPNATSEGCQIIHPPWEGGIRYRGLTRDQVKAINFLPVDYEIEYVCRGEREVVGPKVRKCLANGSWTDMDTPSRCVRICSKSYLTLENGKVFLTGGDLPALDGARVDFRCDPDFHL

SEQ ID NO: 5649 - protein, 156 aa, Homo sapiens
MLLLLLLAPLFLRPPGAGGAQTPNATSEGCQIIHPPWEGGIRYRGLTRDQVKAINFLPVDYEIEYVCRGEREVVGPKVRKCLANGSWTDMDTPSRCVRICSKSYLTLENGKVFLTGGDLPALDGARVDFRCDPDFHLVGSSRSICSQGQWSTPKPH

SEQ ID NO: 5650 - protein, 193 aa, Homo sapiens
MLLLLLLAPLFLRPPGAGGAQTPNATSEGCQIIHPPWEGGIRYRGLTRDQVKAINFLPVDYEIEYVCRGEREVVGPKVRKCLANGSWTDMDTPSRCVRICSKSYLTLENGKVFLTGGDLPALDGARVDFRCDPDFHLVGSSRSICSQGQWSTPKPHCQGTLPSETQASALPGLQHGQVWEGAGDQAREAGRQW

SEQ ID NO: 5651 - protein, 961 aa, Homo sapiens
MLLLLLLAPLFLRPPGAGGAQTPNATSEGCQIIHPPWEGGIRYRGLTRDQVKAINFLPVDYEIEYVCRGEREVVGPKVRKCLANGSWTDMDTPSRCVRICSKSYLTLENGKVFLTGGDLPALDGARVDFRCDPDFHLVGSSRSICSQGQWSTPKPHCQVNRTPHSERRAVYIGALFPMSGGWPGGQACQPAVEMALEDVNSRRDILPDYELKLIHHDSKCDPGQATKYLYELLYNDPIKIILMPGCSSVSTLVAEAARMWNLIVLSYGSSSPALSNRQRFPTFFRTHPSATLHNPTRVKLFEKWGWKKIATIQQTTEVFTSTLDDLEERVKEAGIEITFRQSFFSDPAVPVKNLKRQDARIIVGLFYETEARKVFCEVYKERLFGKKYVWFLIGWYADNWFKIYDPSINCTVDEMTEAVEGHITTEIVMLNPANTRSISNMTSQEFVEKLTKRLKRHPEETGGFQEAPLAYDAIWALALALNKTSGGGGRSGVRLEDFNYNNQTITDQIYRAMNSSSFEGVSGHVVFDASGSRMAWTLIEQLQGGSYKKIGYYDSTKDDLSWSKTDKWIGGSPPADQTLVIKTFRFLSQKLFISVSVLSSLGIVLAVVCLSFNIYNSHVRYIQNSQPNLNNLTAVGCSLALAAVFPLGLDGYHIGRNQFPFVCQARLWLLGLGFSLGYGSMFTKIWWVHTVFTKKEEKKEWRKTLEPWKLYATVGLLVGMDVLTLAIWQIVDPLHRTIETFAKEEPKEDIDVSILPQLEHCSSRKMNTWLGIFYGYKGLLLLLGIFLAYETKSVSTEKINDHRAVGMAIYNVAVLCLITAPVTMILSSQQDAAFAFASLAIVFSSYITLVVLFVPKMRRLITRGEWQSEAQDTMKTGSSTNNNEEEKSRLLEKENRELEKIIAEKEERVSELRHQLQSRQQLRSRRHPPTPPEPSGGLPRGPPEPPDRLSCDGSRVHLLYK

SEQ ID NO: 5652 - protein, 578 aa, Homo sapiens
MLLLLLLAPLFLRPPGAGGAQTPNATSEGCQIIHPPWEGGIRYRGLTRDQVKAINFLPVDYEIEYVCRGEREVVGPKVRKCLANGSWTDMDTPSRCVRICSKSYLTLENGKVFLTGGDLPALDGARVDFRCDPDFHLVGSSRSICSQGQWSTPKPHCQVNRTPHSERRAVYIGALFPMSGGWPGGQACQPAVEMALEDVNSRRDILPDYELKLIHHDSKCDPGQATKYLYELLYNDPIKIILMPGCSSVSTLVAEAARMWNLIVLSYGSSSPALSNRQRFPTFFRTHPSATLHNPTRVKLFEKWGWKKIATIQQTTEVFTSTLDDLEERVKEAGIEITFRQSFFSDPAVPVKNLKRQDARIIVGLFYETEARKVFCEVYKERLFGKKYVWFLIGWYADNWFKIYDPSINCTVDEMTEAVEGHITTEIVMLNPANTRSISNMTSQEFVEKLTKRLKRHPEETGGFQEAPLAYDAIWALALALNKTSGGGGRSGVRLEDFNYNNQTITDQIYRAMNSSSFEGVSGHVVFDASGSRMAWTLIEQLQGGSYKKIGYYDSTKDDLSWSKTDKWIVISRTHSPT

SEQ ID NO: 5653 - protein, 578 aa, Homo sapiens; identical to SEQ ID NO: 5652

SEQ ID NO: 5654 - protein, 133 aa, Homo sapiens
MPGAWMLLLLLLAPLFLRPPGAGGAQTPNATSEGCQIIHPPWEGGIRYRGLTRDQVKAINFLPVDYEIEYVCRGEREVVGPKVRKCLANGSWTDMDTPSRCVRICSKSYLTLENGKVFLTGGDLPALDGARVD

SEQ ID NO: 5655 - protein, 70 aa, Homo sapiens
MRKSPGLSDCLWAWILLLSTLTGRRTSRKSHQNTDLYEVNEGKDVAMDSRHYKMNLKTIPLSSPGFWTDS

SEQ ID NO: 5656 - protein, 35 aa, Homo sapiens
MRKSPGLSDCLWAWILLLSTLTGRSYGQPSLQDEL

SEQ ID NO: 5657 - protein, 85 aa, Homo sapiens
MRKSPGLSDCLWAWILLLSTLTGRSYGQPSLQDELKDNTTVFTRILDRLLDGYDNRLRPGLGERVTEVKTDIFVTSFGPVSDHDM

SEQ ID NO: 5658 - protein, 168 aa, Homo sapiens
MRKSPGLSDCLWAWILLLSTLTGRSYGQPSLQDELKDNTTVFTRILDRLLDGYDNRLRPGLGERVTEVKTDIFVTSFGPVSDHDMEYTIDVFFRQSWKDERLKFKGPMTVLRLNNLMASKIWTPDTFFHNGKKSVAHNMTMPNKLLRITEDGTLLYTMRLTVRAECPM

SEQ ID NO: 5659 - protein, 456 aa, Homo sapiens
MRKSPGLSDCLWAWILLLSTLTGRSYGQPSLQDELKDNTTVFTRILDRLLDGYDNRLRPGLGERVTEVKTDIFVTSFGPVSDHDMEYTIDVFFRQSWKDERLKFKGPMTVLRLNNLMASKIWTPDTFFHNGKKSVAHNMTMPNKLLRITEDGTLLYTMRLTVRAECPMHLEDFPMDAHACPLKFGSYAYTRAEVVYEWTREPARSVVVAEDGSRLNQYDLLGQTVDSGIVQSSTGEYVVMTTHFHLKRKIGYFVIQTYLPCIMTVILSQVSFWLNRESVPARTVFGVTTVLTMTTLSISARNSLPKVAYATAMDWFIAVCYAFVFSALIEFATVNYFTKRGYAWDGKSVVPEKPKKVKDPLIKKNNTYAPTATSYTPNLARGDPGLATIAKSATIEPKEVKPETKPPEPKKTFNSVSKIDRLSRIAFPLLFGIFNLVYWATYLNREPQLKAPTPHQ

SEQ ID NO: 5660 - protein, 456 aa, Homo sapiens; identical to SEQ ID NO: 5659

SEQ ID NO: 5661 - protein, 456 aa, Homo sapiens; identical to SEQ ID NO: 5659

SEQ ID NO: 5662 - protein, 456 aa, Homo sapiens; identical to SEQ ID NO: 5659

SEQ ID NO: 5663 - protein, 456 aa, Homo sapiens; identical to SEQ ID NO: 5659

SEQ ID NO: 5664 - protein, 456 aa, Homo sapiens; identical to SEQ ID NO: 5659

SEQ ID NO: 5665 - protein, 285 aa, Homo sapiens
MRKSPGLSDCLWAWILLLSTLTGRSYGQPSLQDELKDNTTVFTRILDRLLDGYDNRLRPGLGERVTEVKTDIFVTSFGPVSDHDMEYTIDVFFRQSWKDERLKFKGPMTVLRLNNLMASKIWTPDTFFHNGKKSVAHNMTMPNKLLRITEDGTLLYTMRLTVRAECPMHLEDFPMDAHACPLKFGSYAYTRAEVVYEWTREPARSVVVAEDGSRLNQYDLLGQTVDSGIVQSSTGEYVVMTTHFHLKRKIGYFVIQTYLPCIMTVILSQVSFWLNRESVPARTVF

SEQ ID NO: 5666 - protein, 456 aa, Homo sapiens; identical to SEQ ID NO: 5659

SEQ ID NO: 5667 - protein, 456 aa, Homo sapiens; identical to SEQ ID NO: 5659

SEQ ID NO: 5668 - protein, 94 aa, Homo sapiens
MRKSPGLSDCLWAWILLLSTLTGRSYGQPSLQDELKDNTTVFTRILDRLLDGYDNRLRPGLGERVTEVKTDIFVTSFGPVSDHDMIFALQNTAQ

SEQ ID NO: 5669 - protein, 471 aa, Homo sapiens
MVQVSIASNELLQPAMRKSPGLSDCLWAWILLLSTLTGRSYGQPSLQDELKDNTTVFTRILDRLLDGYDNRLRPGLGERVTEVKTDIFVTSFGPVSDHDMEYTIDVFFRQSWKDERLKFKGPMTVLRLNNLMASKIWTPDTFFHNGKKSVAHNMTMPNKLLRITEDGTLLYTMRLTVRAECPMHLEDFPMDAHACPLKFGSYAYTRAEVVYEWTREPARSVVVAEDGSRLNQYDLLGQTVDSGIVQSSTGEYVVMTTHFHLKRKIGYFVIQTYLPCIMTVILSQVSFWLNRESVPARTVFGVTTVLTMTTLSISARNSLPKVAYATAMDWFIAVCYAFVFSALIEFATVNYFTKRGYAWDGKSVVPEKPKKVKDPLIKKNNTYAPTATSYTPNLARGDPGLATIAKSATIEPKEVKPETKPPEPKKTFNSVSKIDRLSRIAFPLLFGIFNLVYWATYLNREPQLKAPTPHQ

SEQ ID NO: 5670 - protein, 113 aa, Homo sapiens
MVQVSIASNEVSYPSELLQPAMRKSPGLSDCLWAWILLLSTLTGRSYGQPSLQDELKDNTTVFTRILDRLLDGYDNRLRPGLGERVTEVKTDIFVTSFGPVSDHDMEYTIDVF

SEQ ID NO: 5671 - protein, 427 aa, Homo sapiens
MEYTIDVFFRQKWKDERLKFKGPMNILRLNNLMASKIWTPDTFFHNGKKSVAHNMTMPNKLLRIQDDGTLLYTMRLTVQAECPMHLEDFPMDAHSCPLKFGSYAYTTSEVTYIWTYNASDSVQVAPDGSRLNQYDLLGQSIGKETIKSSTGEYTVMTAHFHLKRKIGYFVIQTYLPCIMTVILSQVSFWLNRESVPARTVFGVTTVLTMTTLSISARNSLPKVAYATAMDWFIAVCYAFVFSALIEFATVNYFTKRGWAWDGKSVVNDKSPSIKAEGITLTYNSVKAILQGAKLIWSKYIAFSWPSLFQEKTLEYLEKWMDCLTFKQSSKKEKASVMIQNNAYAVAVANYAPNLSKDPVLSTISKSATTPEPNKKPENKPAEAKKTFNSVSKIDRMSRIVFPVLFGTFNLVYWATYLNREPVLGVSP

SEQ ID NO: 5672 - protein, 137 aa, Homo sapiens
MKTKLNIYNMQFLLFVFLVWDPARLVLANIQEDEAKNNITIFTRILDRLLDGYDNRLRPGLGDSITEVFTNIYVTSFGPVSDTDMEYTIDVFFRQKWKDERLKFKGPMNILRLNNLMASKIWTPDTFFHNGKKSVAH

SEQ ID NO: 5673 - protein, 152 aa, Homo sapiens
MKTKLNIYNMQFLLFVFLVWDPARLVLANIQEDEAKNNITIFTRILDRLLDGYDNRLRPGLGDSITEVFTNIYVTSFGPVSDTDMEYTIDVFFRQKWKDERLKFKGPMNILRLNNLMASKIWTPDTFFHNGKKSVAHNMTMPNKLLRIQDDG

SEQ ID NO: 5674 - protein, 159 aa, Homo sapiens
MKTKLNIYNMQFLLFVFLVWDPARLVLANIQEDEAKNNITIFTRILDRLLDGYDNRLRPGLGDSITEVFTNIYVTSFGPVSDTDMEYTIDVFFRQKWKDERLKFKGPMNILRLNNLMASKIWTPDTFFHNGKKSVAHNMTMPNKLLRIQDDGTLLYTMR

SEQ ID NO: 5675 - protein, 451 aa, Homo sapiens
MKTKLNIYNMQFLLFVFLVWDPARLVLANIQEDEAKNNITIFTRILDRLLDGYDNRLRPGLGDSITEVFTNIYVTSFGPVSDTDMEYTIDVFFRQKWKDERLKFKGPMNILRLNNLMASKIWTPDTFFHNGKKSVAHNMTMPNKLLRIQDDGTLLYTMRLTVQAECPMHLEDFPMDAHSCPLKFGSYAYTTSEVTYIWTYNASDSVQVAPDGSRLNQYDLLGQSIGKETIKSSTGEYTVMTAHFHLKRKIGYFVIQTYLPCIMTVILSQVSFWLNRESVPARTVFGVTTVLTMTTLSISARNSLPKVAYATAMDWFIAVCYAFVFSALIEFATVNYFTKRGWAWDGKSVVNDKKKEKASVMIQNNAYAVAVANYAPNLSKDPVLSTISKSATTPEPNKKPENKPAEAKKTFNSVSKIDRMSRIVFPVLFGTFNLVYWATYLNREPVLGVSP

SEQ ID NO: 5676 - protein, 451 aa, Homo sapiens; identical to SEQ ID NO: 5675

SEQ ID NO: 5677 - protein, 511 aa, Homo sapiens
MKTKLNIYNMQFLLFVFLVWDPARLVLANIQEDEAKNNITIFTRILDRLLDGYDNRLRPGLGDSITEVFTNIYVTSFGPVSDTDMEYTIDVFFRQKWKDERLKFKGPMNILRLNNLMASKIWTPDTFFHNGKKSVAHNMTMPNKLLRIQDDGTLLYTMRLTVQAECPMHLEDFPMDAHSCPLKFGSYAYTTSEVTYIWTYNASDSVQVAPDGSRLNQYDLLGQSIGKETIKSSTGEYTVMTAHFHLKRKIGYFVIQTYLPCIMTVILSQVSFWLNRESVPARTVFGVTTVLTMTTLSISARNSLPKVAYATAMDWFIAVCYAFVFSALIEFATVNYFTKRGWAWDGKSVVNDKSPSIKAEGITLTYNSVKAILQGAKLIWSKYIAFSWPSLFQEKTLEYLEKWMDCLTFKQSSKKEKASVMIQNNAYAVAVANYAPNLSKDPVLSTISKSATTPEPNKKPENKPAEAKKTFNSVSKIDRMSRIVFPVLFGTFNLVYWATYLNREPVLGVSP

SEQ ID NO: 5678 - protein, 451 aa, Homo sapiens; identical to SEQ ID NO: 5675

SEQ ID NO: 5679 - protein, 367 aa, Homo sapiens
MKTKLNIYNMQFLLFVFLVWDPARLVLANIQEDEAKNNITIFTRILDRLLDGYDNRLRPGLGDSITEVFTNIYVTSFGPVSDTDMEYTIDVFFRQKWKDERLKFKGPMNILRLNNLMASKIWTPDTFFHNGKKSVAHNMTMPNKLLRIQDDGTLLYTMRLTVQAECPMHLEDFPMDAHSCPLKFGSYAYTTSEVTYIWTYNASDSVQVAPDGSRLNQYDLLGQSIGKETIKSSTGEYTVMTAHFHLKRKIGYFVIQTYLPCIMTVILSQVSFWLNRESVPARTVFGVTTVLTMTTLSISARNSLPKVAYATAMDWFIAVCYAFVFSALIEFATVNYFTKRGWAWDGKSVVNDKVSESFRVIIIKKIP

SEQ ID NO: 5680 - protein, 451 aa, Homo sapiens; identical to SEQ ID NO: 5675

SEQ ID NO: 5681 - protein, 66 aa, Homo sapiens
MKTKLNIYNMQFLLFVFLVWDPARLVLANIQEDEAKNNITIFTRILDRLLDGYDNRLRPGLGGIYN

SEQ ID NO: 5682 - protein, 66 aa, Homo sapiens; identical to SEQ ID NO: 5681

SEQ ID NO: 5683 - protein, 66 aa, Homo sapiens; identical to SEQ ID NO: 5681

SEQ ID NO: 5684 - protein, 73 aa, Homo sapiens
MKTKLNIYNMQFLLFVFLVWDPARLVLANIQEDEAKNNITIFTRILDRLLDGYDNRLRPGLGVSRVESPVCVT

SEQ ID NO: 5685 - protein, 56 aa, Homo sapiens
SSTGEYTVMTAHFHLKRKIGYFVIQTYLPCIMTVILSQVSFWLNRESVPARTVFGE

SEQ ID NO: 5686 - protein, 16 aa, Homo sapiens
MDNGMFSGFIMIKNLL

SEQ ID NO: 5687 - protein, 86 aa, Homo sapiens
MDNGMFSGFIMIKNLLLFCISMNLSSHFGFSQMPTSSVKDETNDNITIFTRILDGLLDGYDNRLRPGLGERITQVRTDIYVTSFGP

SEQ ID NO: 5688 - protein, 149 aa, Homo sapiens
MDNGMFSGFIMIKNLLLFCISMNLSSHFGFSQMPTSSVKDETNDNITIFTRILDGLLDGYDNRLRPGLGERITQVRTDIYVTSFGPVSDTEMEYTIDVFFRQSWKDERLRFKGPMQRLPLNNLLASKIWTPDTFFHNGKKSIAHNMTTP

SEQ ID NO: 5689 - protein, 166 aa, Homo sapiens
MDNGMFSGFIMIKNLLLFCISMNLSSHFGFSQMPTSSVKDETNDNITIFTRILDGLLDGYDNRLRPGLGERITQVRTDIYVTSFGPVSDTEMEYTIDVFFRQSWKDERLRFKGPMQRLPLNNLLASKIWTPDTFFHNGKKSIAHNMTTPNKLLRLEDDGTLLYTMR

SEQ ID NO: 5690 - protein, 462 aa, Homo sapiens
MDNGMFSGFIMIKNLLLFCISMNLSSHFGFSQMPTSSVKDETNDNITIFTRILDGLLDGYDNRLRPGLGERITQVRTDIYVTSFGPVSDTEMEYTIDVFFRQSWKDERLRFKGPMQRLPLNNLLASKIWTPDTFFHNGKKSIAHNMTTPNKLLRLEDDGTLLYTMRLTISAECPMQLEDFPMDAHACPLKFGSYAYPNSEVVYVWTNGSTKSVVVAEDGSRLNQYHLMGQTVGTENISTSTGEYTIMTAHFHLKRKIGYFVIQTYLPCIMTVILSQVSFWLNRESVPARTVFGVTTVLTMTTLSISARNSLPKVAYATAMDWFIAVCYAFVFSALIEFATVNYFTKRGWAWDGKKALEAAKIKKKREVILNKSTNAFTTGKMSHPPNIPKEQTPAGTSNTTSVSVKPSEEKTSESKKTYNSISKIDKMSRIVFPVLFGTFNLVYWATYLNREPVIKGAASPK

SEQ ID NO: 5691 - protein, 462 aa, Homo sapiens; identical to SEQ ID NO: 5690

SEQ ID NO: 5692 - protein, 462 aa, Homo sapiens; identical to SEQ ID NO: 5690

SEQ ID NO: 5693 - protein, 86 aa, Homo sapiens
MPTSSVKDETNDNITIFTRILDGLLDGYDNRLRPGLGERITQVRTDIYVTSFGPVSDTEMEYTIDVFFRQSWKDERLRFKGPMQRL

SEQ ID NO: 5694 - protein, 166 aa, Homo sapiens
MPTSSVKDETNDNITIFTRILDGLLDGYDNRLRPGLGERITQVRTDIYVTSFGPVSDTEMEYTIDVFFRQSWKDERLRFKGPMQRLPLNNLLASKIWTPDTFFHNGKKSIAHNMTTPNKLLRLEDDGTLLYTMRLTISAECPMQLEDFPMDAHACPLKFGSYAYPN

SEQ ID NO: 5695 - protein, 258 aa, Homo sapiens
EAGVRGTEEDGCWVCNLESVSQSQTWQENKLSEYQIDIFFAQTWTDSRLRFNSTMKILTLNSNMVGLIWIPDTIFRNSKTAEAHWITTPNQLLRIWNDGKILYTLRLTINAECQLQLHNFPMDEHSCPLIFSSYGYPKEEMIYRWRKNSVEAADQKSWRLYQFDFMGLRNTTEIVTTSAGDYVVMTIYFELSRRMGYFTIQTYIPCILTVVLSWVSFWIKKDATPARTALGITTVLTMTTLSTIARKSLPRVSYVTAM

SEQ ID NO: 5696 - protein, 467 aa, Homo sapiens
MAPKLLLLLCLFSGLHARSRKVEEDEYEDSSSNQKWVLAPKSQDTDVTLILNKLLREYDKKLRPDIGIKPTVIDVDIYVNSIGPVSSINMEYQIDIFFAQTWTDSRLRFNSTMKILTLNSNMVGLIWIPDTIFRNSKTAEAHWITTPNQLLRIWNDGKILYTLRLTINAECQLQLHNFPMDEHSCPLIFSSYGYPKEEMIYRWRKNSVEAADQKSWRLYQFDFMGLRNTTEIVTTSAGDYVVMTIYFELSRRMGYFTIQTYIPCILTVVLSWVSFWIKKDATPARTALGITTVLTMTTLSTIARKSLPRVSYVTAMDLFVTVCFLFVFAALMEYATLNYYSSCRKPTTTKKTTSLLHPDSSRWIPERISLQAPSNYSLLDMRPPPTAMITLNNSVYWQEFEDTCVYECLDGKDCQSFFCCYEECKSGSWRKGRIHIDILELDSYSRVFFPTSFLLFNLVYWVGYLYL

SEQ ID NO: 5697 - protein, 253 aa, Homo sapiens
MAPKLLLLLCLFSGLHARSRKVEEDEYEDSSSNQKWVLAPKSQDTDVTLILNKLLREYDKKLRPDIGIKPTVIDVDIYVNSIGPVSSINMEYQIDIFFAQTWTDSRLRFNSTMKILTLNSNMVGLIWIPDTIFRNSKTAEAHWITTPNQLLRIWNDGKILYTLRLTINAECQLQLHNFPMDEHSCPLIFSSYGYPKEEMIYRWRKNSVEAADQKSWRLYQFDFMGLRNTTEIVTTSAGRNLLKEAQLSKAREA

SEQ ID NO: 5698 - protein, 288 aa, Homo sapiens
MDEHSCPLIFSSYGYPKEEMIYRWRKNSVEAADQKSWRLYQFDFMGLRNTTEIVTTSAGDYVVMTIYFELSRRMGYFTIQTYIPCILTVVLSWVSFWIKKDATPARTALGITTVLTMTTLSTIARKSLPRVSYVTAMDLFVTVCFLFVFAALMEYATLNYYSSCRKPTTTKKTTSLLHPDSSRWIPERISLQAPSNYSLLDMRPPPTAMITLNNSVYWQEFEDTCVYECLDGKDCQSFFCCYEECKSGSWRKGRIHIDILELDSYSRVFFPTSFLLFNLVYWVGYLYL

SEQ ID NO: 5699 - protein, 38 aa, Homo sapiens
  SITE 1: note = misc_feature - Xaa can be any naturally occurring amino acid
XAECQLQLHNFPMDEHSCPLIFSSSTILAFRLSLHAYR

SEQ ID NO: 5700 - protein, 169 aa, Homo sapiens
  SITE 1: note = misc_feature - Xaa can be any naturally occurring amino acid
XDYVVMTIYFELSRRMGYFTIQTYIPCILTVVLSWVSFWIKKDATPARTALGITTVLTMTTLSTIARKSLPRVSYVTAMDLFVTVCFLFVFAALMEYATLNYYSSCRKPTTTKKTTSLLHPDSSRWIPERISLQAPSKPSCCPACGLQGLPFRSLVSHPRISRAFCLPV

SEQ ID NO: 5701 - protein, 52 aa, Homo sapiens
MNYSLHLAFVCLSLFTERMCIQGSQFNVEVGRSDKLSLPGFENLTAGYNKFL

SEQ ID NO: 5702 - protein, 59 aa, Homo sapiens
MNYSLHLAFVCLSLFTERMCIQGSQFNVEVGRSDKLSLPGFENLTAGYNKFLRPNFGGE

SEQ ID NO: 5703 - protein, 92 aa, Homo sapiens
MNYSLHLAFVCLSLFTERMCIQGSQFNVEVGRSDKLSLPGFENLTAGYNKFLRPNFGGEPVQIALTLDIASISSISESNMDYTATIYLRQRW

SEQ ID NO: 5704 - protein, 171 aa, Homo sapiens
MNYSLHLAFVCLSLFTERMCIQGSQFNVEVGRSDKLSLPGFENLTAGYNKFLRPNFGGEPVQIALTLDIASISSISESNMDYTATIYLRQRWMDQRLVFEGNKSFTLDARLVEFLWVPDTYIVESKKSFLHEVTVGNRLIRLFSNGTVLYALRITTTVACNMDLSKYPMDT

SEQ ID NO: 5705 - protein, 189 aa, Homo sapiens
MNYSLHLAFVCLSLFTERMCIQGSQFNVEVGRSDKLSLPGFENLTAGYNKFLRPNFGGEPVQIALTLDIASISSISESNMDYTATIYLRQRWMDQRLVFEGNKSFTLDARLVEFLWVPDTYIVESKKSFLHEVTVGNRLIRLFSNGTVLYALRITTTVACNMDLSKYPMDTQTCKLQLESWGYDGNDVE

SEQ ID NO: 5706 - protein, 440 aa, Homo sapiens
MNYSLHLAFVCLSLFTERMCIQGSQFNVEVGRSDKLSLPGFENLTAGYNKFLRPNFGGEPVQIALTLDIASISSISESNMDYTATIYLRQRWMDQRLVFEGNKSFTLDARLVEFLWVPDTYIVESKKSFLHEVTVGNRLIRLFSNGTVLYALRITTTVACNMDLSKYPMDTQTCKLQLESWGYDGNDVEFTWLRGNDSVRGLEHLRLAQYTIERYFTLVTRSQQETGNYTRLVLQFELRRNVLYFILETYVPSTFLVVLSWVSFWISLDSVPARTCIGVTTVLSMTTLMIGSRTSLPNTNCFIKAIDVYLGICFSFVFGALLEYAVAHYSSLQQMAAKDRGTTKEVEEVSITNIINSSISSFKRKISFASIEISSDNVDYSDLTMKTSDKFKFVFREKMGRIVDYFTIQNPSNVDHYSKLLFPLIFMLANVFYWAYYMYF

SEQ ID NO: 5707 - protein, 440 aa, Homo sapiens; identical to SEQ ID NO: 5706

SEQ ID NO: 5708 - protein, 349 aa, Homo sapiens
MNYSLHLAFVCLSLFTERMCIQGSQFNVEVGRSDKLSLPGFENLTAGYNKFLRPNFGGEPVQIALTLDIASISSISESNMDYTATIYLRQRWMDQRLVFEGNKSFTLDARLVEFLWVPDTYIVESKKSFLHEVTVGNRLIRLFSNGTVLYALRITTTVACNMDLSKYPMDTQTCKLQLESWGYDGNDVEFTWLRGNDSVRGLEHLRLAQYTIERYFTLVTRSQQETGNYTRLVLQFELRRNVLYFILETYVPSTFLVVLSWVSFWISLDSVPARTCIGVTTVLSMTTLMIGSRTSLPNTNCFIKAIDVYLGICFSFVFGALLEYAVAHYSSLQQMAAKDRQKICYLYAA

SEQ ID NO: 5709 - protein, 289 aa, Homo sapiens
MNYSLHLAFVCLSLFTERMCIQGSQFNVEVGRSDKLSLPGFENLTAGYNKFLRPNFGGEPVQIALTLDIASISSISESNMDYTATIYLRQRWMDQRLVFEGNKSFTLDARLVEFLWVPDTYIVESKKSFLHEVTVGNRLIRLFSNGTVLYALRITTTVACNMDLSKYPMDTQTCKLQLESWGYDGNDVEFTWLRGNDSVRGLEHLRLAQYTIERYFTLVTRSQQETGNYTRLVLQFELRRNVLYFILETYVPSTFLVVLSWVSFWISLDSVPARTCIGDNKGSRRSQYY

SEQ ID NO: 5710 - protein, 123 aa, Homo sapiens
MARGSALLLASLLLAAALSASAGLWSPAKEKRGWTLNSAGYLLGPHAVGNHRSFSDKNGLTSKRELRPEDDMKPGSFDRSIPENNIMRTIIEFLSFLHLKEAGALDRLLDLPAAASSEDIERS

SEQ ID NO: 5711 - protein, 113 aa, Homo sapiens
MLPPQKKPWESMAKGLVLGALFTSFLLLVYSYAVPPLHAGLASTRTPEAAASCSPPALEPEAVIRANGSAGECQPRRNIVFLKTHKTASSTLLNILFRFGQKHRLKFAFPNGR

SEQ ID NO: 5712 - protein, 164 aa, Homo sapiens
MLPPQKKPWESMAKGLVLGALFTSFLLLVYSYAVPPLHAGLASTRTPEAAASCSPPALEPEAVIRANGSAGECQPRRNIVFLKTHKTASSTLLNILFRFGQKHRLKFAFPNGRNDFDYPTFFARSLVQDYRPGACFNIICNHMRFHYDEVRGLVPTNAIFITVL

SEQ ID NO: 5713 - protein, 265 aa, Homo sapiens
MLPPQKKPWESMAKGLVLGALFTSFLLLVYSYAVPPLHAGLASTRTPEAAASCSPPALEPEAVIRANGSAGECQPRRNIVFLKTHKTASSTLLNILFRFGQKHRLKFAFPNGRNDFDYPTFFARSLVQDYRPGACFNIICNHMRFHYDEVRGLVPTNAIFITVLRDPARLFESSFHYFGPVVPLTWKLSAGDKLTEFLQDPDRYYDPNGFNAHYLRNLLFFDLGYDNSLDPSSPQVQEHILEVERRFHLVLLQEYFDESLVLLKD

SEQ ID NO: 5714 - protein, 71 aa, Homo sapiens
MLPPQKKPWESMAKGLVLGALFTSFLLLVYSYAVPPLHAGLASTTPEAAASCSPPALEPEAVIRANGSAGE

SEQ ID NO: 5715 - protein, 76 aa, Homo sapiens
MLPPQKKPWESMAKGLVLGALFTSFLLLVYSYAVPPLHAGLASTTPEAAASCSPPALEPEAVIRANGSAGECQPRR

SEQ ID NO: 5716 - protein, 85 aa, Homo sapiens
MLPPQKKPWESMAKGLVLGALFTSFLLLVYSYAVPPLHAGLASTTPEAAASCSPPALEPEAVIRANGSAGECQPRRNIVFLKTHK

SEQ ID NO: 5717 - protein, 95 aa, Homo sapiens
MLPPQKKPWESMAKGLVLGALFTSFLLLVYSYAVPPLHAGLASTTPEAAASCSPPALEPEAVIRANGSAGECQPRRNIVFLKTHKTASSTLLNIL

SEQ ID NO: 5718 - protein, 99 aa, Homo sapiens
MLPPQKKPWESMAKGLVLGALFTSFLLLVYSYAVPPLHAGLASTTPEAAASCSPPALEPEAVIRANGSAGECQPRRNIVFLKTHKTASSTLLNILFRFG

SEQ ID NO: 5719 - protein, 100 aa, Homo sapiens
MLPPQKKPWESMAKGLVLGALFTSFLLLVYSYAVPPLHAGLASTTPEAAASCSPPALEPEAVIRANGSAGECQPRRNIVFLKTHKTASSTLLNILFRFGQ

SEQ ID NO: 5720 - protein, 103 aa, Homo sapiens
MLPPQKKPWESMAKGLVLGALFTSFLLLVYSYAVPPLHAGLASTTPEAAASCSPPALEPEAVIRANGSAGECQPRRNIVFLKTHKTASSTLLNILFRFGQKHR

SEQ ID NO: 5721 - protein, 143 aa, Homo sapiens
MLPPQKKPWESMAKGLVLGALFTSFLLLVYSYAVPPLHAGLASTTPEAAASCSPPALEPEAVIRANGSAGECQPRRNIVFLKTHKTASSTLLNILFRFGQKHRLKFAFPNGRNDFDYPTFFARSLVQDYRPGACFNIICNHMR

SEQ ID NO: 5722 - protein, 149 aa, Homo sapiens
MLPPQKKPWESMAKGLVLGALFTSFLLLVYSYAVPPLHAGLASTTPEAAASCSPPALEPEAVIRANGSAGECQPRRNIVFLKTHKTASSTLLNILFRFGQKHRLKFAFPNGRNDFDYPTFFARSLVQDYRPGACFNIICNHMRFHYDEV

SEQ ID NO: 5723 - protein, 170 aa, Homo sapiens
MLPPQKKPWESMAKGLVLGALFTSFLLLVYSYAVPPLHAGLASTTPEAAASCSPPALEPEAVIRANGSAGECQPRRNIVFLKTHKTASSTLLNILFRFGQKHRLKFAFPNGRNDFDYPTFFARSLVQDYRPGACFNIICNHMRFHYDEVRGLVPTNAIFITVLRDPARLF

SEQ ID NO: 5724 - protein, 199 aa, Homo sapiens
MLPPQKKPWESMAKGLVLGALFTSFLLLVYSYAVPPLHAGLASTTPEAAASCSPPALEPEAVIRANGSAGECQPRRNIVFLKTHKTASSTLLNILFRFGQKHRLKFAFPNGRNDFDYPTFFARSLVQDYRPGACFNIICNHMRFHYDEVRGLVPTNAIFITVLRDPARLFESSFHYFGPVVPLTWKLSAGDKLTEFLQD

SEQ ID NO: 5725 - protein, 242 aa, Homo sapiens
MLPPQKKPWESMAKGLVLGALFTSFLLLVYSYAVPPLHAGLASTTPEAAASCSPPALEPEAVIRANGSAGECQPRRNIVFLKTHKTASSTLLNILFRFGQKHRLKFAFPNGRNDFDYPTFFARSLVQDYRPGACFNIICNHMRFHYDEVRGLVPTNAIFITVLRDPARLFESSFHYFGPVVPLTWKLSAGDKLTEFLQDPDRYYDPNGFNAHYLRNLLFFDLGYDNSLDPSSPQVQEHILEV

SEQ ID NO: 5726 - protein, 423 aa, Homo sapiens
MLPPQKKPWESMAKGLVLGALFTSFLLLVYSYAVPPLHAGLASTTPEAAASCSPPALEPEAVIRANGSAGECQPRRNIVFLKTHKTASSTLLNILFRFGQKHRLKFAFPNGRNDFDYPTFFARSLVQDYRPGACFNIICNHMRFHYDEVRGLVPTNAIFITVLRDPARLFESSFHYFGPVVPLTWKLSAGDKLTEFLQDPDRYYDPNGFNAHYLRNLLFFDLGYDNSLDPSSPQVQEHILEVERRFHLVLLQEYFDESLVLLKDLLCWELEDVLYFKLNARRDSPVPRLSGELYGRATAWNMLDSHLYRHFNASFWRKVEAFGRERMAREVAALRHANERMRTICIDGGHAVDAAAIQDEAMQPWQPLGTKSILGYNLKKSIGQRHAQLCRRMLTPEIQYLMDLGANLWVTKLWKFIRDFLRW

SEQ ID NO: 5727 - protein, 279 aa, Homo sapiens
MLPPQKKPWESMAKGLVLGALFTSFLLLVYSYAVPPLHAGLASTTPEAAASCSPPALEPEAVIRANGSAGECQPRRNIVFLKTHKTASSTLLNILFRFGQKHRLKFAFPNGRNDFDYPTFFARSLVQDYRPGACFNIICNHMRFHYDEVRGLVPTNAIFITVLRDPARLFESSFHYFGPVVPLTWKLSAGDKLTEFLQDPDRYYDPNGFNAHYLRNLLFFDLGYDNSLDPSSPQVQEHILEVERRFHLVLLQEYFDESLVLLKDLLCWELEDVLYFKLN

SEQ ID NO: 5728 - protein, 423 aa, Homo sapiens; identical to SEQ ID NO: 5726

SEQ ID NO: 5729 - protein, 423 aa, Homo sapiens; identical to SEQ ID NO: 5726

SEQ ID NO: 5730 - protein, 423 aa, Homo sapiens; identical to SEQ ID NO: 5726

SEQ ID NO: 5731 - protein, 423 aa, Homo sapiens; identical to SEQ ID NO: 5726

SEQ ID NO: 5732 - protein, 423 aa, Homo sapiens; identical to SEQ ID NO: 5726

SEQ ID NO: 5733 - protein, 398 aa, Homo sapiens
MMSMLGGLQRYFRVILLLLLALTLLLLAGFLHSDLELDTPLFGGQAEGPPVTNIMFLKTHKTASSTVLNILYRFAETHNLSVALPAGSRVHLGYPWLFLARYVEGVGSQQRFNIMCNHLRFNLPQVQKVMPNDTFYFSILRNPVFQLESSFIYYKTYAPAFRGAPSLDAFLASPRTFYNDSRHLRNVYAKNNMWFDFGFDPNAQCEEGYVRARIAEVERRFRLVLIAEHLDESLVLLRRRLRWALDDVVAFRLNSRSARSVARLSPETRERARSWCALDWRLYEHFNRTLWAQLRAELGPRRLRGEVERLRARRRELASLCLQDGGALKNHTQIRDPRLRPYQSGKADILGYNLRPGLDNQTLGVCQRLVMPELQYMARLYALQFPEKPLKNIPFLGA

SEQ ID NO: 5734 - protein, 431 aa, Homo sapiens
MPPILQRLQQATKMMSRRKILLLVLGCSTVSLLIHQGAQLSWYPKLFPLSCPPLRNSPPRPKHMTVAFLKTHKTAGTTVQNILFRFAERHNLTVALPHPSCEHQFCYPRNFSAHFVHPATRPPHVLASHLRFDRAELERLMPPSTVYVTILREPAAMFESLFSYYNQYCPAFRRVPNASLEAFLRAPEAYYRAGEHFAMFAHNTLAYDLGGDNERSPRDDAAYLAGLIRQVEEVFSLVMIAEYFDESLVLLRRLLAWDLDDVLYAKLNARAASSRLAAIPAALARAARTWNALDAGLYDHFNATFWRHVARAGRACVEREARELREARQRLLRRCFGDEPLLRPAAQIRTKQLQPWQPSRKVDIMGYDLPGGGAGPATEACLKLAMPEVQYSNYLLRKQKRRGGARARPEPVLDNPPPRPIRVLPRGPQGP

SEQ ID NO: 5735 - protein, 431 aa, Homo sapiens; identical to SEQ ID NO: 5734

SEQ ID NO: 5736 - protein, 62 aa, Homo sapiens
KAMTAAAGSAGRAAVPLLLCALLAPGGAYVLDDSDGLGREFDGIGAVSGGGDWCLKVSLKGR

SEQ ID NO: 5737 - protein, 685 aa, Homo sapiens
MAEWLLSASWQRRAKAMTAAAGSAGRAAVPLLLCALLAPGGAYVLDDSDGLGREFDGIGAVSGGGATSRLLVNYPEPYRSQILDYLFKPNFGASLHILKVEIGGDGQTTDGTEPSHMHYALDENYFRGYEWWLMKEAKKRNPNITLIGLPWSFPGWLGKGFDWPYVNLQLTAYYVVTWIVGAKRYHDLDIDYIGIWNERSYNANYIKILRKMLNYQGLQRVKIIASDNLWESISASMLLDAELFKVVDVIGAHYPGTHSAKDAKLTGKKLWSSEDFSTLNSDMGAGCWGRILNQNYINGYMTSTIAWNLVASYYEQLPYGRCGLMTAQEPWSGHYVVESPVWVSAHTTQFTQPGWYYLKTVGHLEKGGSYVALTDGLGNLTIIIETMSHKHSKCIRPFLPYFNVSQQFATFVLKGSFSEIPELQVWYTKLGKTSERFLFKQLDSLWLLDSDGSFTLSLHEDELFTLTTLTTGRKGSYPLPPKSQPFPSTYKDDFNVDYPFFSEAPNFADQTGVFEYFTNIEDPGEHHFTLRQVLNQRPITWAADASNTISIIGDYNWTNLTIKCDVYIETPDTGGVFIAGRVNKGGILIRSARGIFFWIFANGSYRVTGDLAGWIIYALGRVEVTAKKWYTLTLTIKGHFTSGMLNDKSLWTDIPVNFPKNGWAAIGTHSFEFAQFDNFLVEATR

SEQ ID NO: 5738 - protein, 211 aa, Homo sapiens
MAEWLLSASWQRRAKAMTAAAGSAGRAAVPLLLCALLAPGGAYVLDDSDGLGREFDGIGAVSGGGATSRLLVNYPEPYRSQILDYLFKPNFGASLHILKVEIGGDGQTTDGTEPSHMHYALDENYFRGYEWWLMKEAKKRNPNITLIGLPWSFPGWLGKGFDWPYVNLQLTAYYVVTWIVGAKRYHDLDIDYIGIWNERSYNANYIKVFGE

SEQ ID NO: 5739 - protein, 112 aa, Homo sapiens
MAEWLLSASWQRRAKAMTAAAGSAGRAAVPLLLCALLAPGGAYVLDDSDGLGREFDGIGAVSGGGATSRLLVNYPEPYRSQILDYLFKPNFGASLHILKVEIGGDGQTTDIL

SEQ ID NO: 5740 - protein, 662 aa, Homo sapiens
MAEWLLSASWQRRAKAMTAAAGSAGRAAVPLLLCALLAPGGAYVLDDSDGLGREFDGIGAVSGGGPNFGASLHILKVEIGGDGQTTDGTEPSHMHYALDENYFRGYEWWLMKEAKKRNPNITLIGLPWSFPGWLGKGFDWPYVNLQLTAYYVVTWIVGAKRYHDLDIDYIGIWNERSYNANYIKILRKMLNYQGLQRVKIIASDNLWESISASMLLDAELFKVVDVIGAHYPGTHSAKDAKLTGKKLWSSEDFSTLNSDMGAGCWGRILNQNYINGYMTSTIAWNLVASYYEQLPYGRCGLMTAQEPWSGHYVVESPVWVSAHTTQFTQPGWYYLKTVGHLEKGGSYVALTDGLGNLTIIIETMSHKHSKCIRPFLPYFNVSQQFATFVLKGSFSEIPELQVWYTKLGKTSERFLFKQLDSLWLLDSDGSFTLSLHEDELFTLTTLTTGRKGSYPLPPKSQPFPSTYKDDFNVDYPFFSEAPNFADQTGVFEYFTNIEDPGEHHFTLRQVLNQRPITWAADASNTISIIGDYNWTNLTIKCDVYIETPDTGGVFIAGRVNKGGILIRSARGIFFWIFANGSYRVTGDLAGWIIYALGRVEVTAKKWYTLTLTIKGHFTSGMLNDKSLWTDIPVNFPKNGWAAIGTHSFEFAQFDNFLVEATR

SEQ ID NO: 5741 - protein, 589 aa, Homo sapiens
MGFMVADLWATSRLLVNYPEPYRSQILDYLFKPNFGASLHILKVEIGGDGQTTDGTEPSHMHYALDENYFRGYEWWLMKEAKKRNPNITLIGLPWSFPGWLGKGFDWPYVNLQLTAYYVVTWIVGAKRYHDLDIDYIGIWNERSYNANYIKILRKMLNYQGLQRVKIIASDNLWESISASMLLDAELFKVVDVIGAHYPGTHSAKDAKLTGKKLWSSEDFSTLNSDMGAGCWGRILNQNYINGYMTSTIAWNLVASYYEQLPYGRCGLMTAQEPWSGHYVVESPVWVSAHTTQFTQPGWYYLKTVGHLEKGGSYVALTDGLGNLTIIIETMSHKHSKCIRPFLPYFNVSQQFATFVLKGSFSEIPELQVWYTKLGKTSERFLFKQLDSLWLLDSDGSFTLSLHEDELFTLTTLTTGRKGSYPLPPKSQPFPSTYKDDFNVDYPFFSEAPNFADQTGVFEYFTNIEDPGEHHFTLRQVLNQRPITWAADASNTISIIGDYNWTNLTIKCDVYIETPDTGGVFIAGRVNKGGILIRSARGIFFWIFANGSYRVTGDLAGWIIYALGRVEVTAKKWYTLTLTIKVAGRRKKT

SEQ ID NO: 5742 - protein, 659 aa, Homo sapiens
MLGKSHGRATHGPLPLADLGIHLPCVKVLHQVTPEEKPAATSRLLVNYPEPYRSQILDYLFKPNFGASLHILKVEIGGDGQTTDGTEPSHMHYALDENYFRGYEWWLMKEAKKRNPNITLIGLPWSFPGWLGKGFDWPYVNLQLTAYYVVTWIVGAKRYHDLDIDYIGIWNERSYNANYIKILRKMLNYQGLQRVKIIASDNLWESISASMLLDAELFKVVDVIGAHYPGTHSAKDAKLTGKKLWSSEDFSTLNSDMGAGCWGRILNQNYINGYMTSTIAWNLVASYYEQLPYGRCGLMTAQEPWSGHYVVESPVWVSAHTTQFTQPGWYYLKTVGHLEKGGSYVALTDGLGNLTIIIETMSHKHSKCIRPFLPYFNVSQQFATFVLKGSFSEIPELQVWYTKLGKTSERFLFKQLDSLWLLDSDGSFTLSLHEDELFTLTTLTTGRKGSYPLPPKSQPFPSTYKDDFNVDYPFFSEAPNFADQTGVFEYFTNIEDPGEHHFTLRQVLNQRPITWAADASNTISIIGDYNWTNLTIKCDVYIETPDTGGVFIAGRVNKGGILIRSARGIFFWIFANGSYRVTGDLAGWIIYALGRVEVTAKKWYTLTLTIKGHFTSGMLNDKSLWTDIPVNFPKNGWAAIGTHSFEFAQFDNFLVEATR

SEQ ID NO: 5743 - protein, 434 aa, Homo sapiens
MLNYQGLQRVKIIASDNLWESISASMLLDAELFKVVDVIGAHYPGTHSAKDAKLTGKKLWSSEDFSTLNSDMGAGCWGRILNQNYINGYMTSTIAWNLVASYYEQLPYGRCGLMTAQEPWSGHYVVESPVWVSAHTTQFTQPGWYYLKTVGHLEKGGSYVALTDGLGNLTIIIETMSHKHSKCIRPFLPYFNVSQQFATFVLKGSFSEIPELQVWYTKLGKTSERFLFKQLDSLWLLDSDGSFTLSLHEDELFTLTTLTTGRKGSYPLPPKSQPFPSTYKDDFNVDYPFFSEAPNFADQTGVFEYFTNIEDPGEHHFTLRQVLNQRPITWAADASNTISIIGDYNWTNLTIKCDVYIETPDTGGVFIAGRVNKGGILIRSARGIFFWIFANGSYRVTGDLAGWIIYALGRVEVTAKKWYTLTLTIKVAGRRKKT

SEQ ID NO: 5744 - protein, 72 aa, Homo sapiens
  SITE 1: note = misc_feature - Xaa can be any naturally occurring amino acid
XKLGKTSERFLFKQLDSLWLLDSDGSFTLSLHEDELFTLTTLTTGRKGSYPLPPKSQPFPSTYKDDFNVGPI

SEQ ID NO: 5745 - protein, 404 aa, Homo sapiens
  SITE 1: note = misc_feature - Xaa can be any naturally occurring amino acid
XLLSASWQRRAKAMTAAAGSAGRAAVPLLLCALLAPGGAYVLDDSDGLGREFDGIGAVSGGGATSRLLVNYPEPYRSQILDYLFKPNFGASLHILKVEIGGDGQTTDGTEPSHMHYALDENYFRGYEWWLMKEAKKRNPNITLIGLPWSFPGWLGKGFDWPYVNLQLTAYYVVTWIVGAKRYHDLDIDYIGIWNERSYNANYIKILRKMLNYQGLQRVKIIASDNLWESISASMLLDAELFKVVDVIGAHYPGTHSAKDAKLTGKKLWSSEDFSTLNSDMGAGCWGRILNQNYINGYMTSTIAWNLVASYYEQLPYGRCGLMTAQEPWSGHYVVESPVWVSAHTTQFTQPGWYYLKTVGHLEKGGSYVALTDGLGNLTIIIETMVNFCCCYWINSLLYYWKNKI

SEQ ID NO: 5746 - protein, 78 aa, Homo sapiens
MAAVVAATRWWQLLLVLSAAGMGASGAPQPPNILLLLMDDESLPPPRAAGSPRWAPVLPDGCLCPLENAERRSGVPKV

SEQ ID NO: 5747 - protein, 116 aa, Homo sapiens
MAAVVAATRWWQLLLVLSAAGMGASGAPQPPNILLLLMDDESLPPPRAAGSPRWAPVLPDGCLCPLENAERSDCFPEHALQRPGVRVLTAVAGPFSALSGISLLKILCFRISSFHF

SEQ ID NO: 5748 - protein, 522 aa, Homo sapiens
MAAVVAATRWWQLLLVLSAAGMGASGAPQPPNILLLLMDDMGWGDLGVYGEPSRETPNLDRMAAEGLLFPNFYSANPLCSPSRAALLTGRLPIRNGFYTTNAHARNAYTPQEIVGGIPDSEQLLPELLKKAGYVSKIVGKWHLGHRPQFHPLKHGFDEWFGSPNCHFGPYDNKARPNIPVYRDWEMVGRYYEEFPINLKTGEANLTQIYLQEALDFIKRQARHHPFFLYWAVDATHAPVYASKPFLGTSQRGRYGDAVREIDDSIGKILELLQDLHVADNTFVFFTSDNGAALISAPEQGGSNGPFLCGKQTTFEGGMREPALAWWPGHVTAGQVSHQLGSIMDLFTTSLALAGLTPPSDRAIDGLNLLPTLLQGRLMDRPIFYYRGDTLMAATLGQHKAHFWTWTNSWENFRQGIDFCPGQNVSGVTTHNLEDHTKLPLIFHLGRDPGERFPLSFASAEYQEALSRITSVVQQHQEALVPAQPQLNVCNWAVMNWAPPGCEKLGKCLTPPESIPKKCLWSH

SEQ ID NO: 5749 - protein, 170 aa, Homo sapiens
MTGTASSLAARAALLTGRLPIRNGFYTTNAHARNAYTPQEIVGGIPDSEQLLPELLKKAGYVSKIVGKWHLGHRPQFHPLKHGFDEWFGSPNCHFGPYDNKARPNIPVYRDWEMVGRYYEEFPINLKTGEANLTQIYLQEALDFIKRQARHHPFFLYWAVDATHAPVYAS

SEQ ID NO: 5750 - protein, 51 aa, Homo sapiens
SAAGMGASGAPQPPNILLLLMDDMHVFRGQLLRACRCWCQAGRRQTDTFPT

SEQ ID NO: 5751 - protein, 69 aa, Homo sapiens
SAAGMGASGAPQPPNILLLLMDDRGRHCSQDGYPSAMASTPPTPMPETPTHRRRLWAASQTRSSSCRSF

SEQ ID NO: 5752 - protein, 202 aa, Homo sapiens
MRRKEKRLLQAVALVLAALVLLPNVGLWALYRERQPDGTPGGSGAAVAPAAGQGSHSRQKKTFFLGDGQKLKDWHDKEAIRRDAQRVGNGEQGRPYPMTDAERVDQAYRENGFNIYVSDKISLNRSLPDIRHPNCNSKRYLETLPNTSIIIPFHNEGWSSLLRTVHSVLNRSPPELVAEIVLVDDFSDRDLPTASTPSPFVC

SEQ ID NO: 5753 - protein, 541 aa, Homo sapiens
MRRKEKRLLQAVALVLAALVLLPNVGLWALYRERQPDGTPGGSGAAVAPAAGQGSHSRQKKTFFLGDGQKLKDWHDKEAIRRDAQRVGNGEQGRPYPMTDAERVDQAYRENGFNIYVSDKISLNRSLPDIRHPNCNSKRYLETLPNTSIIIPFHNEGWSSLLRTVHSVLNRSPPELVAEIVLVDDFSDRDRIARNRKTIVCPMIDVIDHDDFRYETQAGDAMRGAFDWEMYYKRIPIPPELQKADPSDPFESPVMAGGLFAVDRKWFWELGGYDPGLEIWGGEQYEISFKVWMCGGRMEDIPCSRVGHIYRKYVPYKVPAGVSLARNLKRVAEVWMDEYAEYIYQRRPEYRHLSAGDVAVQKKLRSSLNCKSFKWFMTKIAWDLPKFYPPVEPPAAAWGEIRNVGTGLCADTKHGALGSPLRLEGCVRGRGEAAWNNMQVFTFTWREDIRPGDPQHTKKFCFDAISHTSPVTLYDCHSMKGNQLWKYRKDKTLYHPVSGSCMDCSESDHRIFMNTCNPSSLTQQWLFEHTNSTVLEKFNRN

SEQ ID NO: 5754 - protein, 603 aa, Homo sapiens
MRRKEKRLLQAVALVLAALVLLPNVGLWALYRERQPDGTPGGSGAAVAPAAGQGSHSRQKKTFFLGDGQKLKDWHDKEAIRRDAQRVGNGEQGRPYPMTDAERVDQAYRENGFNIYVSDKISLNRSLPDIRHPNCNSKRYLETLPNTSIIIPFHNEGWSSLLRTVHSVLNRSPPELVAEIVLVDDFSDREHLKKPLEDYMALFPSVRILRTKKREGLIRTRMLGASVATGDVITFLDSHCEANVNWLPPLLDRIARNRKTIVCPMIDVIDHDDFRYETQAGDAMRGAFDWEMYYKRIPIPPELQKADPSDPFESPVMAGGLFAVDRKWFWELGGYDPGLEIWGGEQYEISFKVWMCGGRMEDIPCSRVGHIYRKYVPYKVPAGVSLARNLKRVAEVWMDEYAEYIYQRRPEYRHLSAGDVAVQKKLRSSLNCKSFKWFMTKIAWDLPKFYPPVEPPAAAWGEIRNVGTGLCADTKHGALGSPLRLEGCVRGRGEAAWNNMQVFTFTWREDIRPGDPQHTKKFCFDAISHTSPVTLYDCHSMKGNQLWKYRKDKTLYHPVSGSCMDCSESDHRIFMNTCNPSSLTQQWLFEHTNSTVLEKFNRN

SEQ ID NO: 5755 - protein, 366 aa, Homo sapiens
MRRKEKRLLQAVALVLAALVLLPNVGLWALYRERQPDGTPGGSGAAVAPAAGQGSHSRQKKTFFLGDGQKLKDWHDKEAIRRDAQRVGNGEQGRPYPMTDAERVDQAYRENGFNIYVSDKISLNRSLPDIRHPNCNSKRYLETLPNTSIIIPFHNEGWSSLLRTVHSVLNRSPPELVAEIVLVDDFSDREHLKKPLEDYMALFPSVRILRTKKREGLIRTRMLGASVATGDVITFLDSHCEANVNWLPPLLDRIARNRKTIVCPMIDVIDHDDFRYETQAGDAMRGAFDWEMYYKRIPIPPELQKADPSDPFESPVMAGGLFAVDRKWFWELGGYDPGLEIWGGEQYEISFKVSQLSRRPVLGTAS

SEQ ID NO: 5756 - protein, 581 aa, Homo sapiens [sequence omitted]

SEQ ID NO: 5757 - protein, 31 aa, Homo sapiens
  SITE 1: note = misc_feature - Xaa can be any naturally occurring amino acid
XINIYLSDRISLHRRLPERWNPLAPEGALGQ

SEQ ID NO: 5758 - protein, 141 aa, Homo sapiens
ALPEVRHPLCLQQHPQDSLPTASVILCFHDEAWSTLLRTVHSILDTVPRAFLKEIILVDDLSQQGSHGFPPGSSGTTQVCSQRICGQAGGGEVTQEQQEAGCHQGPDAGGHQSHRGCARLHGCPLRVPPRLAGAPPQQNSW

SEQ ID NO: 5759 - protein, 196 aa, Homo sapiens
MERLQLQRRLGCRTFHWFLANVYPELYPSEPRPSFSGKLHNTGLGLCADCQAEGDILGCPMVLAPCSDSRQQQYLQHTSRKEIHFGSPQHLCFAVRQEQVILQNCTEEGLAIHQQHWDFQENGMIVHILSGKCMEAVVQENNKDLYLRPCDEKPASSGVLTRSMLWMNDECQCQKEKRILAIKIQLQVNLKSLYIS

SEQ ID NO: 5760 - protein, 639 aa, Homo sapiens
MLLRKRYRHRPCRLQFLLLLLMLGCVLMMVAMLHPPHHTLHQTVTAQASKHSPEARYRLDFGESQDWVLEAEDEGEEYSPLEGLPPFISLREDQLLVAVALPQARRNQSQGRRGGSYRLIKQPRRQDKEAPKRDWGADEDGEVSEEEELTPFSLDPRGLQEALSARIPLQRALPEVRHPLCLQQHPQDSLPTASVILCFHDEAWSTLLRTVHSILDTVPRAFLKEIILVDDLSQQGQLKSALSEYVARLEGVKLLRSNKRLGAIRARMLGATRATGDVLVFMDAHCECHPGWLEPLLSRIAGDRSRVVSPVIDVIDWKTFQYYPSKDLQRGVLDWKLDFHWEPLPEHVRKALQSPISPIRSPVVPGEVVAMDRHYFQNTGAYDSLMSLRGGENLELSFKAWLCGGSVEILPCSRVGHIYQNQDSHSPLDQEATLRNRVRIAETWLGSFKETFYKHSPEAFSLSKAEKPDCMERLQLQRRLGCRTFHWFLANVYPELYPSEPRPSFSGKLHNTGLGLCADCQAEGDILGCPMVLAPCSDSRQQQYLQHTSRKEIHFGSPQHLCFAVRQEQVILQNCTEEGLAIHQQHWDFQENGMIVHILSGKCMEAVVQENNKDLYLRPCDGKARQQWRFDQINAVDER

SEQ ID NO: 5761 - protein, 617 aa, Homo sapiens
MLLRKRYRHRPCRLQFLLLLLMLGCVLMMVAMLHPPHHTLHQTVTAQASKHSPEARYRLDFGESQDWVLEAEDEGEEYSPLEGLPPFISLREDQLLVAVALPQARRNQSQGRRGGSYRLIKQPRRQDKEAPKRDWGADEDGEVSEEEELTPFSLDPRGLQEALSARIPLQRALPEVRHPLCLQQHPQDSLPTASVILCFHDEAWSTLLRTVHSILDTVPRAFLKEIILVDDLSQQGQLKSALSEYVARLEGVKLLRSNKRLGAIRARMLGATRATGDVLVFMDAHCECHPGWLEPLLSRIAGDRSRVVSPVIDVIDWKTFQYYPSKDLQRGVLDWKLDFHWEPLPEHVRKALQSPISPIRSPVVPGEVVAMDRHYFQNTGAYDSLMSLRGGENLELSFKAWLCGGSVEILPCSRVGHIYQNQDSHSPLDQEATLRNRVRIAETWLGSFKETFYKHSPEAFSLSKAEKPDCMERLQLQRRLGCRTFHWFLANVYPELYPSEPRPSFSGKLHNTGLGLCADCQAEGDILGCPMVLAPCSDSRQQQYLQHTSRKEIHFGSPQHLCFAVRQEQVILQNCTEEGLAIHQQHWDFQEDENRANSAAAEAYQRPLTFQQIVNNG

SEQ ID NO: 5762 - protein, 571 aa, Homo sapiens
MRRRSRMLLCFAFLWVLGIAYYMYSGGGSALAGGAGGGAGRKEDWNEIDPIKKKDLHHSNGEEKAQSMETLPPGKVRWPDFNQEAYVGGTMVRSGQDPYARNKFNQVESDKLRMDRAIPDTRHDQCQRKQWRVDLPATSVVITFHNEARSALLRTVVSVLKKSPPHLIKEIILVDDYSNDPEDGALLGKIEKVRVLRNDRREGLMRSRVRGADAAQAKVLTFLDSHCECNEHWLEPLLERVAEDRTRVVSPIIDVINMDNFQYVGASADLKGGFDWNLVFKWDYMTPEQRRSRQGNPVAPIKTPMIAGGLFVMDKFYFEELGKYDMMMDVWGGENLEISFRVWQCGGSLEIIPCSRVGHVFRKQHPYTFPGGSGTVFARNTRRAAEVWMDEYKNFYYAAVPSARNVPYGNIQSRLELRKKLSCKPFKWYLENVYPELRVPDHQDIAFGALQQGTNCLDTLGHFADGVVGVYECHNAGGNQEWALTKEKSVKHMDLCLTVVDRAPGSLIKLQGCRENDSRQKWEQIEGNSKLRHVGSNLCLDSRTAKSGGLSVEVCGPALSQQWKFTLNLQQ

SEQ ID NO: 5763 - protein, 23 aa, Homo sapiens
MRLLRRRHMPLRLAMVGCAFVLF

SEQ ID NO: 5764 - protein, 23 aa, Homo sapiens
MRLLRRRHMPLRLAMVGCAFVLF

SEQ ID NO: 5765 - protein, 39 aa, Homo sapiens
MRLLRRRHMPLRLAMVGCAFVLFLFLLHRDVSSREEATE

SEQ ID NO: 5766 - protein, 55 aa, Homo sapiens
MRLLRRRHMPLRLAMVGCAFVLFLFLLHRDVSSREEATEKPWLKSLVSRKDHVLD

SEQ ID NO: 5767 - protein, 62 aa, Homo sapiens
MRLLRRRHMPLRLAMVGCAFVLFLFLLHRDVSSREEATEKPWLKSLVSRKDHVLDLMLEAMN

SEQ ID NO: 5768 - protein, 69 aa, Homo sapiens
MRLLRRRHMPLRLAMVGCAFVLFLFLLHRDVSSREEATEKPWLKSLVSRKDHVLDLMLEAMNNLRDSMP

SEQ ID NO: 5769 - protein, 78 aa, Homo sapiens
MRLLRRRHMPLRLAMVGCAFVLFLFLLHRDVSSREEATEKPWLKSLVSRKDHVLDLMLEAMNNLRDSMPKLQIRAPEA

SEQ ID NO: 5770 - protein, 123 aa, Homo sapiens
MRLLRRRHMPLRLAMVGCAFVLFLFLLHRDVSSREEATEKPWLKSLVSRKDHVLDLMLEAMNNLRDSMPKLQIRAPEAQQTLFSINQSCLPGFYTPAELKPFWERPPQDPNAPGADGKAFQKS

SEQ ID NO: 5771 - protein, 137 aa, Homo sapiens
MRLLRRRHMPLRLAMVGCAFVLFLFLLHRDVSSREEATEKPWLKSLVSRKDHVLDLMLEAMNNLRDSMPKLQIRAPEAQQTLFSINQSCLPGFYTPAELKPFWERPPQDPNAPGADGKAFQKSKWTPLETQEKEEGY

SEQ ID NO: 5772 - protein, 622 aa, Homo sapiens
MRLLRRRHMPLRLAMVGCAFVLFLFLLHRDVSSREEATEKPWLKSLVSRKDHVLDLMLEAMNNLRDSMPKLQIRAPEAQQTLFSINQSCLPGFYTPAELKPFWERPPQDPNAPGADGKAFQKSKWTPLETQEKEEGYKKHCFNAFASDRISLQRSLGPDTRPPECVDQKFRRCPPLATTSVIIVFHNEAWSTLLRTVYSVLHTTPAILLKEIILVDDASTEEHLKEKLEQYVKQLQVVRVVRQEERKGLITARLLGASVAQAEVLTFLDAHCECFHGWLEPLLARIAEDKTVVVSPDIVTIDLNTFEFAKPVQRGRVHSRGNFDWSLTFGWETLPPHEKQRRKDETYPIKSPTFAGGLFSISKSYFEHIGTYDNQMEIWGGENVEMSFRVWQCGGQLEIIPCSVVGHVFRTKSPHTFPKGTSVIARNQVRLAEVWMDSYKKIFYRRNLQAAKMAQEKSFGDISERLQLREQLHCHNFSWYLHNVYPEMFVPDLTPTFYGAIKNLGTNQCLDVGENNRGGKPLIMYSCHGLGGNQYFEYTTQRDLRHNIAKQLCLHVSKGALGLGSCHFTGKNSQVPKDEEWELAQDQLIRNSGSGTCLTSQDKKPAMAPCNPSDPHQLWLFV

SEQ ID NO: 5773 - protein, 365 aa, Homo sapiens
MRLLRRRHMPLRLAMVGCAFVLFLFLLHRDVSSREEATEKPWLKSLVSRKDHVLDLMLEAMNNLRDSMPKLQIRAPEAQQTLFSINQSCLPGFYTPAELKPFWERPPQDPNAPGADGKAFQKSKWTPLETQEKEEGYKKHCFNAFASDRISLQRSLGPDTRPPECVDQKFRRCPPLATTSVIIVFHNEAWSTLLRTVYSVLHTTPAILLKEIILVDDASTEEHLKEKLEQYVKQLQVVRVVRQEERKGLITARLLGASVAQAEVLTFLDAHCECFHGWLEPLLARIAEDKTVVVSPDIVTIDLNTFEFAKPVQRGRVHSRGNFDWSLTFGWETLPPHEKQRRKDETYPIKCGSVGASWRSSPALS

SEQ ID NO: 5774 - protein, 622 aa, Homo sapiens; identical to SEQ ID NO: 5772

SEQ ID NO: 5775 - protein, 637 aa, Homo sapiens
MMFWRKLPKALFIGLTLAIAVNLLLVFSSKGTLQNLFTGGLHRELPLHLNKRYGAVIKRLSHLEVELQDLKESMKLALRQQENVNSTLKRAKDEVRPLLKAMETKVNETKKHKTQMKLFPHSQLFRQWGEDLSEAQQKAAQDLFRKFGYNAYLSNQLPLNRTIPDTRDYRCLRKTYPSQLPSLSVILIFVNEALSIIQRAITSIINRTPSRLLKEIILVDDFSSNGELKVHLDEKIKLYNQKYPGLLKIIRHPERKGLAQARNTGWEAATADVVAILDAHIEVNVGWAEPILARIQEDRTVIVSPVFDNIRFDTFKLDKYELAVDGFNWELWCRYDALPQAWIDLHDVTAPVKSPSIMGILAANRHFLGEIGSLDGGMLIYGGENVELSLRVWQCGGKVEILPCSRIAHLERHHKPYALDLTAALKRNALRVAEIWMDEHKHMVYLAWNIPLQNSGIDFGDVSSRMALREKLKCKTFDWYLKNVYPLLKPLHTIVGYGRMKNLLDENVCLDQGPVPGNTPIMYYCHEFSSQNVYYHLTGELYVGQLIAEASASDRCLTDPGKAEKPTLEPCSKAAKNRLHIYWDFKPGGAVINRDTKRCLEMKKDLLGSHVLVLQTCSTQVWEIQHTVRDWGQTNSQ

SEQ ID NO: 5776 - protein, 529 aa, Homo sapiens
MRSEKSLTLAAPGEVRGPEGEQQDAGDFPEAGGGGGCCSSERLVINISGLRFETQLRTLSLFPDTLLGDPGRRVRFFDPLRNEYFFDRNRPSFDAILYYYQSGGRLRRPVNVPLDIFLEEIRFYQLGDEALAAFREDEGCLPEGGEDEKPLPSQPFQRQVWLLFEYPESSGPARGIAIVSVLVILISIVIFCLETLPQFRVDGRGGNNGGVSRVSPVSRGSQEEEEDEDDSYTFHHGITPGEMGTGGSSSLSTLGGSFFTDPFFLVETLCIVWFTFELLVRFSACPSKPAFFRNIMNIIDLVAIFPYFITLGTELVQQQEQQPASGGGGQNGQQAMSLAILRVIRLVRVFRIFKLSRHSKGLQILGKTLQASMRELGLLIFFLFIGVILFSSAVYFAEADDDDSLFPSIPDAFWWAVVTMTTVGYGDMYPMTVGGKIVGSLCAIAGVLTIALPVPVIVSNFNYFYHRETEQEEQGQYTHVTCGQPAPDLRATDNGLGKPDFPEANRERRPSYLPTPHRAYAEKRMLTEV

SEQ ID NO: 5777 - protein, 88 aa, Homo sapiens
  SITE 1: note = misc_feature - Xaa can be any naturally occurring amino acid
XENVCLDQGPVPGNTPIMYYCHEFSSQNVYYHLTGELYVGQLIAEASASDRCLTDPGKAEKPTLEPCSKAAKNRLHIYWDFKPPTITK

SEQ ID NO: 5778 - protein, 161 aa, Homo sapiens
  SITE 1: note = misc_feature - Xaa can be any naturally occurring amino acid
XYPLLKPLHTIVGYGRMKNLLDENVCLDQGPVPGNTPIMYYCHEFSSQNVYYHLTGELYVGQLIAEASASDRCLTDPGKAEKPTLEPCSKAAKNRLHIYWDFKPEKCWQVVQARTSMHRILTAAGPSTSSEDENPAWHRWQASGLTPLWRPPTSSNQARKS

SEQ ID NO: 5779 - protein, 417 aa, Homo sapiens
EHLKDKLEEYMARFSKVRIVRTKKREGLIRTRLLGASMARGEVLTFLDSHCEVNVNWLPPLLNQIALNHKTIVCPMIDVIDHNHFGYEAQAGDAMRGAFDWEMYYKRIPIPPELQRADPSDPFESPVMAGGLFAVDRKWFWELGGYDPGLEIWGGEQYEISFKVWMCGGEMFDVPCSRVGHIYRKYVPYKVPSGTSLARNLKRVAETWMDEFAEYIYQRRPEYRHLSTGDISAQKELRKQLKCKDFKWFMAAVAWDVPKYYPPVEPPPAAWGEIRNVAANLCVDSKHGATGTELRLDICVKDGSERTWSHEQLFTFGWREDIRPGEPLHTRKFCFDAISHNSPVTLYDCHGMKGNQLWGYRKDRTLFHPVSNSCMDCNPAEKKIFMARCDPLSETQQWIFEHINMTVLEKFNHHANS

SEQ ID NO: 5780 - protein, 601 aa, Homo sapiens
MKRKQKRFLQMTLLFTVALIFLPNVGLWSLYKDKHLVKSAEPGEQQTFPLGLGDGQFYSWTDGLRRKDWHDYESIQKEAMRSGKGEHGKPYPLTEEDHDDSAYRENGFNIFVSNNIALERSLPDIRHANCKHKMYLERLPNTSIIIPFHNEGWTSLLRTIHSIINRTPGSLIAEIILVDDFSEREHLKDKLEEYMARFSKVRIVRTKKREGLIRTRLLGASMARGEVLTFLDSHCEVNVNWLPPLLNQIALNHKTIVCPMIDVIDHNHFGYEAQAGDAMRGAFDWEMYYKRIPIPPELQRADPSDPFESPVMAGGLFAVDRKWFWELGGYDPGLEIWGGEQYEISFKVWMCGGEMFDVPCSRVGHIYRKYVPYKVPSGTSLARNLKRVAETWMDEFAEYIYQRRPEYRHLSTGDISAQKELRKQLKCKDFKWFMAAVAWDVPKYYPPVEPPPAAWGEIRNVAANLCVDSKHGATGTELRLDICVKDGSERTWSHEQLFTFGWREDIRPGEPLHTRKFCFDAISHNSPVTLYDCHGMKGNQLWGYRKDRTLFHPVSNSCMDCNPAEKKIFMARCDPLSETQQWIFEHINMTVLEKFNHHANS

SEQ ID NO: 5781 - protein, 61 aa, Homo sapiens
MKRKQKRFLQMTLLFTVALIFLPNVGLWSLYKDKHLVKSAEPGEQQVSATQRKITQGLVRQ

SEQ ID NO: 5782 - protein, 584 aa, Homo sapiens
MRAKFRAGAGHQRNPSISADHGVHELVYQTFPLGLGDGQFYSWTDGLRRKDWHDYESIQKEAMRSGKGEHGKPYPLTEEDHDDSAYRENGFNIFVSNNIALERSLPDIRHANCKHKMYLERLPNTSIIIPFHNEGWTSLLRTIHSIINRTPGSLIAEIILVDDFSEREHLKDKLEEYMARFSKVRIVRTKKREGLIRTRLLGASMARGEVLTFLDSHCEVNVNWLPPLLNQIALNHKTIVCPMIDVIDHNHFGYEAQAGDAMRGAFDWEMYYKRIPIPPELQRADPSDPFESPVMAGGLFAVDRKWFWELGGYDPGLEIWGGEQYEISFKVWMCGGEMFDVPCSRVGHIYRKYVPYKVPSGTSLARNLKRVAETWMDEFAEYIYQRRPEYRHLSTGDISAQKELRKQLKCKDFKWFMAAVAWDVPKYYPPVEPPPAAWGEIRNVAANLCVDSKHGATGTELRLDICVKDGSERTWSHEQLFTFGWREDIRPGEPLHTRKFCFDAISHNSPVTLYDCHGMKGNQLWGYRKDRTLFHPVSNSCMDCNPAEKKIFMARCDPLSETQQWIFEHINMTVLEKFNHHANS

SEQ ID NO: 5783 - protein, 116 aa, Homo sapiens
MAPPSVPLVLLLVLLLSLAETPASAPAHRGRGGWTLNSAGYLLGPVLHLPQMGDQDGKRETALEILDLWKAIDGLPYSHPPQPSKRNVMETFAKPEIGDLGMLSMKIPKEEDVLKS

SEQ ID NO: 5784 - protein, 49 aa, Homo sapiens
MAPPSVPLVLLLVLLLSLAETPASAPAHRSSTFPKWVTKTERGRQPLRS

SEQ ID NO: 5785 - protein, 49 aa, Homo sapiens; identical to SEQ ID NO: 5784

SEQ ID NO: 5786 - protein, 119 aa, Homo sapiens
MAAVAAVAARRRRLSVSGRDENSVELTMAEGPYKIILTARPFRLDLLEDRSLLLSVNARGLLEFEHQRAPRVSFSDKVNLTLGSIWDKIKNLFSRQGSKDPAEGDGAQPEETPRDGDKA

SEQ ID NO: 5787 - protein, 852 aa, Homo sapiens
MAAVAAVAARRRRLSVSGRDENSVELTMAEGPYKIILTARPFRLDLLEDRSLLLSVNARGLLEFEHQRAPRVSFSDKVNLTLGSIWDKIKNLFSRQGSKDPAEGDGAQPEETPRDGDKPEETQGKAEKDEPGAWEETFKTHSDSKPYGPMSVGLDFSLPGMEHVYGIPEHADNLRLKVTEGGEPYRLYNLDVFQYELYNPMALYGSVPVLLAHNPHRDLGIFWLNAAETWVDISSNTAGKTLFGKMMDYLQGSGETPQTDVRWMSETGIIDVFLLLGPSISDVFRQYASLTGTQALPPLFSLGYHQSRWNYRDEADVLEVDQGFDDHNLPCDVIWLDIEHADGKRYFTWDPSRFPQPRTMLERLASKRRKLVAIVDPHIKVDSGYRVHEELRNLGLYVKTRDGSDYEGWCWPGSAGYPDFTNPTMRAWWANMFSYDNYEGSAPNLFVWNDMNEPSVFNGPEVTMLKDAQHYGGWEHRDVHNIYGLYVHMATADGLRQRSGGMERPFVLARAFFAGSQRFGAVWTGDNTAEWDHLKISIPMCLSLGLVGLSFCGADVGGFFKNPEPELLVRWYQMGAYQPFFRAHAHLDTGRREPWLLPSQHNDIIRDALGQRYSLLPFWYTLLYQAHREGIPVMRPLWVQYPQDVTTFNIDDQYLLGDALLVHPVSDSGAHGVQVYLPGQGEVWYDIQSYQKHHGPQTLYLPVTLSSIPVFQRGGTIVPRWMRVRRSSECMKDDPITLFVALSPQGTAQGELFLDDGHTFNYQTRQEFLLRRFSFSGNTLVSSSADPEGHFETPIWIERVVIIGAGKPAAVVLQTKGSPESRLSFQHDPETSVLVLRKPGINVASDWSIHLR

SEQ ID NO: 5788 - protein, 76 aa, Homo sapiens
MAAVAAVAARRRRSWASLVLAFLGVCLGITLAVDRSNFKTCEESSFCDREAYGQASLHTEPCWTLYSLVLIPSRSI

SEQ ID NO: 5789 - protein, 52 aa, Homo sapiens
MAAVAAVAARRRRSWASLVLAFLGVCLGITLAVDRSNFKTCEESSFCKCCWC

SEQ ID NO: 5790 - protein, 52 aa, Homo sapiens; identical to SEQ ID NO: 5789

SEQ ID NO: 5791 - protein, 52 aa, Homo sapiens; identical to SEQ ID NO: 5789

SEQ ID NO: 5792 - protein, 966 aa, Homo sapiens
MAAVAAVAARRRRSWASLVLAFLGVCLGITLAVDRSNFKTCEESSFCKRQRSIRPGLSPYRALLDSLQLGPDSLTVHLIHEVTKVLLVLELQGLQKNMTRFRIDELEPRRPRYRVPDVLVADPPIARLSVSGRDENSVELTMAEGPYKIILTARPFRLDLLEDRSLLLSVNARGLLEFEHQRAPRVSFSDKVNLTLGSIWDKIKNLFSRQGSKDPAEGDGAQPEETPRDGDKPEETQGKAEKDEPGAWEETFKTHSDSKPYGPMSVGLDFSLPGMEHVYGIPEHADNLRLKVTEGGEPYRLYNLDVFQYELYNPMALYGSVPVLLAHNPHRDLGIFWLNAAETWVDISSNTAGKTLFGKMMDYLQGSGETPQTDVRWMSETGIIDVFLLLGPSISDVFRQYASLTGTQALPPLFSLGYHQSRWNYRDEADVLEVDQGFDDHNLPCDVIWLDIEHADGKRYFTWDPSRFPQPRTMLERLASKRRKLVAIVDPHIKVDSGYRVHEELRNLGLYVKTRDGSDYEGWCWPGSAGYPDFTNPTMRAWWANMFSYDNYEGSAPNLFVWNDMNEPSVFNGPEVTMLKDAQHYGGWEHRDVHNIYGLYVHMATADGLRQRSGGMERPFVLARAFFAGSQRFGAVWTGDNTAEWDHLKISIPMCLSLGLVGLSFCGADVGGFFKNPEPELLVRWYQMGAYQPFFRAHAHLDTGRREPWLLPSQHNDIIRDALGQRYSLLPFWYTLLYQAHREGIPVMRPLWVQYPQDVTTFNIDDQYLLGDALLVHPVSDSGAHGVQVYLPGQGEVWYDIQSYQKHHGPQTLYLPVTLSSIPVFQRGGTIVPRWMRVRRSSECMKDDPITLFVALSPQGTAQGELFLDDGHTFNYQTRQEFLLRRFSFSGNTLVSSSADPEGHFETPIWIERVVIIGAGKPAAVVLQTKGSPESRLSFQHDPETSVLVLRKPGINVASDWSIHLR

SEQ ID NO: 5793 - protein, 944 aa, Homo sapiens
MAAVAAVAARRRRSWASLVLAFLGVCLGITLAVDRSNFKTCEESSFCKRQRSIRPGLSPYRALLDSLQLGPDSLTVHLIHEVTKVLLVLELQGLQKNMTRFRIDELEPRRPRYRVPDVLVADPPIARLSVSGRDENSVELTMAEGPYKIILTARPFRLDLLEDRSLLLSVNARGLLEFEHQRAPRVSQGSKDPAEGDGAQPEETPRDGDKPEETQGKAEKDEPGAWEETFKTHSDSKPYGPMSVGLDFSLPGMEHVYGIPEHADNLRLKVTEGGEPYRLYNLDVFQYELYNPMALYGSVPVLLAHNPHRDLGIFWLNAAETWVDISSNTAGKTLFGKMMDYLQGSGETPQTDVRWMSETGIIDVFLLLGPSISDVFRQYASLTGTQALPPLFSLGYHQSRWNYRDEADVLEVDQGFDDHNLPCDVIWLDIEHADGKRYFTWDPSRFPQPRTMLERLASKRRKLVAIVDPHIKVDSGYRVHEELRNLGLYVKTRDGSDYEGWCWPGSAGYPDFTNPTMRAWWANMFSYDNYEGSAPNLFVWNDMNEPSVFNGPEVTMLKDAQHYGGWEHRDVHNIYGLYVHMATADGLRQRSGGMERPFVLARAFFAGSQRFGAVWTGDNTAEWDHLKISIPMCLSLGLVGLSFCGADVGGFFKNPEPELLVRWYQMGAYQPFFRAHAHLDTGRREPWLLPSQHNDIIRDALGQRYSLLPFWYTLLYQAHREGIPVMRPLWVQYPQDVTTFNIDDQYLLGDALLVHPVSDSGAHGVQVYLPGQGEVWYDIQSYQKHHGPQTLYLPVTLSSIPVFQRGGTIVPRWMRVRRSSECMKDDPITLFVALSPQGTAQGELFLDDGHTFNYQTRQEFLLRRFSFSGNTLVSSSADPEGHFETPIWIERVVIIGAGKPAAVVLQTKGSPESRLSFQHDPETSVLVLRKPGINVASDWSIHLR

SEQ ID NO: 5794 - protein, 847 aa, Homo sapiens
MTRFRIDELEPRRPRYRVPDVLVADPPIARLSVSGRDENSVELTMAEGPYKIILTARPFRLDLLEDRSLLLSVNARGLLEFEHQRAPRVSQGSKDPAEGDGAQPEETPRDGDKPEETQGKAEKDEPGAWEETFKTHSDSKPYGPMSVGLDFSLPGMEHVYGIPEHADNLRLKVTEGGEPYRLYNLDVFQYELYNPMALYGSVPVLLAHNPHRDLGIFWLNAAETWVDISSNTAGKTLFGKMMDYLQGSGETPQTDVRWMSETGIIDVFLLLGPSISDVFRQYASLTGTQALPPLFSLGYHQSRWNYRDEADVLEVDQGFDDHNLPCDVIWLDIEHADGKRYFTWDPSRFPQPRTMLERLASKRRKLVAIVDPHIKVDSGYRVHEELRNLGLYVKTRDGSDYEGWCWPGSAGYPDFTNPTMRAWWANMFSYDNYEGSAPNLFVWNDMNEPSVFNGPEVTMLKDAQHYGGWEHRDVHNIYGLYVHMATADGLRQRSGGMERPFVLARAFFAGSQRFGAVWTGDNTAEWDHLKISIPMCLSLGLVGLSFCGADVGGFFKNPEPELLVRWYQMGAYQPFFRAHAHLDTGRREPWLLPSQHNDIIRDALGQRYSLLPFWYTLLYQAHREGIPVMRPLWVQYPQDVTTFNIDDQYLLGDALLVHPVSDSGAHGVQVYLPGQGEVWYDIQSYQKHHGPQTLYLPVTLSSIPVFQRGGTIVPRWMRVRRSSECMKDDPITLFVALSPQGTAQGELFLDDGHTFNYQTRQEFLLRRFSFSGNTLVSSSADPEGHFETPIWIERVVIIGAGKPAAVVLQTKGSPESRLSFQHDPETSVLVLRKPGINVASDWSIHLR

SEQ ID NO: 5795 - protein, 79 aa, Homo sapiens
MPSPRPVLLRGARAALLLLLPPRLLARPSLLLRRSLSAASCPPISLPAAASRSSMDGAGAEEVLAPLRLAVRQQAVWNQ

SEQ ID NO: 5796 - protein, 79 aa, Homo sapiens; identical to SEQ ID NO: 5795

SEQ ID NO: 5797 - protein, 739 aa, Homo sapiens
MPSPRPVLLRGARAALLLLLPPRLLARPSLLLRRSLSAASCPPISLPAAASRSSMDGAGAEEVLAPLRLAVRQQGDLVRKLKEDKAPQVDVDKAVAELKARKRVLEAKELALQPKDDIVDRAKMEDTLKRRFFYDQAFAIYGGVSGLYDFGPVGCALKNNIIQTWRQHFIQEEQILEIDCTMLTPEPVLKTSGHVDKFADFMVKDVKNGECFRADHLLKAHLQKLMSDKKCSVEKKSEMESVLAQLDNYGQQELADLFVNYNVKSPITGNDLSPPVSFNLMFKTFIGPGGNMPGYLRPETAQGIFLNFKRLLEFNQGKLPFAAAQIGNSFRNEISPRSGLIRVREFTMAEIEHFVDPSEKDHPKFQNVADLHLYLYSAKAQVSGQSARKMRLGDAVEQGVINNTVLGYFIGRIYLYLTKVGISPDKLRFRQHMENEMAHYACDCWDAESKTSYGWIEIVGCADRSCYDLSCHARATKVPLVAEKPLKEPKTVNVVQFEPSKGAIGKAYKKDAKLVMEYLAICDECYITEMEMLLNEKGEFTIETEGKTFQLTKDMINVKRFQKTLYVEEVVPNVIEPSFGLGRIMYTVFEHTFHVREGDEQRTFFSFPAVVAPFKCSVLPLSQNQEFMPFVKELSEALTRHGVSHKVDDSSGSIGRRYARTDEIGVAFGVTIDFDTVNKTPHTATLRDRDSMRQIRAEISELPSIVQDLANGNITWADVEARYPLFEGQETGKKETIEE

SEQ ID NO: 5798 - protein, 77 aa, Homo sapiens
VVQFEPSKGAIGKAYKKDAKLVMEYLAICDECYITEMEMLLNEKGEFTIETEGKTFQLTKDMINVKRFQKTLYEQIL

SEQ ID NO: 5799 - protein, 345 aa, Homo sapiens
MVAALLGGGGEARGGTVPGAWLCLMALLQLLGSAPRGSGLAHGRRLICWQALLQCQGEPECSYAYNQYAEACAPVLAQHGGGDAPGAAAAAFPASAASFSSRWRCPSHCISALIQLNHTRRGPALEDCDCAQDENCKSTKRAIEPCLPRTSGGGAGGPGAGGVMGCTEARRRCDRDSRCNLALSRYLTYCGKVFNGLRCTDECRTVIEDMLAMPKAALLNDCVCDGLERPICESVKENMARLCFGAELGNGPGSSGSDGGLDDYYDEDYDDEQRTGGAGGEQPLDDDDGVPHPPRPGSGAAASGGRGDLPYGPGRRSSGGGGRLAPRGAWTPLASILLLLLGPLF

SEQ ID NO: 5800 - protein, 678 aa, Homo sapiens
MAPSLSPGPAALRRAPQLLLLLLAAECALAALLPAREATQFLRPRQRRAFQVFEEAKQGHLERECVEELCSREEAREVFENDPETDYFYPRYLDCINKYGSPYTKNSGFATCVQNLPDQCTPNPCDRKGTQACQDLMGNFFCLCKAGWGGRLCDKDVNECSQENGGCLQICHNKPGSFHCSCHSGFELSSDGRTCQDIDECADSEACGEARCKNLPGSYSCLCDEGFAYSSQEKACRDVDECLQGRCEQVCVNSPGSYTCHCDGRGGLKLSQDMDTCEDILPCVPFSVAKSVKSLYLGRMFSGTPVIRLRFKRLQPTRLVAEFDFRTFDPEGILLFAGGHQDSTWIVLALRAGRLELQLRYNGVGRVTSSGPVINHGMWQTISVEELARNLVIKVNRDAVMKIAVAGDLFQPERGLYHLNLTVGGIPFHEKDLVQPINPRLDGCMRSWNWLNGEDTTIQETVKVNTRMQCFSVTERGSFYPGSGFAFYSLDYMRTPLDVGTESTWEVEVVAHIRPAADTGVLFALWAPDLRAVPLSVALVDYHSTKKLKKQLVVLAVEHTALALMEIKVCDGQEHVVTVSLRDGEATLEVDGTRGQSEVSAAQLQERLAVLERHLRSPVLTFAGGLPDVPVTSAPVTAFYRGCMTLEVNRRLLDLDEAAYKHSDITAHSCPPVEPAAA

SEQ ID NO: 5801 - protein, 101 aa, Homo sapiens
MQRLCVYVLIFALALAAFSEASWKPRSQQPDAPLGTGANRDLELPWLEQQGPASHHRRQLGPQGPPHLVADPSKKQGPWLEEEEEAYGWMDFGRRSAEDEN

SEQ ID NO: 5802 - protein, 144 aa, Homo sapiens
KLESIDGARYHALLIPSCPGALTDLASSGSLARILQHFHSESKPICAVGHGVAALCCATNEDRSWVFDSYSLTGPSVCELVRAPGFARLPLVVEDFVKDSGACFSGLGAAPGWGRGGKQEDRPPEEQRRAGEDFPIYQCVFIYP

SEQ ID NO: 5803 - protein, 184 aa, Homo sapiens
MASERLPNRPACLLVASGAAEGVSAQSFLHCFTMASTAFNLQVATPGGKAMEFVDVTESNARWVQDFRLKAYASPAKLESIDEPICAVGHGVAALCCATNEDRSWVFDSYSLTGPSVCELVRAPGFARLPLVVEDFVKDSGACFSASEPDAVHVVLDRHLVTGQNASSTVPAVQNLLFLCGSRK

SEQ ID NO: 5804 - protein, 184 aa, Homo sapiens; identical to SEQ ID NO: 5803

SEQ ID NO: 5805 - protein, 186 aa, Homo sapiens
MASERLPNRPACLLVASGAAEGVSAQSFLHCFTMASTAFNLQVATPGGKAMEFVDVTESNARWVQDFRLKAYASPAKLESIDGARYHALLIPSCPGALTDLASSGSLARILQHFHSESKPICAVGHGVAALCCATNEDRSWVFDSYSLTGGLGLSQEPPPRSRSPLCVSSSGPPASPACRSWWRTS

SEQ ID NO: 5806 - protein, 220 aa, Homo sapiens
MASERLPNRPACLLVASGAAEGVSAQSFLHCFTMASTAFNLQVATPGGKAMEFVDVTESNARWVQDFRLKAYASPAKLESIDGARYHALLIPSCPGALTDLASSGSLARILQHFHSESKPICAVGHGVAALCCATNEDRSWVFDSYSLTGPSVCELVRAPGFARLPLVVEDFVKDSGACFSASEPDAVHVVLDRHLVTGQNASSTVPAVQNLLFLCGSRK

SEQ ID NO: 5807 - protein, 250 aa, Homo sapiens
MASERLPNRPACLLVASGAAEGVSAQSFLHCFTMASTAFNLQVATPGGKAMEFVDVTESNARWVQDFRLKAYASPAKLESIDGARYHALLIPSCPGALTDLASSGSLARILQHFHSESKPICAVGHGVAALCCATNEDRSWVFDSYSLTGPSVCELVRAPGFARLPLVVEDFVKDSGACFSGAAASCPKADRHWQHFPVEEIFLACGFKVAGLGAAPGWGRGGKQEDRPPEEQRRAGEDFPIYQCVFIYP

SEQ ID NO: 5808 - protein, 120 aa, Homo sapiens
MASERLPNRPACLLVASGAAEGVSAQSFLHCFTMASTAFNLQVATPGGKAMEFVDVTESNARWVQDFRLKAYASPAKLESIDGARYHALLIPSCPGALTDLASSGSLARILQHFHSESSR

SEQ ID NO: 5809 - protein, 162 aa, Homo sapiens
WVQDFRLKAYASPAKLESIDGARYHALLIPSCPGALTDLASSGSLARILQHFHSESKPICAVGHGVAALCCATNEDRSWVFDSYSLTGPSVCELVRAPGFARLPLVVEDFVKDSGACFSGQGLGQHQAGAEEESKRTDLQKSSGGRVRISPYTSVCSSTHEE

SEQ ID NO: 5810 - protein, 87 aa, Homo sapiens
  SITE 1: note = misc_feature - Xaa can be any naturally occurring amino acid
XPSVCELVRAPGFARLPLVVEDFVKDSGACFSASEPDAVHVVLDRHLVTGQNASSTVPAVQNLLFLCGSRSSSLLPQGRPALAALSC

SEQ ID NO: 5811 - protein, 487 aa, Homo sapiens
MEFSSPSREECPKPLSRVSIMAGSLTGLLLLQAVSWASGARPCIPKSFGYSSVVCVCNATYCDSFDPPTFPALGTFSRYESTRSGRRMELSMGPIQANHTGTGIGYNIIRVPMASCDFSIRTYTYADTPDDFQLHNFSLPEEDTKLKIPLIHRALQLAQRPVSLLASPWTSPTWLKTNGAVNGKGSLKGQPGDIYHQTWARYFVKFLDAYAEHKLQFWAVTAENEPSAGLLSGYPFQCLGFTPEHQRDFIARDLGPTLANSTHHNVRLLMLDDQRLLLPHWAKVVLTDPEAAKYVHGIAVHWYLDFLAPAKATLGETHRLFPNTMLFASEACVGSKFWEQSVRLGSWDRGMQYSHSIITNLLYHVVGWTDWNLALNPEGGPNWVRNFVDSPIIVDITKDTFYKQPMFYHLGHFSKFIPEGSQRVGLVASQKNDLDAVALMHPDGSAVVVVLNRSSKDVPLTIKDPAVGFLETISPGYSIHTYLWRRQ

SEQ ID NO: 5812 - protein, 536 aa, Homo sapiens
MEFSSPSREECPKPLSRVSIMAGSLTGLLLLQAVSWASGARPCIPKSFGYSSVVCVCNATYCDSFDPPTFPALGTFSRYESTRSGRRMELSMGPIQANHTGTGLLLTLQPEQKFQKVKGFGGAMTDAAALNILALSPPAQNLLLKSYFSEEGIGYNIIRVPMASCDFSIRTYTYADTPDDFQLHNFSLPEEDTKLKIPLIHRALQLAQRPVSLLASPWTSPTWLKTNGAVNGKGSLKGQPGDIYHQTWARYFVKFLDAYAEHKLQFWAVTAENEPSAGLLSGYPFQCLGFTPEHQRDFIARDLGPTLANSTHHNVRLLMLDDQRLLLPHWAKVVLTDPEAAKYVHGIAVHWYLDFLAPAKATLGETHRLFPNTMLFASEACVGSKFWEQSVRLGSWDRGMQYSHSIITNLLYHVVGWTDWNLALNPEGGPNWVRNFVDSPIIVDITKDTFYKQPMFYHLGHFSKFIPEGSQRVGLVASQKNDLDAVALMHPDGSAVVVVLNRSSKDVPLTIKDPAVGFLETISPGYSIHTYLWRRQ

SEQ ID NO: 5813 - protein, 536 aa, Homo sapiens; identical to SEQ ID NO: 5812

SEQ ID NO: 5814 - protein, 449 aa, Homo sapiens
MELSMGPIQANHTGTGLLLTLQPEQKFQKVKGFGGAMTDAAALNILALSPPAQNLLLKSYFSEEGIGYNIIRVPMASCDFSIRTYTYADTPDDFQLHNFSLPEEDTKLKIPLIHRALQLAQRPVSLLASPWTSPTWLKTNGAVNGKGSLKGQPGDIYHQTWARYFVKFLDAYAEHKLQFWAVTAENEPSAGLLSGYPFQCLGFTPEHQRDFIARDLGPTLANSTHHNVRLLMLDDQRLLLPHWAKVVLTDPEAAKYVHGIAVHWYLDFLAPAKATLGETHRLFPNTMLFASEACVGSKFWEQSVRLGSWDRGMQYSHSIITNLLYHVVGWTDWNLALNPEGGPNWVRNFVDSPIIVDITKDTFYKQPMFYHLGHFSKFIPEGSQRVGLVASQKNDLDAVALMHPDGSAVVVVLNRSSKDVPLTIKDPAVGFLETISPGYSIHTYLWRRQ

SEQ ID NO: 5815 - protein, 54 aa, Homo sapiens
MHRRRLALGLGFCLLAGTSLSVLWVYLENWLPVSYVPYYLPCPEIFILAAPCMV

SEQ ID NO: 5816 - protein, 160 aa, Homo sapiens
MHRRRLALGLGFCLLAGTSLSVLWVYLENWLPVSYVPYYLPCPEIFNMKLHYKREKPLQPVVWSQYPQPKLLEHRGGSQCPRPPCCQAHTAADTHTLVGAHRLRGNLQPRASAAHLPATEPDHWGHGVCRGEVHSFHPVLPGVSRGVLHAWVPGALLHLH

SEQ ID NO: 5817 - protein, 120 aa, Homo sapiens
MHRRRLALGLGFCLLAGTSLSVLWVYLENWLPVSYVPYYLPCPEIFNMKLHYKREKPLQPVVWSQYPQPKLLEHRPTQLLTLTPWLAPIVSEGTFNPELLQHIYQPLNLTIGVTVFAVGK

SEQ ID NO: 5818 - protein, 347 aa, Homo sapiens
MHRRRLALGLGFCLLAGTSLSVLWVYLENWLPVSYVPYYLPCPEIFNMKLHYKREKPLQPVVWSQYPQPKLLEHRPTQLLTLTPWLAPIVSEGTFNPELLQHIYQPLNLTIGVTVFAVGKYTHFIQSFLESAEEFFMRGYRVHYYIFTDNPAAVPGVPLGPHRLLSSIPIQGHSHWEETSMRRMETISQHIAKRAHREVDYLFCLDVDMVFRNPWGPETLGDLVAAIHPSYYAVPRQQFPYERRRVSTAFVADSEGDFYYGGAVFGGQVARVYEFTRGCHMAILADKANGIMAAWREESHLNRHFISNKPSKVLSPEYLWDDRKPQPPSLKLIRFSTLDKDISCLRS

SEQ ID NO: 5819 - protein, 294 aa, Homo sapiens
MHRRRLALGLGFCLLAGTSLSVLWVYLENWLPVSYVPYYLPCPEIFNMKLHYKREKPLQPVVWSQYPQPKLLEHRPTQLLTLTPWLAPIVSEGTFNPELLQHIYQPLNLTIGVTVFAVGNPSWSQPRSSSCVGTGCTTTSSLTTLQPFPGSRWVPTGFSAPSPSRVTPTGRRHPCAGWRPSASTLLRGLTGRWTTSSALMWTWCFGTRGALRPWETWWLPFTQATTPFPASSSPMSAGVFPLPLWQTAKGTSIMVGQSSGGRWPGYMSLLGAATWPSWRTRPMASWLPGGRKAT

SEQ ID NO: 5820 - protein, 72 aa, Homo sapiens
MHRRRLALGLGFCLLAGTSLSVLWVYLENWLPVSYVPYYLPCPEILLEYRGVISAHCNLHLPGSSNCHASAT

SEQ ID NO: 5821 - protein, 72 aa, Homo sapiens; identical to SEQ ID NO: 5820

SEQ ID NO: 5822 - protein, 160 aa, Homo sapiens
MHRRRLALGLGFCLLAGTSLSVLWVYLENWLPVSYVPYYLPCPEILPMMMALSCLCHQQHEAALQEGEATPARGMVTVPSAQAAGAQAHTAADTHTLVGAHRLRGNLQPRASAAHLPATEPDHWGHGVCRGEVHSFHPVLPGVSRGVLHAWVPGALLHLH

SEQ ID NO: 5823 - protein, 330 aa, Homo sapiens
MHRRRLALGLGFCLLAGTSLSVLWVYLENWLPVSYVPYYLPCPEILSQYPQPKLLEHRPTQLLTLTPWLAPIVSEGTFNPELLQHIYQPLNLTIGVTVFAVGKYTHFIQSFLESAEEFFMRGYRVHYYIFTDNPAAVPGVPLGPHRLLSSIPIQGHSHWEETSMRRMETISQHIAKRAHREVDYLFCLDVDMVFRNPWGPETLGDLVAAIHPSYYAVPRQQFPYERRRVSTAFVADSEGDFYYGGAVFGGQVARVYEFTRGCHMAILADKANGIMAAWREESHLNRHFISNKPSKVLSPEYLWDDRKPQPPSLKLIRFSTLDKDISCLRS

SEQ ID NO: 5824 - protein, 145 aa, Homo sapiens
MKRVLVLLLAVAFGHALERGRDYEKNKVCKEFSHLGKEDFTSLSLVLYSRKFPSGTFEQVSQLVKEVVSLTEACCAEGADPDCYDTRTSALSAKSCESNSPFPVHPGTAECCTKEGLERKLCMAALKHQPQEFPTYVEPTNDEIC

SEQ ID NO: 5825 - protein, 474 aa, Homo sapiens
MKRVLVLLLAVAFGHALERGRDYEKNKVCKEFSHLGKEDFTSLSLVLYSRKFPSGTFEQVSQLVKEVVSLTEACCAEGADPDCYDTRTSALSAKSCESNSPFPVHPGTAECCTKEGLERKLCMAALKHQPQEFPTYVEPTNDEICEAFRKDPKEYANQFMWEYSTNYGQAPLSLLVSYTKSYLSMVGSCCTSASPTVCFLKERLQLKHLSLLTTLSNRVCSQYAAYGEKKSRLSNLIKLAQKVPTADLEDVLPLAEDITNILSKCCESASEDCMAKELPEHTVKLCDNLSTKNSKFEDCCQEKTAMDVFVCTYFMPAAQLPELPDVELPTNKDVCDPGNTKVMDKYTFELSRRTHLPEVFLSKVLEPTLKSLGECCDVEDSTTCFNAKGPLLKKELSSFIDKGQELCADYSENTFTEYKKKLAERLKAKLPDATPTELAKLVNKHSDFASNCCSINSPPLYCDSEIDAELKNIL

SEQ ID NO: 5826 - protein, 348 aa, Homo sapiens
MKRVLVLLLAVAFGHALERGRDYEKNKVCKEFSHLGKEDFTSLSLVLYSRKFPSGTFEQVSQLVKEVVSLTEACCAEGADPDCYDTRTSALSAKSCESNSPFPVHPGTAECCTKEGLERKLCMAALKHQPQEFPTYVEPTNDEICEAFRKDPKEYANQFMWEYSTNYGQAPLSLLVSYTKSYLSMVGSCCTSASPTVCFLKERLQLKHLSLLTTLSNRVCSQYAAYGEKKSRLSNLIKLAQKVPTADLEDVLPLAEDITNILSKCCESASEDCMAKELPEHTVKLCDNLSTKNSKFEDCCQEKTAMDVFVCTYFMPAAQLPELPDVELPTNKDVCDPGNTKVMDKALY

SEQ ID NO: 5827 - protein, 476 aa, Homo sapiens
MKRVLVLLLAVAFGHALERGRDYEKNKVCKEFSHLGKEDFTSLSLVLYSRKFPSGTFEQVSQLVKEVVSLTEACCAEGADPDCYDTRTSALSAKSCESNSPFPVHPGTAECCTKEGLERKLCMAALKHQPQEFPTYVEPTNDEICEAFRKDPKEYANQFMWEYSTNYGQAPLSLLVSYTKSYLSMVGSCCTSASPTVCFLKERLQLKHLSLLTTLSNRVCSQYAAYGEKKSRLSNLIKLAQKVPTADLEDVLPLAEDITNILSKCCESASEDCMAKELPEHTVKLCDNLSTKNSKFEDCCQEKTAMDVFVCTYFMPAAQLPELPDVELPTNKDVCDPGNTKVMDKYTFELSRRTHLPEVFLSKVLEPTLKSLGECCDVEDSTTCFNAKGPLLKKELSSFIDKGQELCADYSENTFTEYKKKLAERLKAKLPDATPTELAKLVNKHSDFASNCCSINSPPLYCDSETRVGATQGNDL

SEQ ID NO: 5828 - protein, 493 aa, Homo sapiens
MLWSWSEERGGAARLSGRKMKRVLVLLLAVAFGHALERGRDYEKNKVCKEFSHLGKEDFTSLSLVLYSRKFPSGTFEQVSQLVKEVVSLTEACCAEGADPDCYDTRTSALSAKSCESNSPFPVHPGTAECCTKEGLERKLCMAALKHQPQEFPTYVEPTNDEICEAFRKDPKEYANQFMWEYSTNYGQAPLSLLVSYTKSYLSMVGSCCTSASPTVCFLKERLQLKHLSLLTTLSNRVCSQYAAYGEKKSRLSNLIKLAQKVPTADLEDVLPLAEDITNILSKCCESASEDCMAKELPEHTVKLCDNLSTKNSKFEDCCQEKTAMDVFVCTYFMPAAQLPELPDVELPTNKDVCDPGNTKVMDKYTFELSRRTHLPEVFLSKVLEPTLKSLGECCDVEDSTTCFNAKGPLLKKELSSFIDKGQELCADYSENTFTEYKKKLAERLKAKLPDATPTELAKLVNKHSDFASNCCSINSPPLYCDSEIDAELKNIL

SEQ ID NO: 5829 - protein, 180 aa, Homo sapiens
MKSIYFVAGLFVMLVQGSWQRSLQDTEEKSRSFSASQADPLSDPDQMNEDKRHSQGTFTSDYSKYLDSRRAQDFVQWLMNTKRNRNNIAKRHDEFERHAEGTFTSDVSSYLEGQAAKEFIAWLVKGRGRRDFPEEVAIVEELGRRHADGSFSDEMNTILDNLAARDFINWLIQTKITDRK

SEQ ID NO: 5830 - protein, 180 aa, Homo sapiens; identical to SEQ ID NO: 5829

SEQ ID NO: 5831 - protein, 80 aa, Homo sapiens
MPPCQPQRPLLLLLLLLACQPQVPSAQVMDFLFEKWKLYGDQCHHNLSLLPPPTELVCNRTFDKYSCWPDTPANTTANIS

SEQ ID NO: 5832 - protein, 477 aa, Homo sapiens
MPPCQPQRPLLLLLLLLACQPQVPSAQVMDFLFEKWKLYGDQCHHNLSLLPPPTELVCNRTFDKYSCWPDTPANTTANISCPWYLPWHHKVQHRFVFKRCGPDGQWVRGPRGQPWRDASQCQMDGEEIEVQKEVAKMYSSFQVMYTVGYSLSLGALLLALAILGGLSKLHCTRNAIHANLFASFVLKASSVLVIDGLLRTRYSQKIGDDLSVSTWLSDGAVAGCRVAAVFMQYGIVANYCWLLVEGLYLHNLLGLATLPERSFFSLYLGIGWGAPMLFVVPWAVVKCLFENVQCWTSNDNMGFWWILRFPVFLAILINFFIFVRIVQLLVAKLRARQMHHTDYKFRLAKSTLTLIPLLGVHEVVFAFVTDEHAQGTLRSAKLFFDLFLSSFQGLLVAVLYCFLNKEVQSELRRRWHRWRLGKVLWEERNTSNHRASSSPGHGPPSKELQFGRGGGSQDSSAETPLAGGLPRLAESPF

SEQ ID NO: 5833 - protein, 523 aa, Homo sapiens
MPPCQPQRPLLLLLLLLACQPQVPSAQVMDFLFEKWKLYGDQCHHNLSLLPPPTELVCNRTFDKYSCWPDTPANTTANISCPWYLPWHHKVQHRFVFKRCGPDGQWVRGPRGQPWRDASQCQMDGEEIEVQKEVAKMYSSFQVMYTVGYSLSLGALLLALAILGGLSKLHCTRNAIHANLFASFVLKASSVLVIDGLLRTRYSQKIGDDLSVSTWLSDGVSPPRRPQAGGWVGSQAGGHVAALTLHLYQAVAGCRVAAVFMQYGIVANYCWLLVEGLYLHNLLGLATLPERSFFSLYLGIGWGAPMLFVVPWAVVKCLFENVQCWTSNDNMGFWWILRFPVFLAILINFFIFVRIVQLLVAKLRARQMHHTDYKFRLAKSTLTLIPLLGVHEVVFAFVTDEHAQGTLRSAKLFFDLFLSSFQVPARPPAPPPGAQCATPDHPVSPGPAGGCPLLLPQQGGAVGAAAALAPLAPGQSAMGGAEHQQPQGLIFARPRPSQQGAAVWEGWWQPGFICGDPLGWWPP

SEQ ID NO: 5834 - protein, 308 aa, Homo sapiens
MFVQLLRAIYVPQNVYCIHVDEKAPMKYKTAVQTLVNCFENVFISSKTEKVAYAGFTRLQADINCMKVLVHSKFQWNYVINLCGQDFPIKTNREIIHYIRSKWSDKNITPGVIQPLHIKSKTSQSHLEFVPKGSIYAPPNNRFKDKPPHNLTIYFGSAYYVLTRKFVEFILTDIHAKDMLQWSKDIRSPEQHYWVTLNRLKDAPGATPNAGWEGNVRAIKRKSEEGNVHDGCKGRYVEDICVYGPGDLPWLIQSPSLFANKFEPSTDPLVVTCLERRHRLQVLRQAEVPIEPHWHFQQQSHFNMRLNR

SEQ ID NO: 5835 - protein, 429 aa, Homo sapiens
MSQLRATKSGLVVRAVICIFIFLYLRNPTPAESEEEPAQPEVVECGFYPDELCSALFEGKGAAPIAKFCKTPHKSEIHAHLHTPGNCSRISRGLHFITRPLSAEEGDFSLAYIITIHKELAMFVQLLRAIYVPQNVYCIHVDEKAPMKYKTAVQTLVNCFENVFISSKTEKVAYAGFTRLQADINCMKVLVHSKFQWNYVINLCGQDFPIKTNREIIHYIRSKWSDKNITPGVIQPLHIKSKTSQSHLEFVPKGSIYAPPNNRFKDKPPHNLTIYFGSAYYVLTRKFVEFILTDIHAKDMLQWSKDIRSPEQHYWVTLNRLKDAPGATPNAGWEGNVRAIKRKSEEGNVHDGCKGRYVEDICVYGPGDLPWLIQSPSLFANKFEPSTDPLVVTCLERRHRLQVLRQAEVPIEPHWHFQQQSHFNMRLNR

SEQ ID NO: 5836 - protein, 50 aa, Homo sapiens
MALRVVRSVRALLCTLRAVPSPAAPCPPRPWQLGVGAVRTLRTGPALLSG

SEQ ID NO: 5837 - protein, 58 aa, Homo sapiens
MALRVVRSVRALLCTLRAVPSPAAPCPPRPWQLGVGAVRTLRTGPALLSGSVGRCCLL

SEQ ID NO: 5838 - protein, 162 aa, Homo sapiens
MALRVVRSVRALLCTLRAVPSPAAPCPPRPWQLGVGAVRTLRTGPALLSVRKFTEKHEWVTTENGIGTVGISNFAQEALGDVVYCSLPEVGTKLNKQDEFGALESVKAASELYSPLSGEVTEINEALAENPGLVNKSCYEDGKLLLEISQGITTTVNILSRI

SEQ ID NO: 5839 - protein, 173 aa, Homo sapiens
MALRVVRSVRALLCTLRAVPSPAAPCPPRPWQLGVGAVRTLRTGPALLSVRKFTEKHEWVTTENGIGTVGISNFAQEALGDVVYCSLPEVGTKLNKQDEFGALESVKAASELYSPLSGEVTEINEALAENPGLVNKSCYEDGWLIKMTLSNPSELDELMSEEAYEKYIKSIEE

SEQ ID NO: 5840 - protein, 118 aa, Homo sapiens
SVRALLCTLRAVPSPAAPCPPRPWQLGVGAVRTLRTGPALLSDEFGALESVKAASELYSPLSGEVTEINEALAENPGLVNKSCYEDGWLIKMTLSNPSELDELMSEEAYEKYIKSIEE

SEQ ID NO: 5841 - protein, 66 aa, Homo sapiens
  SITE 1: note = misc_feature - Xaa can be any naturally occurring amino acid
XCTLRAVPSPAAPCPPRPWQLGVGAVRTLRTGPALLSVRKFTEKHEWVTTENGIGTVGISNFAQVG

SEQ ID NO: 5842 - protein, 100 aa, Homo sapiens
  SITE 1: note = misc_feature - Xaa can be any naturally occurring amino acid
XEKHEWVTTENGIGTVGISNFAQEALGDVVYCSLPEVGTKLNKQGEVTEINEALAENPGLVNKSCYEDGWLIKMTLSNPSELDELMSEEAYEKYIKSIEE

SEQ ID NO: 5843 - protein, 105 aa, Homo sapiens
  SITE 1: note = misc_feature - Xaa can be any naturally occurring amino acid
XTLRTGPALLSVRKFTEKHEWVTTENGIGTVGISNFAQEALGDVVYCSLPEVGTKLNKQDEFGALESVKAASELYSPLSGEVTEINEALAENPGLVNKSCYEDVS

SEQ ID NO: 5844 - protein, 80 aa, Homo sapiens
  SITE 1: note = misc_feature - Xaa can be any naturally occurring amino acid
XVRSVRALLCTLRAVPSPAAPCPPRPWQLGVGAVRTLRTGPALLSVRKFTEKHEWVTTENGIGTVGISNFAQMSLVLWKV

SEQ ID NO: 5845 - protein, 372 aa, Homo sapiens; identical to SEQ ID NO: 2629

SEQ ID NO: 5846 - protein, 478 aa, Homo sapiens
MAHVPARTSPGPGPQLLLLLLPLFLLLLRDVAGSHRAPAWSALPAAADGLQGDRDLQRHPGDAAATLGPSAQDMVAVHMHRLYEKYSRQGARPGGGNTVRSFRARLEVVDQKAVYFFNLTSMQDSEMILTATFHFYSEPPRWPRALEVLCKPRAKNASGRPLPLGPPTRQHLLFRSLSQNTATQGLLRGAMALAPPPRGLWQAKDISPIVKAARRDGELLLSAQLDSEERDPGVPRPSPYAPYILVYANDLAISEPNSVAVTLQRYDPFPAGDPEPRAAPNNSADPRVRRAAQATGPLQDNELPGLDERPPRAHAQHFHKHQLWPSPFRALKPRPGRKDRRKKGQEVFMAASQVLDFDEKTMQKARRKQWDEPRVCSRRYLKVDFADIGWNEWIISPKSFDAYYCAGACEFPMPKIVRPSNHATIQSIVRAVGIIPGIPEPCCVPDKMNSLGVLFLDENRNVVLKVYPNMSVDTCACR

SEQ ID NO: 5847 - protein, 407 aa, Homo sapiens
MVLAAPLLLGFLLLALELRPRGEAAEGPAAAAAAAAAAAAAGVGGERSSRPAPSVAPEPDGCPVCVWRQHSRELRLESIKSQILSKLRLKEAPNISREVVKQLLPKAPPLQQILDLHDFQGDALQPEDFLEEDEYHATTETVISMAQETDPAVQTDGSPLCCHFHFSPKVMFTKVLKAQLWVYLRPVPRPATVYLQILRLKPLTGEGTAGGGGGGRRHIRIRSLKIELHSRSGHWQSIDFKQVLHSWFRQPQSNWGIEINAFDPSGTDLAVTSLGPGAEGLHPFMELRVLENTKRSRRNLGLDCDEHSSESRCCRYPLTVDFEAFGWDWIIAPKRYKANYCSGQCEYMFMQKYPHTHLVQQANPRGSAGPCCTPTKMSPINMLYFNDKQQIIYGKIPGMVVDRCGCS

SEQ ID NO: 5848 - protein, 380 aa, Homo sapiens
  SITE 1: note = misc_feature - Xaa can be any naturally occurring amino acid
XAAAAAAAAAAAAAGVGGERSSRPAPSVAPEPDGCPVCVWRQHSRELRLESIKSQILSKLRLKEAPNISREVVKQLLPKAPPLQQILDLHDFQGDALQPEDFLEEDEYHATTETVISMAQETDPAVQTDGSPLCCHFHFSPKVMFTKVLKAQLWVYLRPVPRPATVYLQILRLKPLTGEGTAGGGGGGRRHIRIRSLKIELHSRSGHWQSIDFKQVLHSWFRQPQSNWGIEINAFDPSGTDLAVTSLGPGAEGLHPFMELRVLENTKRSRRNLGLDCDEHSSESRCCRYPLTVDFEAFGWDWIIAPKRYKANYCSGQCEYMFMQKYPHTHLVQQANPRGSAGPCCTPTKMSPINMLYFNDKQQIIYGKIPGMVVDRCGCS

SEQ ID NO: 5849 - protein, 6 aa, Homo sapiens
MPGQEL

SEQ ID NO: 5850 - protein, 113 aa, Homo sapiens
MPGQELRTVNGSQMLLVLLVLSWLPHGGALSLAEASRASFPGPSELHSEDSRFRELRKRYEDLLTRLRANQSWEDSNTDLVPAPAVRILTPEVRLGSGGHLHLRISRAALPEG

SEQ ID NO: 5851 - protein, 308 aa, Homo sapiens
MPGQELRTVNGSQMLLVLLVLSWLPHGGALSLAEASRASFPGPSELHSEDSRFRELRKRYEDLLTRLRANQSWEDSNTDLVPAPAVRILTPEVRLGSGGHLHLRISRAALPEGLPEASRLHRALFRLSPTASRSWDVTRPLRRQLSLARPQAPALHLRLSPPPSQSDQLLAESSSARPQLELHLRPQAARGRRRARARNGDHCPLGPGRCCRLHTVRASLEDLGWADWVLSPREVQVTMCIGACPSQFRAANMHAQIKTSLHRLKPDTVPAPCCVPASYNPMVLIQKTDTGVSLQTYDDLLAKDCHCI

SEQ ID NO: 5852 - protein, 429 aa, Homo sapiens
MCPGALWVALPLLSLLAGSLQGKPLQSWGRGSAGGNAHSPLGVPGGGLPEHTFNLKMFLENVKVDFLRSLNLSGVPSQDKTRVEPPQYMIDLYNRYTSDKSTTPASNIVRSFSMEDAISITATEDFPFQKHILLFNISIPRHEQITRAELRLYVSCQNHVDPSHDLKGSVVIYDVLDGTDAWDSATETKTFLVSQDIQDEGWETLEVSSAVKRWVRSDSTKSKNKLEVTVESHRKGCDTLDISVPPGSRNLPFFVVFSNDHSSGTKETRLELREMISHEQESVLKKLSKDGSTEAGESSHEEDTDGHVAAGSTLARRKRSAGAGSHCQKTSLRVNFEDIGWDSWIIAPKEYEAYECKGGCFFPLADDVTPTKHAIVQTLVHLKFPTKVGKACCVPTKLSPISVLYKDDMGVPTLKYHYEGMSVAECGCR

SEQ ID NO: 5853 - protein, 364 aa, Homo sapiens
MLRFLPDLAFSFLLILALGQAVQFQEYVFLQFLGLDKAPSPQKFQPVPYILKKIFQDREAAATTGVSRDLCYVKELGVRGNVLRFLPDQGFFLYPKKISQASSCLQKLLYFNLSAIKEREQLTLAQLGLDLGPNSYYNLGPELELALFLVQEPHVWGQTTPKPGKMFVLRSVPWPQGAVHFNLLDVAKDWNDNPRKNFGLFLEILVKEDRDSGVNFQPEDTCARLRCSLHASLLVVTLNPDQCHPSRKRRAAIPVPKLSCKNLCHRHQLFINFRDLGWHKWIIAPKGFMANYCHGECPFSLTISLNSSNYAFMQALMHAVDPEIPQAVCIPTKLSPISMLYQDNNDNVILRHYEDMVVDECGCG

SEQ ID NO: 5854 - protein, 501 aa, Homo sapiens
MRLPKLLTFLLWYLAWLDLEFICTVLGAPDLGQRPQGTRPGLAKAEAKERPPLARNVFRPGGHSYGGGATNANARAKGGTGQTGGLTQPKKDEPKKLPPRPGGPEPKPGHPPQTRQATARTVTPKGQLPGGKAPPKAGSVPSSFLLKKAREPGPPREPKEPFRPPPITPHEYMLSLYRTLSDADRKGGNSSVKLEAGLANTITSFIDKGQDDRGPVVRKQRYVFDISALEKDGLLGAELRILRKKPSDTAKPAAPGGGRAAQLKLSSCPSGRQPAALLDVRSVPGLDGSGWEVFDIWKLFRNFKNSAQLCLELEAWERGRAVDLRGLGFDRAARQVHEKALFLVFGRTKKRDLFFNEIKARSGQDDKTVYEYLFSQRRKRRAPLATRQGKRPSKNLKARCSRKALHVNFKDMGWDDWIIAPLEYEAFHCEGLCEFPLRSHLEPTNHAVIQTLMNSMDPESTPPTCCVPTRLSPISILFIDSANNVVYKQYEDMVVESCGCR

SEQ ID NO: 5855 - protein, 501 aa, Homo sapiens; identical to SEQ ID NO: 5854

SEQ ID NO: 5856 - protein, 271 aa, Homo sapiens [sequence omitted]

SEQ ID NO: 5857 - protein, 455 aa, Homo sapiens
MDTPRVLLSAVFLISFLWDLPGFQQASISSSSSSAELGSTKGMRSRKEGKMQRAPRDSDAGREGQEPQPRPQDEPRAQQPRAQEPPGRGPRVVPHEYMLSIYRTYSIAEKLGINASFFQSSKSANTITSFVDRGLDDLSHTPLRRQKYLFDVSMLSDKEELVGAELRLFRQAPSAPWGPPAGPLHVQLFPCLSPLLLDARTLDPQGAPPAGWEVFDVWQGLRHQPWKQLCLELRAAWGELDAGEAEARARGPQQPPPPDLRSLGFGRRVRPPQERALLVVFTRSQRKNLFAEMREQLGSAEAAGPGAGAEGSWPPPSGAPDARPWLPSPGRRRRRTAFASRHGKRHGKKSRLRCSKKPLHVNFKELGWDDWIIAPLEYEAYHCEGVCDFPLRSHLEPTNHAIIQTLMNSMDPGSTPPSCCVPTKLTPISILYIDAGNNVVYKQYEDMVVESCGCR

SEQ ID NO: 5858 - protein, 353 aa, Homo sapiens [sequence omitted]

SEQ ID NO: 5859 - protein, 450 aa, Homo sapiens
MDLSAAAALCLWLLSACRPRDGLEAAAVLRAAGAGPVRSPGGGGGGGGGGRTLAQAAGAAAVPAAAVPRARAARRAAGSGFRNGSVVPHHFMMSLYRSLAGRAPAGAAAVSASGHGRADTITGFTDQATQDESAAETGQSFLFDVSSLNDADEVVGAELRVLRRGSPESGPGSWTSPPLLLLSTCPGAARAPRLLYSRAAEPLVGQRWEAFDVADAMRRHRREPRPPRAFCLLLRAVAGPVPSPLALRRLGFGWPGGGGSAAEERAVLVVSSRTQRKESLFREIRAQARALGAALASEPLPDPGTGTASPRAVIGGRRRRRTALAGTRTAQGSGGGAGRGHGRRGRSRCSRKPLHVDFKELGWDDWIIAPLDYEAYHCEGLCDFPLRSHLEPTNHAIIQTLLNSMAPDAAPASCCVPARLSPISILYIDAANNVVYKQYEDMVVEACGCR

SEQ ID NO: 5860 - protein, 454 aa, Homo sapiens
MARPNKFLLWFCCFAWLCFPISLGSQASGGEAQIAASAELESGAMPWSLLQHIDERDRAGLLPALFKVLSVGRGGSPRLQPDSRALHYMKKLYKTYATKEGIPKSNRSHLYNTVRLFTPCTRHKQAPGDQVTGILPSVELLFNLDRITTVEHLLKSVLLYNINNSVSFSSAVKCVCNLMIKEPKSSSRTLGRAPYSFTFNSQFEFGKKHKWIQIDVTSLLQPLVASNKRSIHMSINFTCMKDQLEHPSAQNGLFNMTLVSPSLILYLNDTSAQAYHSWYSLHYKRRPSQGPDQERSLSAYPVGEEAAEDGRSSHHRHRRGQETVSSELKKPLGPASFNLSEYFRQFLLPQNECELHDFRLSFSQLKWDNWIVAPHRYNPRYCKGDCPRAVGHRYGSPVHTMVQNIIYEKLDSSVPRPSCVPAKYSPLSVLTIEPDGSIAYKEYEDMIATKCTCR

SEQ ID NO: 5861 - protein, 366 aa, Homo sapiens
MKKLYKTYATKEGIPKSNRSHLYNTVRLFTPCTRHKQAPGDQVTGILPSVELLFNLDRITTVEHLLKSVLLYNINNSVSFSSAVKCVCNLMIKEPKSSSRTLGRAPYSFTFNSQFEFGKKHKWIQIDVTSLLQPLVASNKRSIHMSINFTCMKDQLEHPSAQNGLFNMTLVSPSLILYLNDTSAQAYHSWYSLHYKRRPSQGPDQERSLSAYPVGEEAAEDGRSSHHRHRRGQETVSSELKKPLGPASFNLSEYFRQFLLPQNECELHDFRLSFSQLKWDNWIVAPHRYNPRYCKGDCPRAVGHRYGSPVHTMVQNIIYEKLDSSVPRPSCVPAKYSPLSVLTIEPDGSIAYKEYEDMIATKCTCR

SEQ ID NO: 5862 - protein, 366 aa, Homo sapiens; identical to SEQ ID NO: 5861

SEQ ID NO: 5863 - protein, 366 aa, Homo sapiens; identical to SEQ ID NO: 5861

SEQ ID NO: 5864 - protein, 366 aa, Homo sapiens; identical to SEQ ID NO: 5861

SEQ ID NO: 5865 - protein, 61 aa, Homo sapiens
MKLWDVVAVCLVLLHTASAFPLPAANMPEDYPDQFDDVMDFIQATIKRLKRSPDKQMAVLP

SEQ ID NO: 5866 - protein, 61 aa, Homo sapiens; identical to SEQ ID NO: 5865

SEQ ID NO: 5867 - protein, 185 aa, Homo sapiens
MKLWDVVAVCLVLLHTASAFPLPAANMPEDYPDQFDDVMDFIQATIKRLKRSPDKQMAVLPRRERNRQAAAANPENSRGKGRRGQRGKNRGCVLTAIHLNVTDLGLGYETKEELIFRYCSGSCDAAETTYDKILKNLSRNRRLVSDKVGQACCRPIAFDDDLSFLDDNLVYHILRKHSAKRCGCI

SEQ ID NO: 5868 - protein, 185 aa, Homo sapiens; identical to SEQ ID NO: 5867

SEQ ID NO: 5869 - protein, 211 aa, Homo sapiens
MKLWDVVAVCLVLLHTASAFPLPAGKRPPEAPAEDRSLGRRRAPFALSSDSNMPEDYPDQFDDVMDFIQATIKRLKRSPDKQMAVLPRRERNRQAAAANPENSRGKGRRGQRGKNRGCVLTAIHLNVTDLGLGYETKEELIFRYCSGSCDAAETTYDKILKNLSRNRRLVSDKVGQACCRPIAFDDDLSFLDDNLVYHILRKHSAKRCGCI

SEQ ID NO: 5870 - protein, 159 aa, Homo sapiens
MPEDYPDQFDDVMDFIQATIKRLKRSPDKQMAVLPRRERNRQAAAANPENSRGKGRRGQRGKNRGCVLTAIHLNVTDLGLGYETKEELIFRYCSGSCDAAETTYDKILKNLSRNRRLVSDKVGQACCRPIAFDDDLSFLDDNLVYHILRKHSAKRCGCI

SEQ ID NO: 5871 - protein, 202 aa, Homo sapiens
MQSLPNSNGAAAGRDFKMKLWDVVAVCLVLLHTASAFPLPAANMPEDYPDQFDDVMDFIQATIKRLKRSPDKQMAVLPRRERNRQAAAANPENSRGKGRRGQRGKNRGCVLTAIHLNVTDLGLGYETKEELIFRYCSGSCDAAETTYDKILKNLSRNRRLVSDKVGQACCRPIAFDDDLSFLDDNLVYHILRKHSAKRCGCI

SEQ ID NO: 5872 - protein, 228 aa, Homo sapiens
MQSLPNSNGAAAGRDFKMKLWDVVAVCLVLLHTASAFPLPAGKRPPEAPAEDRSLGRRRAPFALSSDSNMPEDYPDQFDDVMDFIQATIKRLKRSPDKQMAVLPRRERNRQAAAANPENSRGKGRRGQRGKNRGCVLTAIHLNVTDLGLGYETKEELIFRYCSGSCDAAETTYDKILKNLSRNRRLVSDKVGQACCRPIAFDDDLSFLDDNLVYHILRKHSAKRCGCI

SEQ ID NO: 5873 - protein, 90 aa, Homo sapiens
MKMLPGVGVFGTGSSARVLVPLLRAEGFTVEALWGKTEEEAKQLAEEMNIAFYTSRTDDILLHQDVDLVCISIPPPLTRQISVKALESSL

SEQ ID NO: 5874 - protein, 385 aa, Homo sapiens
MKMLPGVGVFGTGSSARVLVPLLRAEGFTVEALWGKTEEEAKQLAEEMNIAFYTSRTDDILLHQDVDLVCISIPPPLTRQISVKALGIGKNVVCEKAATSVDAFRMVTASRYYPQLMSLVGNVLRFLPAFVRMKQLISEHYVGAVMICDARIYSGSLLSPSYGWICDELMGGGGLHTMGTYIVDLLTHLTGRRAEKVHGLLKTFVRQNAAIRGIRHVTSDDFCFFQMLMGGGVCSTVTLNFNMPGAFVHEVMVVGSAGRLVARGADLYGQKNSATQEELLLRDSLAVGAGLPEQGPQDVPLLYLKGMVYMVQALRQSFQGQGDRRTWDRTPVSMAASFEDGLYMQSVVDAIKRSSRSGEWEAVEVLTEEPDTNQNLCEALQRNNL

SEQ ID NO: 5875 - protein, 112 aa, Homo sapiens
MKMLPGVGVFGTGSSARVLVPLLRAEGFTVEALWGKTEEEAKQLAEEMNIAFYTSRTDDILLHQDVDLVCISIPPPLTRQISVKALGTPGRPQQGQIMSLPLGSPLRVTPLL

SEQ ID NO: 5876 - protein, 112 aa, Homo sapiens; identical to SEQ ID NO: 5875

SEQ ID NO: 5877 - protein, 88 aa, Homo sapiens
MKMLPGVGVFGTGSSARVLVPLLRAEGFTVEALWGKTEEEAKQLAEEMNIAFYTSRTDDILLHQDVDLVLGRMWFARRQQHRWMPSGW

SEQ ID NO: 5878 - protein, 103 aa, Homo sapiens
  SITE 1: note = misc_feature - Xaa can be any naturally occurring amino acid
XKTEEEAKQLAEEMNIAFYTSRTDDILLHQDVDLVCISIPPPLTRQISVKALGSTCGVPEWSLDGCGGEAQVHTLPRWASTRRVLGRMWFARRQQHRWMPSGW

SEQ ID NO: 5879 - protein, 682 aa, Homo sapiens
MCGIFAYMNYRVPRTRKEIFETLIKGLQRLEYRGYDSAGVAIDGNNHEVKERHIQLVKKRGKVKALDEELYKQDSMDLKVEFETHFGIAHTRWATHGVPSAVNSHPQRSDKGNEFVVIHNGIITNYKDLRKFLESKGYEFESETDTETIAKLIKYVFDNRETEDITFSTLVERVIQQLEGAFALVFKSVHYPGEAVATRRGSPLLIGVRSKYKLSTEQIPILYRTCTLENVKNICKTRMKRLDSSACLHAVGDKAVEFFFASDASAIIEHTNRVIFLEDDDIAAVADGKLSIHRVKRSASDDPSRAIQTLQMELQQIMKGNFSAFMQKEIFEQPESVFNTMRGRVNFETNTVLLGGLKDHLKEIRRCRRLIVIGCGTSYHAAVATRQVLEELTELPVMVELASDFLDRNTPVFRDDVCFFISQSGETADTLLALRYCKDRGALTVGVTNTVGSSISRETDCGVHINAGPEIGVASTKAYTSQFISLVMFGLMMSEDRISLQNRRQEIIRGLRSLPELIKEVLSLEEKIHDLALELYTQRSLLVMGRGYNYATCLEGALKIKEITYMHSEGILAGELKHGPLALIDKQMPVIMVIMKDPCFAKCQNALQQVTARQGRPIILCSKDDTESSKFAYKTIELPHTVDCLQGILSVIPLQLLSFHLAVLRGYDVDFPRNLAKSVTVE

SEQ ID NO: 5880 - protein, 216 aa, Homo sapiens
MNLLLNSISLLTFLSEFVVIHNGIITNYKDLRKFLESKGYEFESETDTETIAKLIKYVFDNRETEDITFSTLVERVIQQLEGAFALVFKSVHYPGEAVATRRGSPLLIGVRSKYKLSTEQIPILYRTCTLENVKNICKTRMKRLDSSACLHAVGDKAVEFFFASDASAIIEHTNRVIFLEDDDIAAVADGKLSIHRVKRSASDDPSRAIQTLQMEL

SEQ ID NO: 5881 - protein, 179 aa, Homo sapiens [sequence omitted]

SEQ ID NO: 5882 - protein, 464 aa, Homo sapiens
MILANVFCLFFFLDETLRSLASPSSLQGPELHGWRPPVDCVRANELCAAESNCSSRYRTLRQCLAGRDRNTMLANKECQAALEVLQESPLYDCRCKRGMKKELQCLQIYWSIHLGLTEGEEFYEASPYEPVTSRLSDIFRLASIFSGTGADPVVSAKSNHCLDAAKACNLNDNCKKLRSSYISICNREISPTERCNRRKCHKALRQFFDRVPSEYTYRMLFCSCQDQACAERRRQTILPSCSYEDKEKPNCLDLRGVCRTDHLCRSRLADFHANCRASYQTVTSCPADNYQACLGSYAGMIGFDMTPNYVDSSPTGIVVSPWCSCRGSGNMEEECEKFLRDFTENPCLRNAIQAFGNGTDVNVSPKGPSFQATQAPRVEKTPSLPDDLSDSTSLGTSVITTCTSVQEQGLKANNSKELSMCFTELTTNIIPGSNKVIKPNSGPSRARPSAALTVLSVLMLKLAL

SEQ ID NO: 5883 - protein, 265 aa, Homo sapiens
MILANVFCLFFFLDETLRSLASPSSLQGPELHGWRPPVDCVRANELCAAESNCSSRYRTLRQCLAGRDRNTMLANKECQAALEVLQESPLYDCRCKRGMKKELQCLQIYWSIHLGLTEGEEFYEASPYEPVTSRLSDIFRLASIFSGTGADPVVSAKSNHCLDAAKACNLNDNCKKLRSSYISICNREISPTERCNRRKCHKALRQFFDRVPSEYTYRMLFCSCQDQACAERRRQTILPSCSYEDKEKPNCLDLRGVCRTDHLCR

SEQ ID NO: 5884 - protein, 464 aa, Homo sapiens; identical to SEQ ID NO: 5882

SEQ ID NO: 5885 - protein, 359 aa, Homo sapiens
MILANVFCLFFFLGEEFYEASPYEPVTSRLSDIFRLASIFSGTGADPVVSAKSNHCLDAAKACNLNDNCKKLRSSYISICNREISPTERCNRRKCHKALRQFFDRVPSEYTYRMLFCSCQDQACAERRRQTILPSCSYEDKEKPNCLDLRGVCRTDHLCRSRLADFHANCRASYQTVTSCPADNYQACLGSYAGMIGFDMTPNYVDSSPTGIVVSPWCSCRGSGNMEEECEKFLRDFTENPCLRNAIQAFGNGTDVNVSPKGPSFQATQAPRVEKTPSLPDDLSDSTSLGTSVITTCTSVQEQGLKANNSKELSMCFTELTTNIIPGSNKVIKPNSGPSRARPSAALTVLSVLMLKLAL

SEQ ID NO: 5886 - protein, 62 aa, Homo sapiens
MILANVFCLFFFLGPGPLLRRNGVQREKTCSYIQGRMMPEFSLGYEEGCPTESPWCALAKWV

SEQ ID NO: 5887 - protein, 331 aa, Homo sapiens
MILANVFCLFFFLGTGADPVVSAKSNHCLDAAKACNLNDNCKKLRSSYISICNREISPTERCNRRKCHKALRQFFDRVPSEYTYRMLFCSCQDQACAERRRQTILPSCSYEDKEKPNCLDLRGVCRTDHLCRSRLADFHANCRASYQTVTSCPADNYQACLGSYAGMIGFDMTPNYVDSSPTGIVVSPWCSCRGSGNMEEECEKFLRDFTENPCLRNAIQAFGNGTDVNVSPKGPSFQATQAPRVEKTPSLPDDLSDSTSLGTSVITTCTSVQEQGLKANNSKELSMCFTELTTNIIPGSNKVIKPNSGPSRARPSAALTVLSVLMLKLAL

SEQ ID NO: 5888 - protein, 74 aa, Homo sapiens
MLANKECQAALEVLQESPLYDCRCKRGMKKELQCLQIYWSIHLGLTEGEEFYEASPYEPVTSRLSDIFRLASIF

SEQ ID NO: 5889 - protein, 299 aa, Homo sapiens
MVRCLGPALLLLLLLGSASSVGGNRCVDAAEACTADARCQRLRSEYVAQCLGRAAQGGCPRARCRRALRRFFARGPPALTHALLFCPCAGPACAERRRQTFVPSCAFSGPGPAPPSCLEPLNFCERSRVCRCARAAAGPWRGWGRGLSPAHRPPAAQASPPGLSGLVHPSAQRPRRLPAGPGRPLPARLRGPRGVPAGTAVTPNYVDNVSARVAPWCDCGASGNRREDCEAFRGLFTRNRCLDGAIQAFASGWPPVLLDQLNPQGDPEHSLLQVSSTGRALERRSLLSILPVLALPALL

SEQ ID NO: 5890 - protein, 182 aa, Homo sapiens
MVRCLGPALLLLLLLGSASSVGGNRCVDAAEACTADARCQRLRSEYVAQCLGRAAQGGCPRARCRRALRRFFARGPPALTHALLFCPCAGPACAERRRQTFVPSCAFSGPGPAPPSCLEPLNFCERSRVCRPRLLAFQVSCTPAPSAPDGCLLDQGARCLRAYAGLVGSPQAPPSPLTTWTT

SEQ ID NO: 5891 - protein, 269 aa, Homo sapiens
MVRCLGPALLLLLLLGSASSVGGNRCVDAAEACTADARCQRLRSEYVAQCLGRAAQGGCPRARCRRALRRFFARGPPALTHALLFCPCAGPACAERRRQTFVPSCAFSGPGPAPPSCLEPLNFCERSRVCRPRLLAFQVSCTPAPSAPDGCLLDQGARCLRAYAGLVGTAVTPNYVDNVSARVAPWCDCGASGNRREDCEAFRGLFTRNRCLDGAIQAFASGWPPVLLDQLNPQGDPEHSLLQVSSTGRALERRSLLSILPVLALPALL

SEQ ID NO: 5892 - protein, 59 aa, Homo sapiens
MAATAVAAAVAGTESAQGPPGPAASLELWLNKATDPSMSEQDWSAIQNFCEQVNTDPNG

SEQ ID NO: 5893 - protein, 59 aa, Homo sapiens; identical to SEQ ID NO: 5892

SEQ ID NO: 5894 - protein, 59 aa, Homo sapiens; identical to SEQ ID NO: 5892

SEQ ID NO: 5895 - protein, 117 aa, Homo sapiens
MAATAVAAAVAGTESAQGPPGPAASLELWLNKATDPSMSEQDWSAIQNFCEQVNTDPNGPTHAPWLLAHKIQSPQEKEALYALTPGGEPGTTGFPPSPGGPVSVQVLEMCMNHCGEK

SEQ ID NO: 5896 - protein, 613 aa, Homo sapiens
MAATAVAAAVAGTESAQGPPGPAASLELWLNKATDPSMSEQDWSAIQNFCEQVNTDPNGPTHAPWLLAHKIQSPQEKEALYALTVLEMCMNHCGEKFHSEVAKFRFLNELIKVLSPKYLGSWATGKVKGRVIEILFSWTVWFPEDIKIRDAYQMLKKQGIIKQDPKLPVDKILPPPSPWPKSSIFDADEEKSKLLTRLLKSNHPEDLQAANRLIKNLVKEEQEKSEKVSKRVSAVEEVRSHVKVLQEMLSMYRRPGQAPPDQEALQVVYERCEKLRPTLFRLASDTTDDDDALAEILQANDLLTQGVLLYKQVMEGRVTFGNRVTSSLGDIPVSRVFQNPAGCMKTCPLIDLEVDNGPAQMGTVVPSLLHQDLAALGISDAPVTGMVSGQNCCEEKRNPSSSTLPGGGVQNPSADRNLLDLLSAQPAPCPLNYVSQKSVPKEVPPGTKSSPGWSWEAGPLAPSPSSQNTPLAQVFVPLESVKPSSLPPLIVYDRNGFRILLHFSQTGAPGHPEVQVLLLTMMSTAPQPVWDIMFQVAVPKSMRVKLQPASSSKLPAFSPLMPPAVISQMLLLDNPHKEPIRLRYKLTFNQGGQPFSEVGEVKDFPDLAVLGAA

SEQ ID NO: 5897 - protein, 223 aa, Homo sapiens
MAATAVAAAVAGTESAQGPPGPAASLELWLNKATDPSMSEQDWSAIQNFCEQVNTDPNGPTHAPWLLAHKIQSPQEKEALYALTVLEMCMNHCGEKFHSEVAKFRFLNELIKVLSPKYLGSWATGKVKGRVIEILFSWTVWFPEDIKIRDAYQMLKKQGIIKQDPKLPVDKILPPPSPWPKSSIFDADEEKSKLLTRLLKSNHPEDLQAAVLKVAVVYGITPF

SEQ ID NO: 5898 - protein, 49 aa, Homo sapiens
MAATAVAAAVAGTESAQGPPGPAASLELWLSDHRPKHVGTGLVSYPEFL

SEQ ID NO: 5899 - protein, 125 aa, Homo sapiens
MVKLPFSLSLQLANSCPSPEDKATDPSMSEQDWSAIQNFCEQVNTDPNGPTHAPWLLAHKIQSPQEKEALYALTVLEMCMNHCGEKFHSEVAKFRFLNELIKVLSPKYLGSWATGKVKGRVIEIL

SEQ ID NO: 5900 - protein, 129 aa, Homo sapiens
  SITE 1: note = misc_feature - Xaa can be any naturally occurring amino acid
XAVAGTESAQGPPGPAASLELWLNKATDPSMSEQDWSAIQNFCEQVNTDPNGPTHAPWLLAHKIQSPQEKEALYALTCPHRLEAGLALVPAQSPASDYQPGGEPGTTGFPPSPGGPVSVQVLEMCMNHC

SEQ ID NO: 5901 - protein, 318 aa, Homo sapiens
MASPGCLLCVLGLLLCGAASLELSRPHGDTAKKPIIGILMQKCRNKVMKNYGRYYIAASYVKYLESAGARVVPVRLDLTEKDYEILFKSINGILFPGGSVDLRRSDYAKVAKIFYNLSIQSFDDGDYFPVWGTCLGFEELSLLISGECLLTATDTVDVAMPLNFTGGQLHSRMFQNFPTELLLSLAVEPLTANFHKWSLSVKNFTMNEKLKKFFNVLTTNTDGKIEFISTMEGYKYPVYGVQWHPEKAPYEWKNLDGISHAPNAVKTAFYLAEFFVNEARKNNHHFKSESEEEKALIYQFSPIYTGNISSFQQCYIFD

SEQ ID NO: 5902 - protein, 30 aa, Homo sapiens
MKKKLVVLGLLAVVLVLVIVGLCLWLPSAS

SEQ ID NO: 5903 - protein, 37 aa, Homo sapiens
MKKKLVVLGLLAVVLVLVIVGLCLWLPSASKEPDNHV

SEQ ID NO: 5904 - protein, 68 aa, Homo sapiens
MKKKLVVLGLLAVVLVLVIVGLCLWLPSASKEPDNHVYTRAAVAADAKQCSKIGRDALRDGGSAVDAA

SEQ ID NO: 5905 - protein, 80 aa, Homo sapiens
MKKKLVVLGLLAVVLVLVIVGLCLWLPSASKEPDNHVYTRAAVAADAKQCSKIGRDALRDGGSAVDAAIAALLCVGLMNA

SEQ ID NO: 5906 - protein, 98 aa, Homo sapiens
MKKKLVVLGLLAVVLVLVIVGLCLWLPSASKEPDNHVYTRAAVAADAKQCSKIGRDALRDGGSAVDAAIAALLCVGLMNAHSMGIGGGLFLTIYNSTT

SEQ ID NO: 5907 - protein, 109 aa, Homo sapiens
MKKKLVVLGLLAVVLVLVIVGLCLWLPSASKEPDNHVYTRAAVAADAKQCSKIGRDALRDGGSAVDAAIAALLCVGLMNAHSMGIGGGLFLTIYNSTTRKAEVINAREV

SEQ ID NO: 5908 - protein, 111 aa, Homo sapiens
MKKKLVVLGLLAVVLVLVIVGLCLWLPSASKEPDNHVYTRAAVAADAKQCSKIGRDALRDGGSAVDAAIAALLCVGLMNAHSMGIGGGLFLTIYNSTTRKAEVINAREVAP

SEQ ID NO: 5909 - protein, 116 aa, Homo sapiens
MKKKLVVLGLLAVVLVLVIVGLCLWLPSASKEPDNHVYTRAAVAADAKQCSKIGRDALRDGGSAVDAAIAALLCVGLMNAHSMGIGGGLFLTIYNSTTRKAEVINAREVAPRLAFA

SEQ ID NO: 5910 - protein, 120 aa, Homo sapiens
MKKKLVVLGLLAVVLVLVIVGLCLWLPSASKEPDNHVYTRAAVAADAKQCSKIGRDALRDGGSAVDAAIAALLCVGLMNAHSMGIGGGLFLTIYNSTTRKAEVINAREVAPRLAFATMFN

SEQ ID NO: 5911 - protein, 126 aa, Homo sapiens
MKKKLVVLGLLAVVLVLVIVGLCLWLPSASKEPDNHVYTRAAVAADAKQCSKIGRDALRDGGSAVDAAIAALLCVGLMNAHSMGIGGGLFLTIYNSTTRKAEVINAREVAPRLAFATMFNSSEQSQ

SEQ ID NO: 5912 - protein, 126 aa, Homo sapiens; identical to SEQ ID NO: 5911

SEQ ID NO: 5913 - protein, 127 aa, Homo sapiens
MKKKLVVLGLLAVVLVLVIVGLCLWLPSASKEPDNHVYTRAAVAADAKQCSKIGRDALRDGGSAVDAAIAALLCVGLMNAHSMGIGGGLFLTIYNSTTRKAEVINAREVAPRLAFATMFNSSEQSQK

SEQ ID NO: 5914 - protein, 174 aa, Homo sapiens
MKKKLVVLGLLAVVLVLVIVGLCLWLPSASKEPDNHVYTRAAVAADAKQCSKIGRDALRDGGSAVDAAIAALLCVGLMNAHSMGIGGGLFLTIYNSTTRKAEVINAREVAPRLAFATMFNSSEQSQKGGLSVAVPGEIRGYELAHQRHGRLPWARLFQPSIQLARQGFPVGKGL

SEQ ID NO: 5915 - protein, 569 aa, Homo sapiens
MKKKLVVLGLLAVVLVLVIVGLCLWLPSASKEPDNHVYTRAAVAADAKQCSKIGRDALRDGGSAVDAAIAALLCVGLMNAHSMGIGGGLFLTIYNSTTRKAEVINAREVAPRLAFATMFNSSEQSQKGGLSVAVPGEIRGYELAHQRHGRLPWARLFQPSIQLARQGFPVGKGLAAALENKRTVIEQQPVLCEVFCRDRKVLREGERLTLPQLADTYETLAIEGAQAFYNGSLTAQIVKDIQAAGGIVTAEDLNNYRAELIEHPLNISLGDVVLYMPSAPLSGPVLALILNILKGYNFSRESVESPEQKGLTYHRIVEAFRFAYAKRTLLGDPKFVDVTEVVRNMTSEFFAAQLRAQISDDTTHPISYYKPEFYTPDDGGTAHLSVVAEDGSAVSATSTINLYFGSKVRSPVSGILFNNEMDDFSSPSITNEFGVPPSPANFIQPGKQPLSSMCPTIMVGQDGQVRMVVGAAGGTQITTATALAIIYNLWFGYDVKRAVEEPRLHNQLLPNVTTVERNIDQAVTAALETRHHHTQIASTFIAVVQAIVRTAGGWAAASDSRKGGEPAGY

SEQ ID NO: 5916 - protein, 366 aa, Homo sapiens
MKKKLVVLGLLAVVLVLVIVGLCLWLPSASKEPDNHVYTRAAVAADAKQCSKIGRDALRDGGSAVDAAIAALLCVGLMNAHSMGIGGGLFLTIYNSTTRKAEVINAREVAPRLAFATMFNSSEQSQKGGLSVAVPGEIRGYELAHQRHGRLPWARLFQPSIQLARQGFPVGKGLAAALENKRTVIEQQPVLCEVFCRDRKVLREGERLTLPQLADTYETLAIEGAQAFYNGSLTAQIVKDIQAAGGIVTAEDLNNYRAELIEHPLNISLGDVVLYMPSAPLSGPVLALILNILKGYNFSRESVESPEQKGLTYHRIVEAFRFAYAKRTLLGDPKFVDVTEASSGVSAGGPQHDLRVLRCPAPGPDL

SEQ ID NO: 5917 - protein, 463 aa, Homo sapiens
MKKKLVVLGLLAVVLVLVIVGLCLWLPSASKEPDNHVYTRAAVAADAKQCSKIGRDALRDGGSAVDAAIAALLCVGLMNAHSMGIGGGLFLTIYNSTTRKAEVINAREVAPRLAFATMFNSSEQSQKGGLSVAVPGEIRGYELAHQRHGRLPWARLFQPSIQLARQGFPVGKGLAAALENKRTVIEQQPVLCEVFCRDRKVLREGERLTLPQLADTYETLAIEGAQAFYNGSLTAQIVKDIQAAGGIVTAEDLNNYRAELIEHPLNISLGDVVLYMPSAPLSGPVLALILNILKGYNFSRESVESPEQKGLTYHRIVEAFRFAYAKRTLLGDPKFVDVTEVVRNMTSEFFAAQLRAQISDDTTHPISYYKPEFYTPDDGGTAHLSVVAEDGSAVSATSTINLYFGSKVRSPVSGILFNNEMDDFSSPSITNEFGVPPSPANFIQPGKQPLSSMCPTIMVGQDG

SEQ ID NO: 5918 - protein, 569 aa, Homo sapiens; identical to SEQ ID NO: 5915

SEQ ID NO: 5919 - protein, 569 aa, Homo sapiens; identical to SEQ ID NO: 5915

SEQ ID NO: 5920 - protein, 218 aa, Homo sapiens
MTSEFFAAQLRAQISDDTTHPISYYKPEFYTPDDGGTAHLSVVAEDGSAVSATSTINLYFGSKVRSPVSGILFNNEMDDFSSPSITNEFGVPPSPANFIQPGKQPLSSMCPTIMVGQDGQPPSHADHTPMPQAIIYNLWFGYDVKRAVEEPRLHNQLLPNVTTVERNIDQAVTAALETRHHHTQIASTFIAVVQAIVRTAGGWAAASDSRKGGEPAGY

SEQ ID NO: 5921 - protein, 225 aa, Homo sapiens
MTSEFFAAQLRAQISDDTTHPISYYKPEFYTPDDGGTAHLSVVAEDGSAVSATSTINLYFGSKVRSPVSGILFNNEMDDFSSPSITNEFGVPPSPANFIQPGKQPLSSMCPTIMVGQDGQVRMVVGAAGGTQITTATALAIIYNLWFGYDVKRAVEEPRLHNQLLPNVTTVERNIDQAVTAALETRHHHTQIASTFIAVVQAIVRTAGGWAAASDSRKGGEPAGY

SEQ ID NO: 5922 - protein, 225 aa, Homo sapiens; identical to SEQ ID NO: 5921

SEQ ID NO: 5923 - protein, 225 aa, Homo sapiens; identical to SEQ ID NO: 5921

SEQ ID NO: 5924 - protein, 252 aa, Homo sapiens
MTSEFFAAQLRAQISDDTTHPISYYKPEFYTPDDGGTAHLSVVAEDGSAVSATSTINLYFGSKVRSPVSGILFNNEMDDFSSPSITNEFGVPPSPANFIQPGKQPLSSMCPTIMVGQDGQVRMVVGAAGGTQITTATALVCVTPFLPGRAHPAQPPSHADHTPMPQAIIYNLWFGYDVKRAVEEPRLHNQLLPNVTTVERNIDQAVTAALETRHHHTQIASTFIAVVQAIVRTAGGWAAASDSRKGGEPAGY

SEQ ID NO: 5925 - protein, 554 aa, Homo sapiens
MARGYGATVSLVLLGLGLALAVIVLAVVLSRHQAPCGPQAFAHAAVAADSKVCSDIGRAILQQQGSPVDATIAALVCTSVVNPQSMGLGGGVIFTIYNVTTGAQWIGVPGELRGYAEAHRRHGRLPWAQLFQPTIALLRGGHVVAPVLSRFLHNSILRPSLQASTLRQLFFNGTEPLRPQDPLPWPALATTLETVATEGVEVFYTGRLGQMLVEDIAKEGSQLTLQDLAKFQPEVVDALEVPLGDYTLYSPPPPAGGAILSFILNVLRGFNFSTESMARPEGRVNVYHHLVETLKFAKGQRWRLGDPRSHPKLQNASRDLLGETLAQLIRQQIDGRGDHQLSHYSLAEAWGHGTGTSHVSVLGEDGSAVAATSTINTPFGAMVYSPRTGIILNNELLDLCERCPRGSGTTPSPVSGDRVGGAPGRCWPPVPGERSPSSMVPSILINKAQGSKLVIGGAGGELIISAVAQAIMSKLWLGFDLRAAIAAPILHVNSKGCVEYEPNFSQEVQRGLQDRGQNQTQRPFFLNVVQAVSQEGACVYAVSDLRKSGEAAGY

SEQ ID NO: 5926 - protein, 586 aa, Homo sapiens
MARGYGATVSLVLLGLGLALAVIVLAVVLSRHQAPCGPQAFAHAAVAADSKVCSDIGRAILQQQGSPVDATIAALVCTSVVNPQSMGLGGGVIFTIYNVTTGKVEVINARETVPASHAPSLLDQCAQALPLGTGAQWIGVPGELRGYAEAHRRHGRLPWAQLFQPTIALLRGGHVVAPVLSRFLHNSILRPSLQASTLRQLFFNGTEPLRPQDPLPWPALATTLETVATEGVEVFYTGRLGQMLVEDIAKEGSQLTLQDLAKFQPEVVDALEVPLGDYTLYSPPPPAGGAILSFILNVLRGFNFSTESMARPEGRVNVYHHLVETLKFAKGQRWRLGDPRSHPKLQNASRDLLGETLAQLIRQQIDGRGDHQLSHYSLAEAWGHGTGTSHVSVLGEDGSAVAATSTINTPFGAMVYSPRTGIILNNELLDLCERCPRGSGTTPSPVSGDRVGGAPGRCWPPVPGERSPSSMVPSILINKAQGSKLVIGGAGGELIISAVAQAIMSKLWLGFDLRAAIAAPILHVNSKGCVEYEPNFSQEVQRGLQDRGQNQTQRPFFLNVVQAVSQEGACVYAVSDLRKSGEAAGY

SEQ ID NO: 5927 - protein, 587 aa, Homo sapiens
MARGYGATVSLVLLGLGLALAVIVLAVVLSRHQAPCGPQAFAHAAVAADSKVCSDIGRAILQQQGSPVDATIAALVCTSVVNPQSMGLGGGVIFTIYNVTTGKVEVINARETVPASHAPSLLDQCAQALPLGTGAQWIGVPGELRGYAEAHRRHGRLPWAQLFQPTIALLRGGHVVAPVLSRFLHNSILRPSLQASTLRQLFFNGTEPLRPQDPLPWPALATTLETVATEGVEVFYTGRLGQMLVEDIAKEGSQLTLQDLAKFQPEVVDALEVPLGDYTLYSPPPPAGGAILSFILNVLRGFNFSTESMARPEGRVNVYHHLVETLKFAKGQRWRLGDPRSHPKLQNASRDLLGETLAQLIRQQIDGRGDHQLSHYSLAEAWGHGTGTSHVSVLGEDGSAVAATSTINTPFGAMVYSPRTGIILNNELLDLCERCPRGSGTTPSPAVSGDRVGGAPGRCWPPVPGERSPSSMVPSILINKAQGSKLVIGGAGGELIISAVAQAIMSKLWLGFDLRAAIAAPILHVNSKGCVEYEPNFSQEVQRGLQDRGQNQTQRPFFLNVVQAVSQEGACVYAVSDLRKSGEAAGY

SEQ ID NO: 5928 - protein, 73 aa, Homo sapiens
MARGYGATVSLVLLGLGLALAVIVLAVVLSRHQAPCGPQAFAHAAVAADSKVCSDIGRGPVDRGARGAPWLCR

SEQ ID NO: 5929 - protein, 220 aa, Homo sapiens
  SITE 1: note = misc_feature - Xaa can be any naturally occurring amino acid
XSAVAATSTINTPFGAMVYSPRTGIILNNELLDLCERCPRGSGTTPSPVSGDRVGGAPGRCWPPVPGERSPSSMVPSILINKAQGSKLVIGGAGGELIISAVAQAIMSKLWLGFDLRAAIAAPILHVNSKGCVEYEPNFSQKQDLAALPRLVSNSWPQVILLPQPPKLLALQEVQRGLQDRGQNQTQRPFFLNVVQAVSQEGACVYAVSDLRKSGEAAGY

SEQ ID NO: 5930 - protein, 30 aa, Homo sapiens
MATEAGRWQPPDWADLQADLQQVRHKLTQR

SEQ ID NO: 5931 - protein, 217 aa, Homo sapiens
MATGSRTSLLLAFGLLCLPWLQEGSAFPTIPLSRLFDNAMLRAHRLHQLAFDTYQEFEEAYIPKEQKYSFLQNPQTSLCFSESIPTPSNREETQQKSNLELLRISLLLIQSWLEPVQFLRSVFANSLVYGASDSNVYDLLKDLEEGIQTLMGRLEDGSPRTGQIFKQTYSKFDTNSHNDDALLKNYGLLYCFRKDMDKVETFLRIVQCRSVEGSCGF

SEQ ID NO: 5932 - protein, 177 aa, Homo sapiens
MATGSRTSLLLAFGLLCLPWLQEGSAFPTIPLSRLFDNAMLRAHRLHQLAFDTYQEFNLELLRISLLLIQSWLEPVQFLRSVFANSLVYGASDSNVYDLLKDLEEGIQTLMGRLEDGSPRTGQIFKQTYSKFDTNSHNDDALLKNYGLLYCFRKDMDKVETFLRIVQCRSVEGSCGF

SEQ ID NO: 5933 - protein, 202 aa, Homo sapiens
MATGSRTSLLLAFGLLCLPWLQEGSAFPTIPLSRLFDNAMLRAHRLHQLAFDTYQEFNPQTSLCFSESIPTPSNREETQQKSNLELLRISLLLIQSWLEPVQFLRSVFANSLVYGASDSNVYDLLKDLEEGIQTLMGRLEDGSPRTGQIFKQTYSKFDTNSHNDDALLKNYGLLYCFRKDMDKVETFLRIVQCRSVEGSCGF

SEQ ID NO: 5934 - protein, 122 aa, Homo sapiens
MATGSRTSLLLAFGLLCLPWLQEGSAFPTIPLSRLFDNAMLRAHRLHQLAFDTYQEFRLEDGSPRTGQIFKQTYSKFDTNSHNDDALLKNYGLLYCFRKDMDKVETFLRIVQCRSVEGSCGF

SEQ ID NO: 5935 - protein, 245 aa, Homo sapiens
MAAGSRTSLLLAFGLLCLSWLQEGSAFPTIPLSRLFDNAMLRARRLYQLAYDTYQEFEEAYILKEQKYSFLQNPQTSLCFSESIPTPSNRVKTQQKSNLELLRISLLLIQSWLEPVQLLRSVFANSLVYGASDSNVYRHLKDLEEGIQTLIGWKMAAPGLGRSSISPTASLTQNRTTMTHCSRTTGCSTASGRTWTRSRHSCASCSAALWRAAVASSCPGGIPVTPPQCLSWSWKVLLQCPPALS

SEQ ID NO: 5936 - protein, 217 aa, Homo sapiens
MAAGSRTSLLLAFGLLCLSWLQEGSAFPTIPLSRLFDNAMLRARRLYQLAYDTYQEFEEAYILKEQKYSFLQNPQTSLCFSESIPTPSNRVKTQQKSNLELLRISLLLIQSWLEPVQLLRSVFANSLVYGASDSNVYRHLKDLEEGIQTLMWRLEDGSPRTGQIFNQSYSKFDTKSHNDDALLKNYGLLYCFRKDMDKVETFLRIVQCRSVEGSCGF

SEQ ID NO: 5937 - protein, 256 aa, Homo sapiens
MAAGSRTSLLLAFGLLCLSWLQEGSAFPTIPLSRLFDNAMLRARRLYQLAYDTYQEFEEAYILKEQKYSFLQNPQTSLCFSESIPTPSNRVKTQQKSNLELLRISLLLIQSWLEPVQLLRSVFANSLVYGASDSNVYRHLKDLEEGIQTLMWVRVAPGIPNPGAPLASRDWGEKHCCPLFSSQALTQENSPYSSFPLVNPPGLSLQPGGEGGKWMNERGREQCPSAWPLLLFLHFAEAGRWQPPDWADLQSVLQQV

SEQ ID NO: 5938 - protein, 177 aa, Homo sapiens
MAAGSRTSLLLAFGLLCLSWLQEGSAFPTIPLSRLFDNAMLRARRLYQLAYDTYQEFNLELLRISLLLIQSWLEPVQLLRSVFANSLVYGASDSNVYRHLKDLEEGIQTLMWRLEDGSPRTGQIFNQSYSKFDTKSHNDDALLKNYGLLYCFRKDMDKVETFLRIVQCRSVEGSCGF

SEQ ID NO: 5939 - protein, 202 aa, Homo sapiens
MAAGSRTSLLLAFGLLCLSWLQEGSAFPTIPLSRLFDNAMLRARRLYQLAYDTYQEFNPQTSLCFSESIPTPSNRVKTQQKSNLELLRISLLLIQSWLEPVQLLRSVFANSLVYGASDSNVYRHLKDLEEGIQTLMWRLEDGSPRTGQIFNQSYSKFDTKSHNDDALLKNYGLLYCFRKDMDKVETFLRIVQCRSVEGSCGF

SEQ ID NO: 5940 - protein, 130 aa, Homo sapiens
MLLWPLLLLLLLLPTLALLRQQRSQDARLSWLAGLQHRVAWGALVWAATWQRRRLEQSTLHVHQSQQQALRWCLQGAQRPHCSLRRSTDISTFRNHLPLTKASQTQQEDSGEQPLPPTSNQDLGEASLQA

SEQ ID NO: 5941 - protein, 146 aa, Homo sapiens
MLLWPLLLLLLLLPTLALLRQQRSQDARLSWLAGLQHRVAWGALVWAATWQRRRLEQSTLHVHQSQQQALRWCLQGAQRPHCSLRRSTDISTFRNHLPLTKASQTQQEDSGEQPLPPTSNQDLGEASLQATLLGLAALNKAYPEVL

SEQ ID NO: 5942 - protein, 530 aa, Homo sapiens
MLLWPLLLLLLLLPTLALLRQQRSQDARLSWLAGLQHRVAWGALVWAATWQRRRLEQSTLHVHQSQQQALRWCLQGAQRPHCSLRRSTDISTFRNHLPLTKASQTQQEDSGEQPLPPTSNQDLGEASLQATLLGLAALNKAYPEVLAQGRTARVTLTSPWPRPLPWPGNTLGQVGTPGTKDPRALLLDALRSPGLRALEAGTAVELLDVFLGLETDGEELAGAIAAGNPGAPLRERAAELREALEQGPRGLALRLWPKLQVVVTLDAGGQAEAVAALGALWCQGLAFFSPAYAASGGVLGLNLQPEQPHGLYLLPPGAPFIELLPVKEGTQEEAASTLLLAEAQQGKEYELVLTDRASLTRCRLGDVVRVVGAYNQCPVVRFICRLDQTLSVRGEDIGEDLFSEALGRAVGQWAGAKLLDHGCVESSILDSSAGSAPHYEVFVALRGLRNLSEENRDKLDHCLQEASPRYKSLRFWGSVGPARVHLVGQGAFRALRAALAACPSSPFPPAMPRVLRHRHLAQCLQERVVS

SEQ ID NO: 5943 - protein, 474 aa, Homo sapiens
MLLWPLLLLLLLLPTLALLRQQRSQDARLSWLAGLQHRVAWGALVWAATWQRRRLEQSTLHVHQSQQQALRWCLQGAQRPHCSLRRSTDISTFRNHLPLTKASQTQQEDSGEQPLPPTSNQDLGEASLQATLLGLAALNKAYPEVLAQGRTARVTLTSPWPRPLPWPGNTLGQVGTPGTKDPRALLLDALRSPGLRALEAGTAVELLDVFLGLETDGEELAGAIAAGNPGAPLRERAAELREALEQGPRGLALRLWPKLQVVVTLDAGGQAEAVAALGALWCQGLAFFSPAYAASGGVLGLNLQPEQPHGLYLLPPGAPFIELLPVKEGTQEEAASTLLLAEAQQGKEYELVLTDRASLTRCRLGDVVRVVGAYNQCPVVRFICRLDQTLSVRGEDIGEDLFSEALGRAVGQWAGAKLLDHGCVESSILEWGRTDRAEDTRLGSCPFTGSMCAHGVYSQIPLRALLPTTRCLWR

SEQ ID NO: 5944 - protein, 474 aa, Homo sapiens; identical to SEQ ID NO: 5943

SEQ ID NO: 5945 - protein, 530 aa, Homo sapiens; identical to SEQ ID NO: 5942

SEQ ID NO: 5946 - protein, 479 aa, Homo sapiens
MLLWPLLLLLLLLPTLALLRQQRSQDARLSWLAGLQHRVAWGALVWAATWQRRRLEQSTLHVHQSQQQALRWCLQGAQRPHCSLRRSTDISTFRNHLPLTKASQTQQEDSGEQPLPPTSNQDLGEASLQATLLGLAALNKAYPEVLAQGRTARVTLTSPWPRPLPWPGNTLGQVGTPGTKDPRALLLDALRSPGLRALEAGTAVELLDVFLGLETDGEELAGAIAAGNPGAPLRERAAELREALEQGPRGLALRLWPKLQVVVTLDAGGQAEAVAALGALWCQGLAFFSPAYAASGGVLGLNLQPEQPHGLYLLPPGAPFIELLPVKEGTQEEAASTLLLAEAQQGKEYELVLTDRASLTRCRLGDVVRVVGAYNQCPVVRFICRLDQTLSVRGEDIGEDLFSEALGRAVGQWAGAKLLDHGCVESSILDSSAGSAPHYEVFVALRGLRNLSEENRDKILASGSALGKREWTPAQPFPH

SEQ ID NO: 5947 - protein, 112 aa, Homo sapiens
MLLWPLLLLLLLLPTLALLRQQRSQDARLSWLAGLQHRVAWGALVWAATWQRRRLEQSTLHVHQSQQQALRWCLQGAQRPHCSLRRSTGSHQSCLKLLGNWLPEAFLLSLGL

SEQ ID NO: 5948 - protein, 107 aa, Homo sapiens
MPLWVFFFVILTLSNSSHCSPPPPLTLRMRRYADAIFTNSYRKVLGQLSARKLLQDIMSRQQGESNQERGARARLGRQVDSMWAEQKQMELESILVALLQKHRNSQG

SEQ ID NO: 5949 - protein, 108 aa, Homo sapiens
MPLWVFFFVILTLSNSSHCSPPPPLTLRMRRYADAIFTNSYRKVLGQLSARKLLQDIMSRQQGESNQERGARARLGRQVDSMWAEQKQMELESILVALLQKHSRNSQG

SEQ ID NO: 5950 - protein, 108 aa, Homo sapiens; identical to SEQ ID NO: 5949

SEQ ID NO: 5951 - protein, 207 aa, Homo sapiens
MAMGEGAGQVGERGGSMQGLCGRLPFRHHDQLQLAVGRSRLPELPPGLHLPQLKESLLVAGSRWLGAARALHWHVGELQTGLRGHRVLGPGRHLPLLVDHQRAHCPLGRGELWAFSQYYPHPGEETGASSGQPPYPVSVLASLQVDTFPDPTLWNSLHHLQLPARQCWPGHPPPPGAGTGFLPGIRRLGLRCRFLGRSFDCQPPRGS

SEQ ID NO: 5952 - protein, 423 aa, Homo sapiens
MDRRMWGAHVFCVLSPLPTVLGHMHPECDFITQLREDESACLQAAEEMPNTTLGCPATWDGLLCWPTAGSGEWVTLPCPDFFSHFSSESGAVKRDCTITGWSEPFPPYPVACPVPLELLAEEESYFSTVKIIYTVGHSISIVALFVAITILVALRRLHCPRNYVHTQLFTTFILKAGAVFLKDAALFHSDDTDHCSFSTVLCKVSVAASHFATMTNFSWLLAEAVYLNCLLASTSPSSRRAFWWLVLAGWGLPVLFTGTWVSCKLAFEDIACWDLDDTSPYWWIIKGPIVLSVGVNFGLFLNIIRILVRKLEPAQGSLHTQSQYWRLSKSTLFLIPLFGIHYIIFNFLPDNAGLGIRLPLELGLGSFQGFIVAILYCFLNQEVRTEISRKWHGHDPELLPAWRTRAKWTTPSRSAAKVLTSMC

SEQ ID NO: 5953 - protein, 151 aa, Homo sapiens
MLPFSTATTLTTAASPLAARALHWHVGELQTGLRGHRVLGPGRHLPLLVDHQRAHCPLGRGELWAFSQYYPHPGEETGASSGQPPYPVSVLASLQVDTFPDPTLWNSLHHLQLPARQCWPGHPPPPGAGTGFLPGLHCCHPLLLPQPRGED

SEQ ID NO: 5954 - protein, 145 aa, Homo sapiens
MVPGTPSPLLGRGKELWLESLACLPGAVKRDCTITGWSEPFPPYPVACPVPLELLAEEESYFSTVKIIYTVGHSISIVALFVAITILVALRRLHCPRNYVHTQLFTTFILKAGAVFLKDAALFHSDDTDHCSFSTGCPCSSLARG

SEQ ID NO: 5955 - protein, 359 aa, Homo sapiens
MVPGTPSPLLGRGKELWLESLACLPGAVKRDCTITGWSEPFPPYPVACPVPLELLAEEESYFSTVKIIYTVGHSISIVALFVAITILVALRRLHCPRNYVHTQLFTTFILKAGAVFLKDAALFHSDDTDHCSFSTVLCKVSVAASHFATMTNFSWLLAEAVYLNCLLASTSPSSRRAFWWLVLAGWGLPVLFTGTWVSCKLAFEDIACWDLDDTSPYWWIIKGPIVLSVGVNFGLFLNIIRILVRKLEPAQGSLHTQSQYWRLSKSTLFLIPLFGIHYIIFNFLPDNAGLGIRLPLELGLGSFQGFIVAILYCFLNQEVRTEISRKWHGHDPELLPAWRTRAKWTTPSRSAAKVLTSMC

SEQ ID NO: 5956 - protein, 68 aa, Homo sapiens
MVPGTPSPLLGRGKELWLESLACLPGAVKRDCTITGWSEPFPPYPVACPVPLELLAEEGCPCSSLARG

SEQ ID NO: 5957 - protein, 66 aa, Homo sapiens
MFTCWWSYLRSTLAAVPGEASRVQFNAPFDVGIKLSGVQYQQHSQALGKFLQDILWEEAKEAPADK

SEQ ID NO: 5958 - protein, 105 aa, Homo sapiens
MFTCWWSYLRSTLAAVPGEASRVQQRKESKKPPAKLQPRALAGWLRPEDGGQAEGAEDELEVRFNAPFDVGIKLSGVQYQQHSQALGKFLQDILWEEAKEAPADK

SEQ ID NO: 5959 - protein, 104 aa, Homo sapiens
MFTCWWSYLRSTLAAVPGEASRVQRKESKKPPAKLQPRALAGWLRPEDGGQAEGAEDELEVRFNAPFDVGIKLSGVQYQQHSQALGKFLQDILWEEAKEAPADK

SEQ ID NO: 5960 - protein, 40 aa, Homo sapiens
MFTCWWSYLRSTLAAVPGEASRVQRPQPTSDRPQALLTSL

SEQ ID NO: 5961 - protein, 33 aa, Homo sapiens
MPSPGTVCSLLLLGMLWLDLAMAGSSFLSPEHQ

SEQ ID NO: 5962 - protein, 117 aa, Homo sapiens
MPSPGTVCSLLLLGMLWLDLAMAGSSFLSPEHQRVQQRKESKKPPAKLQPRALAGWLRPEDGGQAEGAEDELEVRFNAPFDVGIKLSGVQYQQHSQALGKFLQDILWEEAKEAPADK

SEQ ID NO: 5963 - protein, 117 aa, Homo sapiens; identical to SEQ ID NO: 5962

SEQ ID NO: 5964 - protein, 117 aa, Homo sapiens; identical to SEQ ID NO: 5962

SEQ ID NO: 5965 - protein, 91 aa, Homo sapiens
MPSPGTVCSLLLLGMLWLDLAMAGSSFLSPEHQRVQQRKESKKPPAKLQPRALAGWLRPEDGGQAEGAEDELEVRRPQPTSDRPQALLTSL

SEQ ID NO: 5966 - protein, 116 aa, Homo sapiens
MPSPGTVCSLLLLGMLWLDLAMAGSSFLSPEHQRVQRKESKKPPAKLQPRALAGWLRPEDGGQAEGAEDELEVRFNAPFDVGIKLSGVQYQQHSQALGKFLQDILWEEAKEAPADK

SEQ ID NO: 5967 - protein, 116 aa, Homo sapiens; identical to SEQ ID NO: 5966

SEQ ID NO: 5968 - protein, 48 aa, Homo sapiens
MAWFALYLLSLLWATAGTSTQTQSSCCEYDVFPRRSGKQLPWGRGCDL

SEQ ID NO: 5969 - protein, 417 aa, Homo sapiens
MAWFALYLLSLLWATAGTSTQTQSSCSVPSAQEPLVNGIQVLMENSVTSSAYPNPSILIAMNLAGAYNLKAQKLLTYQLMSSDNNDLTIGQLGLTIMALTSSCRDPGDKVSILQRQMENWAPSSPNAEASAFYGPSLAILALCQKNSEATLPIAVRFAKTLLANSSPFNVDTGAMATLALTCMYNKIPVGSEEGYRSLFGQVLKDIVEKISMKIKDNGIIGDIYSTGLAMQALSVTPEPSKKEWNCKKTTDMILNEIKQGKFHNPMSIAQILPSLKGKTYLDVPQVTCSPDHEVQPTLPSNPGPGPTSASNITVIYTINNQLRGVELLFNETINVSVKSGSVLLVVLEEAQRKNPMFKFETTMTSWGLVVSSINNIAENVNHKTYWQFLSGVTPLNEGVADYIPFNHEHITANFTQY

SEQ ID NO: 5970 - protein, 153 aa, Homo sapiens
MVATKTFALLLLSLFLAVGLGEKKEGHFSALPSLPVGSHAKVSSPQPRGPRYAEGTFISDYSIAMDKIHQQDFVNWLLAQKGKKNDWKHNITQREARALELASQANRKEEEAVEPQSSPAKNPSDEDLLRDLLIQELLACLLDQTNLCRLRSR

SEQ ID NO: 5971 - protein, 199 aa, Homo sapiens
MLAYSSVHCFREDKMKFTIVFAGLLGVFLAPALANYNINVNDDNNNAGSGQQSVSVNNEHNVANVDNNNGWDSWNSIWDYGNGFAATRLFQKKTCIVHKMNKEVMPSIQSLDALVKEKKLQGKGPGGPPPKGLMYSVNPNKVDDLSKFGKNIANMCRGIPTYMAEEMQEASLFFYSGTCYTTSVLWIVDISFCGDTVEN

SEQ ID NO: 5972 - protein, 184 aa, Homo sapiens
MKILVAFLVVLTIFGIQSHGYEVFNIISPSNNGGNVQETVTIDNEKNTAIINIHAGSCSSTTIFDYKHGYIASRVLSRRACFILKMDHQNIPPLNNLQWYIYEKQALDNMFSSKYTWVKYNPLESLIKDVDWFLLGSPIEKLCKHIPLYKGEVVENTHNVGAGGCAKAGLLGILGISICADIHV

SEQ ID NO: 5973 - protein, 161 aa, Homo sapiens
MKILVAFLVVLTIFGIQSHGYEVFNIISPSNNGGNVQETVTIDNEKNTAIINIHAGSCSSTTIFDYKHGYIASRVLSRRACFILKMDHQNIPPLNNLQWYIYEKQALDNMFSSKYTWVKYNPLESLIKDVDWFLLGSPIEKLCKHIPLYKGEVVENTREYQ

SEQ ID NO: 5974 - protein, 429 aa, Homo sapiens
MQLRNPELHLGCALALRFLALVSWDIPGARALDNGLARTPTMGWLHWERFMCNLDCQEEPDSCISEKLFMEMAELMVSEGWKDAGYEYLCIDDCWMAPQRDSEGRLQADPQRFPHGIRQLANYVHSKGLKLGIYADVGNKTCAGFPGSFGYYDIDAQTFADWGVDLLKFDGCYCDSLENLADGYKHMSLALNRTGRSIVYSCEWPLYMWPFQKPNYTEIRQYCNHWRNFADIDDSWKSIKSILDWTSFNQERIVDVAGPGGWNDPDMLVIGNFGLSWNQQVTQMALWAIMAAPLFMSNDLRHISPQAKALLQDKDVIAINQDPLGKQGYQLRQGDNFEVWERPLSGLAWAVAMINRQEIGGPRSYTIAVASLGKGVACNPACFITQLLPVKRKLGFYEWTSRLRSHINPTGTVLLQLENTMQMSLKDLL

SEQ ID NO: 5975 - protein, 222 aa, Homo sapiens
MQLRNPELHLGCALALRFLALVSWDIPGARALDNGLARTPTMGWLHWERFMCNLDCQEEPDSCISEKLFMEMAELMVSEGWKDAGYEYLCIDDCWMAPQRDSEGRLQADPQRFPHGIRQLANYVHSKGLKLGIYADVGNKTCAGFPGSFGYYDIDAQTFADWGVDLLKFDGCYCDSLENLADGYKHMSLALNRTGRSIVYSCEWPLYMWPFQKSSTLFGSIC

SEQ ID NO: 5976 - protein, 84 aa, Homo sapiens
MFEIDYSRDSFLKDGQPFRYISGSIHYSRVPRFYWKDRLLKMKMAGLNAIQTLPGSCGQVVGSPSAQDEASPLSEWRASYNSAG

SEQ ID NO: 5977 - protein, 102 aa, Homo sapiens
MFEIDYSRDSFLKDGQPFRYISGSIHYSRVPRFYWKDRLLKMKMAGLNAIQTYVPWNFHEPWPGQYQFSEDHDVEYFLRLAHELGLLVILRPGPYICAEWEM

SEQ ID NO: 5978 - protein, 647 aa, Homo sapiens
MFEIDYSRDSFLKDGQPFRYISGSIHYSRVPRFYWKDRLLKMKMAGLNAIQTYVPWNFHEPWPGQYQFSEDHDVEYFLRLAHELGLLVILRPGPYICAEWEMGGLPAWLLEKESILLRSSDPDYLAAVDKWLGVLLPKMKPLLYQNGGPVITVQVENEYGSYFACDFDYLRFLQKRFRHHLGDDVVLFTTDGAHKTFLKCGALQGLYTTVDFGTGSNITDAFLSQRKCEPKGPLINSEFYTGWLDHWGQPHSTIKTEAVASSLYDILARGASVNLYMFIGGTNFAYWNGANSPYAAQPTSYDYDAPLSEAGDLTEKYFALRNIIQKFEKVPEGPIPPSTPKFAYGKVTLEKLKTVGAALDILCPSGPIKSLYPLTFIQVKQHYGFVLYRTTLPQDCSNPAPLSSPLNGVHDRAYVAVDGIPQGVLERNNVITLNITGKAGATLDLLVENMGRVNYGAYINDFKGLVSNLTLSSNILTDWTIFPLDTEDAVCSHLGGWGHRDSGHHDEAWAHNSSNYTLPAFYMGNFSIPSGIPDLPQDTFIQFPGWTKGQVWINGFNLGRYWPARGPQLTLFVPQHILMTSAPNTITVLELEWAPCSSDDPELCAVTFVDRPVIGSSVTYDHPSKPVEKRLMPPPPQKNKDSWLDHV

SEQ ID NO: 5979 - protein, 114 aa, Homo sapiens
MGGLPAWLLEKESILLRSSDPDYLAAVDKWLGVLLPKMKPLLYQNGGPVITVQVENEYGSYFACDFDYLRFLQKRFRHHLGDDVVLFTTDGAHKTFLKCGALQGLYTTVDFGTG

SEQ ID NO: 5980 - protein, 41 aa, Homo sapiens
MPGFLVRILPLLLVLLLLGPTRGLRITWQLWTSGWESFCPR

SEQ ID NO: 5981 - protein, 546 aa, Homo sapiens
MPGFLVRILPLLLVLLLLGPTRGLRNATQRMFEIDYSRDSFLKDGQPFRYISGSIHYSRVPRFYWKDRLLKMKMAGLNAIQTLPGSCGQVVGSPSAQDEASPLSEWRASYNSAGSNITDAFLSQRKCEPKGPLINSEFYTGWLDHWGQPHSTIKTEAVASSLYDILARGASVNLYMFIGGTNFAYWNGANSPYAAQPTSYDYDAPLSEAGDLTEKYFALRNIIQKFEKVPEGPIPPSTPKFAYGKVTLEKLKTVGAALDILCPSGPIKSLYPLTFIQVKQHYGFVLYRTTLPQDCSNPAPLSSPLNGVHDRAYVAVDGIPQGVLERNNVITLNITGKAGATLDLLVENMGRVNYGAYINDFKGLVSNLTLSSNILTDWTIFPLDTEDAVCSHLGGWGHRDSGHHDEAWAHNSSNYTLPAFYMGNFSIPSGIPDLPQDTFIQFPGWTKGQVWINGFNLGRYWPARGPQLTLFVPQHILMTSAPNTITVLELEWAPCSSDDPELCAVTFVDRPVIGSSVTYDHPSKPVEKRLMPPPPQKNKDSWLDHV

SEQ ID NO: 5982 - protein, 677 aa, Homo sapiens
MPGFLVRILPLLLVLLLLGPTRGLRNATQRMFEIDYSRDSFLKDGQPFRYISGSIHYSRVPRFYWKDRLLKMKMAGLNAIQTYVPWNFHEPWPGQYQFSEDHDVEYFLRLAHELGLLVILRPGPYICAEWEMGGLPAWLLEKESILLRSSDPDYLAAVDKWLGVLLPKMKPLLYQNGGPVITVQVENEYGSYFACDFDYLRFLQKRFRHHLGDDVVLFTTDGAHKTFLKCGALQGLYTTVDFGTGSNITDAFLSQRKCEPKGPLINSEFYTGWLDHWGQPHSTIKTEAVASSLYDILARGASVNLYMFIGGTNFAYWNGANSPYAAQPTSYDYDAPLSEAGDLTEKYFALRNIIQKFEKVPEGPIPPSTPKFAYGKVTLEKLKTVGAALDILCPSGPIKSLYPLTFIQVKQHYGFVLYRTTLPQDCSNPAPLSSPLNGVHDRAYVAVDGIPQGVLERNNVITLNITGKAGATLDLLVENMGRVNYGAYINDFKGLVSNLTLSSNILTDWTIFPLDTEDAVCSHLGGWGHRDSGHHDEAWAHNSSNYTLPAFYMGNFSIPSGIPDLPQDTFIQFPGWTKGQVWINGFNLGRYWPARGPQLTLFVPQHILMTSAPNTITVLELEWAPCSSDDPELCAVTFVDRPVIGSSVTYDHPSKPVEKRLMPPPPQKNKDSWLDHV

SEQ ID NO: 5983 - protein, 147 aa, Homo sapiens
MPGFLVRILPLLLVLLLLGPTRGLRSRFLPWAFHLPRQAPKSQLPLHKRGTKTAPNEHASSNRSGRRRRRQQWNATQRMFEIDYSRDSFLKDGQPFRYISGSIHYSRVPRFYWKDRLLKMKMAGLNAIQTYVPWNFHEPWPGQYQFS

SEQ ID NO: 5984 - protein, 185 aa, Homo sapiens
MPGFLVRILPLLLVLLLLGPTRGLRVENEYGSYFACDFDYLRFLQKRFRHHLGDDVVLFTTDGAHKTFLKCGALQGLYTTVDFGTGSNITDAFLSQRKCEPKGPLINSEFYTGWLDHWGQPHSTIKTEAVASSLYDILARGASVNLYMFIGGTNFAYWNGANSPYAAQPTSYDYDAPLSEAGDLT

SEQ ID NO: 5985 - protein, 9 aa, Homo sapiens
MAPKKLSCL

SEQ ID NO: 5986 - protein, 26 aa, Homo sapiens
MAPKKLSCLRSLLLPLSLTLLLPQAD

SEQ ID NO: 5987 - protein, 114 aa, Homo sapiens
MAPKKLSCLRSLLLPLSLTLLLPQADTRSFVVDRGHDRFLLDGAPFRYVSGSLHYFRVPRVLWADRLLKMRWSGLNAIQFYVPWNYHEPQPGVYNFNGSRDLIAFLNEAALANL

SEQ ID NO: 5988 - protein, 564 aa, Homo sapiens
MAPKKLSCLRSLLLPLSLTLLLPQADTRSFVVDRGHDRFLLDGAPFRYVSGSLHYFRVPRVLWADRLLKMRWSGLNAIQFYVPWNYHEPQPGVYNFNGSRDLIAFLNEAALANLLVILRPGPYICAEWEMGGLPSWLLRKPEIHLRTSDPADNMTKIFTLLRKYEPHGPLVNSEYYTGWLDYWGQNHSTRSVSAVTKGLENMLKLGASVNMYMFHGGTNFGYWNGADKKGRFLPITTSYDYDAPISEAGDPTPKLFALRDVISKFQEVPLGPLPPPSPKMMLGPVTLHLVGHLLAFLDLLCPRGPIHSILPMTFEAVKQDHGFMLYRTYMTHTIFEPTPFWVPNNGVHDRAYVMVDGVFQGVVERNMRDKLFLTGKLGSKLDILVENMGRLSFGSNSSDFKGLLKPPILGQTILTQWMMFPLKIDNLVKWWFPLQLPKWPYPQAPSGPTFYSKTFPILGSVGDTFLYLPGWTKGQVWINGFNLGRYWTKQGPQQTLYVPRFLLFPRGALNKITLLELEDVPLQPQVQFLDKPILNSTSTLHRTHINSLSADTLSASEPMELSGH

SEQ ID NO: 5989 - protein, 654 aa, Homo sapiens
MAPKKLSCLRSLLLPLSLTLLLPQADTRSFVVDRGHDRFLLDGAPFRYVSGSLHYFRVPRVLWADRLLKMRWSGLNAIQFYVPWNYHEPQPGVYNFNGSRDLIAFLNEAALANLLVILRPGPYICAEWEMGGLPSWLLRKPEIHLRTSDPDFLAAVDSWFKVLLPKIYPWLYHNGGNIISIQVENEYGSYRACDFSYMRHLAGLFRALLGEKILLFTTDGPEGLKCGSLRGLYTTVDFGPADNMTKIFTLLRKYEPHGPLVNSEYYTGWLDYWGQNHSTRSVSAVTKGLENMLKLGASVNMYMFHGGTNFGYWNGADKKGRFLPITTSYDYDAPISEAGDPTPKLFALRDVISKFQEVPLGPLPPPSPKMMLGPVTLHLVGHLLAFLDLLCPRGPIHSILPMTFEAVKQDHGFMLYRTYMTHTIFEPTPFWVPNNGVHDRAYVMVDGVFQGVVERNMRDKLFLTGKLGSKLDILVENMGRLSFGSNSSDFKGLLKPPILGQTILTQWMMFPLKIDNLVKWWFPLQLPKWPYPQAPSGPTFYSKTFPILGSVGDTFLYLPGWTKGQVWINGFNLGRYWTKQGPQQTLYVPRFLLFPRGALNKITLLELEDVPLQPQVQFLDKPILNSTSTLHRTHINSLSADTLSASEPMELSGH

SEQ ID NO: 5990 - protein, 654 aa, Homo sapiens; identical to SEQ ID NO: 5989

SEQ ID NO: 5991 - protein, 50 aa, Homo sapiens
MAPKKLSCLRSLLLPLSLTLLLPQTGPRSAMCLAACTTFGYRGCFGPTGF

SEQ ID NO: 5992 - protein, 185 aa, Homo sapiens
  SITE 1: note = misc_feature - Xaa can be any naturally occurring amino acid
XKMRWSGLNAIQFYVPWNYHEPQPGVYNFNGSRDLIAFLNEAALANLLVILRPGPYICAEWEMGGLPSWLLRKPEIHLRTSDPDFLAAVDSWFKVLLPKIYPWLYHNGGNIISIQVENEYGSYRACDFSYMRHLAGLFRALLGEKILLFTTDGPEGLKCGSLRGLYTTVDFGPGLKQGLGVESGE

SEQ ID NO: 5993 - protein, 636 aa, Homo sapiens
MTTWSLRRRPARTLGLLLLVVLGFLVLRRLDWSTLVPLRLRHRQLGLQAKGWNFMLEDSTFWIFGGSIHYFRVPREYWRDRLLKMKACGLNTLTTYVPWNLHEPERGKFDFSGNLDLEAFVLMAAEIGLWVILRPGPYICSEMDLGGLPSWLLQDPGMRLRTTYKGFTEAVDLYFDHLMSRVVPLQYKRGGPIIAVQVENEYGSYNKDPAYMPYVKKALEDRGIVELLLTSDNKDGLSKGIVQGVLATINLQSTHELQLLTTFLFNVQGTQPKMVMEYWTGWFDSWGGPHNILDSSEVLKTVSAIVDAGSSINLYMFHGGTNFGFMNGAMHFHDYKSDVTSYDYDAVLTEAGDYTAKYMKLRDFFGSISGIPLPPPPDLLPKMPYEPLTPVLYLSLWDALKYLGEPIKSEKPINMENLPVNGGNGQSFGYILYETSITSSGILSGHVHDRGQVFVNTVSIGFLDYKTTKIAVPLIQGYTVLRILVENRGRVNYGENIDDQRKGLIGNLYLNDSPLKNFRIYSLDMKKSFFQRFGLDKWSSLPETPTLPAFFLGSLSISSTPCDTFLKLEGWEKGVVFINGQNLGRYWNIGPQKTLYLPGPWLSSGINQVIVFEETMAGPALQFTETPHLGRNQYIK

SEQ ID NO: 5994 - protein, 636 aa, Homo sapiens; identical to SEQ ID NO: 5993

SEQ ID NO: 5995 - protein, 553 aa, Homo sapiens
MNHVAKQQSEEAFPQEQQKAPPVVGGFNSNVGSKVLGLKYEEIDCLINDEHTIKGRREGNEVFLPFTWVEKYFDVYGKVVQYDGYDRFEFSHSYSKVYAQRAPYHPDGVFMSFEGYNVEVRDRVKCISGVEGVPLSTQWGPQGYFYPIQIAQYGLSHYSKNLTEKPPHIEVYETAEDRDKNKPNDWTVPKGCFMANVADKSRFTNVKQFIAPETSEGVSLQLGNTKDFIISFDLKFLTNGSVSVVLETTEKNQLFTIHYVSNAQLIAFKERDIYYGIGPRTSWSTVTRDLVTDLRKGVGLSNTKAVKPTKIMPKKVVRLIAKGKGFLDNITISTTAHMAAFFAASDWLVRNQDEKGGWPIMVTRKLGEGFKSLEPGWYSAMAQGQAISTLVRAYLLTKDHIFLNSALRATAPYKFLSEQHGVKAVFMNKHDWYEEYPTTPSSFVLNGFMYSLIGLYDLKETAGEKLGKEARSLYERGMESLKAMLPLYDTGSGTIYDLRHFMLGIAPNLARWDYHTTHINQLQLLSTIDESPVFKEFVKRWKSYLKGSRAKHN

SEQ ID NO: 5996 - protein, 617 aa, Homo sapiens
MRCLAARVNYKTLIIICALFTLVTVLLWNKCSSDKAIQFPRRSSSGFRVDGFEKRAAASESNNYMNHVAKQQSEEAFPQEQQKAPPVVGGFNSNVGSKVLGLKYEEIDCLINDEHTIKGRREGNEVFLPFTWVEKYFDVYGKVVQYDGYDRFEFSHSYSKVYAQRAPYHPDGVFMSFEGYNVEVRDRVKCISGVEGVPLSTQWGPQGYFYPIQIAQYGLSHYSKNLTEKPPHIEVYETAEDRDKNKPNDWTVPKGCFMANVADKSRFTNVKQFIAPETSEGVSLQLGNTKDFIISFDLKFLTNGSVSVVLETTEKNQLFTIHYVSNAQLIAFKERDIYYGIGPRTSWSTVTRDLVTDLRKGVGLSNTKAVKPTKIMPKKVVRLIAKGKGFLDNITISTTAHMAAFFAASDWLVRNQDEKGGWPIMVTRKLGEGFKSLEPGWYSAMAQGQAISTLVRAYLLTKDHIFLNSALRATAPYKFLSEQHGVKAVFMNKHDWYEEYPTTPSSFVLNGFMYSLIGLYDLKETAGEKLGKEARSLYERGMESLKAMLPLYDTGSGTIYDLRHFMLGIAPNLARWDYHTTHINQLQLLSTIDESPVFKEFVKRWKSYLKGSRAKHN

SEQ ID NO: 5997 - protein, 1192 aa, Homo sapiens
MAACGRVRRMFRLSAALHLLLLFAAGAEKLPGQGVHSQGQGPGANFVSFVGQAGGGGPAGQQLPQLPQSSQLQQQQQQQQQQQQPQPPQPPFPAGGPPARRGGAGAGGGWKLAEEESCREDVTRVCPKHTWSNNLAVLECLQDVRELLWNYKLNLTTDPKFESVAREVCKSTITEIKECADEPVGKGYMVSCLVDHRGNITEYQCHQYITKMTAIIFSDYRLICGFMDDCKNDINILKCGSIRLGEKDAHSQGEVVSCLEKGLVKEAEEREPKIQVSELCKKAILRVAELSSDDFHLDRHLYFACRDDRERFCENTQAGEGRVYKCLFNHKFEESMSEKCREALTTRQKLIAQDYKVSYSLAKSCKSDLKKYRCNVENLPRSREARLSYLLMCLESAVHRGRQVSSECQGEMLDYRRMLMEDFSLSPEIILSCRGEIEHHCSGLHRKGRTLHCLMKVVRGEKGNLGMNCQQALQTLIQETDPGADYRIDRALNEACESVIQTACKHIRSGDPMILSCLMEHLYTEKMVEDCEHRLLELQYFISRDWKLDPVLYRKCQGDASRLCHTHGWNETSEFMPQGAVFSCLYRHAYRTEEQGRRLSRECRAEVQRILHQRAMDVKLDPALQDKCLIDLGKWCSEKTETGQELECLQDHLDDLVVECRDIVGNLTELESEDIQIEALLMRACEPIIQNFCHDVADNQIDSGDLMECLIQNKHQKDMNEKCAIGVTHFQLVQMKDFRFSYKFKMACKEDVLKLCPNIKKKVDVVICLSTTVRNDTLQEAKEHRVSLKCRRQLRVEELEMTEDIRLEPDLYEACKSDIKNFCSAVQYGNAQIIECLKENKKQLSTRCHQKVFKLQETEMMDPELDYTLMRVCKQMIKRFCPEADSKTMLQCLKQNKNSELMDPKCKQMITKRQITQNTDYRLNPMLRKACKADIPKFCHGILTKAKDDSELEGQVISCLKLRYADQRLSSDCEDQIRIIIQESALDYRLDPQLQLHCSDEISSLCAEEAAAQEQTGQVEECLKVNLLKIKTELCKKEVLNMLKESKADIFVDPVLHTACALDIKHHCAAITPGRGRQMSCLMEALEDKRVRLQPECKKRLNDRIEMWSYAAKVAPADGFSDLAMQVMTSPSKNYILSVISGSICILFLIGLMCGRITKRVTRELKDRLQYRSETMAYKGLVWSQDVTGSPA

SEQ ID NO: 5998 - protein, 1203 aa, Homo sapiens
MAACGRVRRMFRLSAALHLLLLFAAGAEKLPGQGVHSQGQGPGANFVSFVGQAGGGGPAGQQLPQLPQSSQLQQQQQQQQQQQQPQPPQPPFPAGGPPARRGGAGAGGGWKLAEEESCREDVTRVCPKHTWSNNLAVLECLQDVREPENEISSDCNHLLWNYKLNLTTDPKFESVAREVCKSTITEIKECADEPVGKGYMVSCLVDHRGNITEYQCHQYITKMTAIIFSDYRLICGFMDDCKNDINILKCGSIRLGEKDAHSQGEVVSCLEKGLVKEAEEREPKIQVSELCKKAILRVAELSSDDFHLDRHLYFACRDDRERFCENTQAGEGRVYKCLFNHKFEESMSEKCREALTTRQKLIAQDYKVSYSLAKSCKSDLKKYRCNVENLPRSREARLSYLLMCLESAVHRGRQVSSECQGEMLDYRRMLMEDFSLSPEIILSCRGEIEHHCSGLHRKGRTLHCLMKVVRGEKGNLGMNCQQALQTLIQETDPGADYRIDRALNEACESVIQTACKHIRSGDPMILSCLMEHLYTEKMVEDCEHRLLELQYFISRDWKLDPVLYRKCQGDASRLCHTHGWNETSEFMPQGAVFSCLYRHAYRTEEQGRRLSRECRAEVQRILHQRAMDVKLDPALQDKCLIDLGKWCSEKTETGQELECLQDHLDDLVVECRDIVGNLTELESEDIQIEALLMRACEPIIQNFCHDVADNQIDSGDLMECLIQNKHQKDMNEKCAIGVTHFQLVQMKDFRFSYKFKMACKEDVLKLCPNIKKKVDVVICLSTTVRNDTLQEAKEHRVSLKCRRQLRVEELEMTEDIRLEPDLYEACKSDIKNFCSAVQYGNAQIIECLKENKKQLSTRCHQKVFKLQETEMMDPELDYTLMRVCKQMIKRFCPEADSKTMLQCLKQNKNSELMDPKCKQMITKRQITQNTDYRLNPMLRKACKADIPKFCHGILTKAKDDSELEGQVISCLKLRYADQRLSSDCEDQIRIIIQESALDYRLDPQLQLHCSDEISSLCAEEAAAQEQTGQVEECLKVNLLKIKTELCKKEVLNMLKESKADIFVDPVLHTACALDIKHHCAAITPGRGRQMSCLMEALEDKRVRLQPECKKRLNDRIEMWSYAAKVAPADGFSDLAMQVMTSPSKNYILSVISGSICILFLIGLMCGRITKRVTRELKDRLQYRSETMAYKGLVWSQDVTGSPA

SEQ ID NO: 5999 - protein, 1179 aa, Homo sapiens
MAACGRVRRMFRLSAALHLLLLFAAGAEKLPGQGVHSQGQGPGANFVSFVGQAGGGGPAGQQLPQLPQSSQLQQQQQQQQQQQQPQPPQPPFPAGGPPARRGGAGAGGGWKLAEEESCREDVTRVCPKHTWSNNLAVLECLQDVREPENEISSDCNHLLWNYKLNLTTDPKFESVAREVCKSTITEIKECADEPVGKGYMVSCLVDHRGNITEYQCHQYITKMTAIIFSDYRLICGFMDDCKNDINILKCGSIRLGEKDAHSQGEVVSCLEKGLVKEAEEREPKIQVSELCKKAILRVAELSSDDFHLDRHLYFACRDDRERFCENTQAGEGRVYKCLFNHKFEESMSEKCREALTTRQKLIAQDYKVSYSLAKSCKSDLKKYRCNVENLPRSREARLSYLLMCLESAVHRGRQVSSECQGEMLDYRRMLMEDFSLSPEIILSCRGEIEHHCSGLHRKGRTLHCLMKVVRGEKGNLGMNCQQALQTLIQETDPGADYRIDRALNEACESVIQTACKHIRSGDPMILSCLMEHLYTEKMVEDCEHRLLELQYFISRDWKLDPVLYRKCQGDASRLCHTHGWNETSEFMPQGAVFSCLYRHAYRTEEQGRRLSRECRAEVQRILHQRAMDVKLDPALQDKCLIDLGKWCSEKTETGQELECLQDHLDDLVVECRDIVGNLTELESEDIQIEALLMRACEPIIQNFCHDVADNQIDSGDLMECLIQNKHQKDMNEKCAIGVTHFQLVQMKDFRFSYKFKMACKEDVLKLCPNIKKKVDVVICLSTTVRNDTLQEAKEHRVSLKCRRQLRVEELEMTEDIRLEPDLYEACKSDIKNFCSAVQYGNAQIIECLKENKKQLSTRCHQKVFKLQETEMMDPELDYTLMRVCKQMIKRFCPEADSKTMLQCLKQNKNSELMDPKCKQMITKRQITQNTDYRLNPMLRKACKADIPKFCHGILTKAKDDSELEGQVISCLKLRYADQRLSSDCEDQIRIIIQESALDYRLDPQLQLHCSDEISSLCAEEAAAQEQTGQVEECLKVNLLKIKTELCKKEVLNMLKESKADIFVDPVLHTACALDIKHHCAAITPGRGRQMSCLMEALEDKRVRLQPECKKRLNDRIEMWSYAAKVAPADGFSDLAMQVMTSPSKNYILSVISGSICILFLIGLMCGRITKRVTRELKDR

SEQ ID NO: 6000 - protein, 698 aa, Homo sapiens
MAACGRVRRMFRLSAALHLLLLFAAGAEKLPGQGVHSQGQGPGANFVSFVGQAGGGGPAGQQLPQLPQSSQLQQQQQQQQQQQQPQPPQPPFPAGGPPARRGGAGAGGGWKLAEEESCREDVTRVCPKHTWSNNLAVLECLQDVREPENEISSDCNHLLWNYKLNLTTDPKFESVAREVCKSTITEIKECADEPVGKGYMVSCLVDHRGNITEYQCHQYITKMTAIIFSDYRLICGFMDDCKNDINILKCGSIRLGEKDAHSQGEVVSCLEKGLVKEAEEREPKIQVSELCKKAILRVAELSSDDFHLDRHLYFACRDDRERFCENTQAGEGRVYKCLFNHKFEESMSEKCREALTTRQKLIAQDYKVSYSLAKSCKSDLKKYRCNVENLPRSREARLSYLLMCLESAVHRGRQVSSECQGEMLDYRRMLMEDFSLSPEIILSCRGEIEHHCSGLHRKGRTLHCLMKVVRGEKGNLGMNCQQALQTLIQETDPGADYRIDRALNEACESVIQTACKHIRSGDPMILSCLMEHLYTEKMVEDCEHRLLELQYFISRDWKLDPVLYRKCQGDASRLCHTHGWNETSEFMPQGAVFSCLYRHAYRTEEQGRRLSRECRAEVQRILHQRAMDVKLDPALQDKCLIDLGKWCSEKTETGQELECLQDHLDDLVVECRDIVGNLTELESEAEREYVFKNLPFKV

SEQ ID NO: 6001 - protein, 305 aa, Homo sapiens
MAACGRVRRMFRLSAALHLLLLFAAGAEKLPGQGVHSQGQGPGANFVSFVGQAGGGGPAGQQLPQLPQSSQLQQQQQQQQQQQQPQPPQPPFPAGGPPARRGGAGAGGGWKLAEEESCREDVTRVCPKHTWSNNLAVLECLQDVREPENEISSDCNHLLWNYKLNLTTDPKFESVAREVCKSTITEIKECADEPVGKGYMVSCLVDHRGNITEYQCHQYITKMTAIIFSDYRLICGFMDDCKNDINILKCGSIRLGEKDAHSQDTPTALRNREGGSHGSAELKSKGSYTSVPWMSSWILPSRISA

SEQ ID NO: 6002 - protein, 698 aa, Homo sapiens; identical to SEQ ID NO: 6000

SEQ ID NO: 6003 - protein, 152 aa, Homo sapiens
MAACGRVRRMFRLSAALHLLLLFAAGAEKLPGQGVHSQGQGPGANFVSFVGQPPFPAGGPPARRGGAGAGGGWKLAEEESCREDVTRVCPKHTWSNNLAVLECLQDVREPENEISSDCNHLLWNYKLNLTTDPKFESVAREVCKSTITEIKE

SEQ ID NO: 6004 - protein, 74 aa, Homo sapiens
MVSCLVDHRGNITEYQCHQYITKMTAIIFSDYRLICGFMDDCKNDINILKCGSIRLGEKDAHSQGEVVSCLEKG

SEQ ID NO: 6005 - protein, 148 aa, Homo sapiens
MRVTLATIAWMVSFVSNYSHTANILPDIENEDFIKDCVRIHNKFRSEVKPTASDMLYMTWDPALAQIAKAWASNCQFSHNTRLKPPHKLHPNFTSLGENIWTGSVPIFSVSSAITNWYDEIQDYDFKTRICKKVCGHYTQRELPNLAI

SEQ ID NO: 6006 - protein, 238 aa, Homo sapiens
MRVTLATIAWMVSFVSNYSHTANILPDIENEDFIKDCVRIHNKFRSEVKPTASDMLYMTWDPALAQIAKAWASNCQFSHNTRLKPPHKLHPNFTSLGENIWTGSVPIFSVSSAITNWYDEIQDYDFKTRICKKVCGHYTQVSQERGRDPNPKRGFLNLARENPGLFGQIVTKLAAQFNFALKFLALTLFPMEHILYATTDQEGITQLGHIREEPPAVPAPIMTSVWTISVLTDSETKS

SEQ ID NO: 6007 - protein, 266 aa, Homo sapiens
MRVTLATIAWMVSFVSNYSHTANILPDIENEDFIKDCVRIHNKFRSEVKPTASDMLYMTWDPALAQIAKAWASNCQFSHNTRLKPPHKLHPNFTSLGENIWTGSVPIFSVSSAITNWYDEIQDYDFKTRICKKVCGHYTQVVWADSYKVGCAVQFCPKVSGFDALSNGAHFICNYGPGGNYPTWPYKRGATCSACPNNDKCLDNLCVNRQRDQVKRYYSVVYPGWPIYPRNRYTSLFLIVNSVILILSVIITILVQHKYPNLVLLD

SEQ ID NO: 6008 - protein, 89 aa, Homo sapiens
MTKSRTMTSRLGYAKKSVATTLRLFGQIVTKLAAQFNFALKFLALTLFPMEHILYATTDQEGITQLGHIREEPPAVPAPIMTSVWTISV

SEQ ID NO: 6009 - protein, 233 aa, Homo sapiens
MALKNKFSCLWILGLCLVATTSSKIPSITDPHFIDNCIEAHNEWRGKVNPPAADMKYMIWDKGLAKMAKAWANQCKFEHNDCLDKSYKCYAAFEYVGENIWLGGIKSFTPRHAITAWYNETQFYDFDSLSCSRVCGHYTQLVWANSFYVGCAVAMCPNLGGASTAIFVCNYGPAGNFANMPPYVRGESCSLCSKEEKCVKNLCKNPFLKPTGRAPQQTAFNPFSLGFLLLRIF

SEQ ID NO: 6010 - protein, 242 aa, Homo sapiens
MALKNKFSCLWILGLCLVATTSSKIPSITDPHFIDNCIEAHNEWRGKVNPPAADMKYMIWDKGLAKMAKAWANQCKFEHNDCLDKSYKCYAAFEYVGENIWLGGIKSFTPRHAITAWYNETQFYDFDSLSCSRVCGHYTQLVWANSFYVGCAVAMCPNLGGASTAIFVCNYGPAGNFANMPPYVRGESCSLCSKEEKCVKNLCRTPQLIIPNQNPFLKPTGRAPQQTAFNPFSLGFLLLRIF

SEQ ID NO: 6011 - protein, 57 aa, Homo sapiens
MSLLKLILLRVPCRATACQKGLTTQTFPLSPQSPKGQLAACSNKMSFLFRAEEKIHF

SEQ ID NO: 6012 - protein, 39 aa, Homo sapiens
  SITE 1: note = misc_feature - Xaa can be any naturally occurring amino acid
XLSPQSPKGQLAACSNKMSFLFRAEEGLHNLLYLTKIHF

SEQ ID NO: 6013 - protein, 56 aa, Homo sapiens
MMVQRLGLISPPASQVSTACNQISPSLQRAMNAANLNIPPSDTRKCGKHGKVPSTK

SEQ ID NO: 6014 - protein, 89 aa, Homo sapiens
MMVQRLGLISPPASQVSTACNQISPSLQRAMNAANLNIPPSDTRSLISRESLASTTLSLTESQSASSMKQEWSQGYRALPSLSNHGSQN

SEQ ID NO: 6015 - protein, 89 aa, Homo sapiens; identical to SEQ ID NO: 6014

SEQ ID NO: 6016 - protein, 89 aa, Homo sapiens; identical to SEQ ID NO: 6014

SEQ ID NO: 6017 - protein, 775 aa, Homo sapiens
MMVQRLGLISPPASQVSTACNQISPSLQRAMNAANLNIPPSDTRSLISRESLASTTLSLTESQSASSMKQEWSQGYRALPSLSNHGSQNGLDLGDLLSLPPGTSMSSNSVSNSLPSYLFGTESSHSPYPSPRHSSTRSHSARSKKRALSLSPLSDGIGIDFNTIIRTSPTSLVAYINGSRASPANLSPQPEVYGHFLGVRGSCIPQPRPVPGSQKGVLVAPGGLALPAYGEDGALEHERMQQLEHGGLQPGLVNHMVVQHGLPGPDSQSAGLFKTERLEEFPGSTVDLPPAPPLPPLPPPPGPPPPYHAHAHLHHPELGPHAQQLALPQATLDDDGEMDGIGGKHCCRWIDCSALYDQQEELVRHIEKVHIDQRKGEDFTCFWAGCPRRYKPFNARYKLLIHMRVHSGEKPNKCTFEGCEKAFSRLENLKIHLRSHTGEKPYLCQHPGCQKAFSNSSDRAKHQRTHLDTKPYACQIPGCTKRYTDPSSLRKHVKAHSSKEQQARKKLRSSTELHPDLLTDCLTVQSLQPATSPRDAAAEGTVGRSPGPGPDLYSAPIFSSNYSSRSGTAAGAVPPPHPVSHPSPGHNVQGSPHNPSSQLPPLTAVDAGAERFAPSAPSPHHISPRRVPAPSSILQRTQPPYTQQPSGSHLKSYQPETNSSFQPNGIHVHGFYGQLQKFCPPHYPDSQRIVPPVSSCSVVPSFEDCLVPTSMGQASFDVFHRAFSTHSGITVYDLPSSSSSLFGESLRSGAEDATFLQISTVDRCPSQLSSVYTEG

SEQ ID NO: 6018 - protein, 244 aa, Homo sapiens
MNGRSCSMSLHRTSGTPQGPRMVSGHHIPAIRAHSGTPGPSPCGSTSSPTMASLANNLHLKMPSGGGMAPQNNVAESRIHLPALSPRRQMLTNGKPRFQVTQAGGMSGSHTLKPKQQEFGSPFPPNPGKGALGFGPQCKSIGKGSCNNLVVTSSPMMVQRLGLISPPASQVSTACNQISPSLQRAMNAANLNIPPSDTRSLISRESLASTTLSLTESQSASSMKQEWSQGYRALPSLSNHGSQN

SEQ ID NO: 6019 - protein, 244 aa, Homo sapiens; identical to SEQ ID NO: 6018

SEQ ID NO: 6020 - protein, 930 aa, Homo sapiens
MNGRSCSMSLHRTSGTPQGPRMVSGHHIPAIRAHSGTPGPSPCGSTSSPTMASLANNLHLKMPSGGGMAPQNNVAESRIHLPALSPRRQMLTNGKPRFQVTQAGGMSGSHTLKPKQQEFGSPFPPNPGKGALGFGPQCKSIGKGSCNNLVVTSSPMMVQRLGLISPPASQVSTACNQISPSLQRAMNAANLNIPPSDTRSLISRESLASTTLSLTESQSASSMKQEWSQGYRALPSLSNHGSQNGLDLGDLLSLPPGTSMSSNSVSNSLPSYLFGTESSHSPYPSPRHSSTRSHSARSKKRALSLSPLSDGIGIDFNTIIRTSPTSLVAYINGSRASPANLSPQPEVYGHFLGVRGSCIPQPRPVPGSQKGVLVAPGGLALPAYGEDGALEHERMQQLEHGGLQPGLVNHMVVQHGLPGPDSQSAGLFKTERLEEFPGSTVDLPPAPPLPPLPPPPGPPPPYHAHAHLHHPELGPHAQQLALPQATLDDDGEMDGIGGKHCCRWIDCSALYDQQEELVRHIEKVHIDQRKGEDFTCFWAGCPRRYKPFNARYKLLIHMRVHSGEKPNKCTFEGCEKAFSRLENLKIHLRSHTGEKPYLCQHPGCQKAFSNSSDRAKHQRTHLDTKPYACQIPGCTKRYTDPSSLRKHVKAHSSKEQQARKKLRSSTELHPDLLTDCLTVQSLQPATSPRDAAAEGTVGRSPGPGPDLYSAPIFSSNYSSRSGTAAGAVPPPHPVSHPSPGHNVQGSPHNPSSQLPPLTAVDAGAERFAPSAPSPHHISPRRVPAPSSILQRTQPPYTQQPSGSHLKSYQPETNSSFQPNGIHVHGFYGQLQKFCPPHYPDSQRIVPPVSSCSVVPSFEDCLVPTSMGQASFDVFHRAFSTHSGITVYDLPSSSSSLFGESLRSGAEDATFLQISTVDRCPSQLSSVYTEG

SEQ ID NO: 6021 - protein, 142 aa, Homo sapiens
MNGRSCSMSLHRTSGTPQGPRMVSGHHIPAIRAHSGTPGPSPCGSTSSPTMASLANNLHLKMPSGGGMAPQNNVAESRIHLPALSPRRQMLTNGKPRFQVTQAGGMSGSHTLKPKQQEFGSPFPPNPGKGPLFRVSLWRPRP

SEQ ID NO: 6022 - protein, 75 aa, Homo sapiens
FNLTFGASTGPGYWDQHYLSWSMLLGVGFPPVDGLSPLVLGIMAVALGAPGLMLLGGGLVLLLHHKKYSEYQSIN

SEQ ID NO: 6023 - protein, 320 aa, Homo sapiens
MRGSVECTWGWGHCAPSPLLLWTLLLFAAPFGLLGEKTRQLLEFDSTNVSDTAAKPLGRPYPPYSLADFSWNNITDSLDPATLSATFQGHPMNDPTRTFANGSLAFRVQAFSRSSRPAQPPRLLHTADTCQLEVALIGASPRGNRSLFGLEVATLGQGPDCPSMQEQHSIDDEYAPAVFQLDQLLWGSLPSGFAQWRPVAYSQKPGGRESALPCQASPLHPALAYSLPQSPIVRAFFGSQNNFCAFNLTFGASTGPGYWDQHYLSWSMLLGVGFPPVDGLSPLVLGIMAVALGAPGLMLLGGGLVLLLHHKKYSEYQSIN

SEQ ID NO: 6024 - protein, 183 aa, Homo sapiens [sequence omitted]

SEQ ID NO: 6025 - protein, 89 aa, Homo sapiens
MRGSVECTWGWGHCAPSPLLLWTLLLFAAPFGLLGEKTRQVRRLGENQGEECRGESSSQLEGGTKDWGKAFGKTISSILLGRFLLEQHH

SEQ ID NO: 6026 - protein, 130 aa, Homo sapiens
MRGSVECTWGWGHCAPSPLLLWTLLLFAAPFGLLGEKTRQVSLEVIPNWLGPLQNLLHIRAVGTNSTLHYVWSSLGPLAVVMVATNTPHSTLSVNWSLLLSPEPDGGLMVLPKDSIQFSSALVFTRGSCC

SEQ ID NO: 6027 - protein, 406 aa, Homo sapiens
MRGSVECTWGWGHCAPSPLLLWTLLLFAAPFGLLGEKTRQVSLEVIPNWLGPLQNLLHIRAVGTNSTLHYVWSSLGPLAVVMVATNTPHSTLSVNWSLLLSPEPDGGLMVLPKDSIQFSSALVFTRLLEFDSTNVSDTAAKPLGRPYPPYSLADFSWNNITDSLDPATLSATFQGHPMNDPTRTFANGSLAFRVQAFSRSSRPAQPPRLLHTADTCQLEVALIGASPRGNRSLFGLEVATLGQGPDCPSMQEQHSIDDEYAPAVFQLDQLLWGSLPSGFAQWRPVAYSQKPGGRESALPCQASPLHPALAYSLPQSPIVRAFFGSQNNFCAFNLTFGASTGPGYWDQHYLSWSMLLGVGFPPVDGLSPLVLGIMAVALGAPGLMLLGGGLVLLLHHKKYSEYQSIN

SEQ ID NO: 6028 - protein, 331 aa, Homo sapiens
MRGSVECTWGWGHCAPSPLLLWTLLLFAAPFGLLGEKTRQVSLEVIPNWLGPLQNLLHIRAVGTNSTLHYVWSSLGPLAVVMVATNTPHSTLSVNWSLLLSPEPDGGLMVLPKDSIQFSSALVFTRLLEFDSTNVSDTAAKPLGRPYPPYSLADFSWNNITDSLDPATLSATFQGHPMNDPTRTFANGSLAFRVQAFSRSSRPAQPPRLLHTADTCQLEVALIGASPRGNRSLFGLEVATLGQGPDCPSMQEQHSIDDEYAPAVFQVDAPGCGLPSSGRLVPTSPGHHGSGPGCPRAHAARGRLGSAAAPQEVLRVPVHKLRPALWREGHY

SEQ ID NO: 6029 - protein, 325 aa, Homo sapiens
MVATNTPHSTLSVNWSLLLSPEPDGGLMVLPKDSIQFSSALVFTRLLEFDSTNVSDTAAKPLGRPYPPYSLADFSWNNITDSLDPATLSATFQGHPMNDPTRTFANGSLAFRVQAFSRSSRPAQPPRLLHTADTCQLEVALIGASPRGNRSLFGLEVATLGQGPDCPSMQEQHSIDDEYAPAVFQLDQLLWGSLPSGFAQWRPVAYSQKPGGRESALPCQASPLHPALAYSLPQSPIVRAFFGSQNNFCAFNLTFGASTGPGYWDQHYLSWSMLLGVGFPPVDGLSPLVLGIMAVALGAPGLMLLGGGLVLLLHHKKYSEYQSIN

SEQ ID NO: 6030 - protein, 111 aa, Homo sapiens
  SITE 1: note = misc_feature - Xaa can be any naturally occurring amino acid
XPSMQEQHSIDDEYAPAVFQSPIVRAFFGSQNNFCAFNLTFGASTGPGYWDQHYLSWSMLLGVGFPPVDGLSPLVLGIMAVALGAPGLMLLGGGLVLLLHHKKYSEYQSIN

SEQ ID NO: 6031 - protein, 46 aa, Homo sapiens
MKFLLTTAFLILISLWVEEAYSKEKSSKKGKGKKKQYLCPSERLYH

SEQ ID NO: 6032 - protein, 46 aa, Homo sapiens; identical to SEQ ID NO: 6031

SEQ ID NO: 6033 - protein, 56 aa, Homo sapiens
MKFLLTTAFLILISLWVEEAYSKEKSSKKGKGKKKQYLCPSLVRPDAKKFVLLSLI

SEQ ID NO: 6034 - protein, 497 aa, Homo sapiens
MKFLLTTAFLILISLWVEEAYSKEKSSKKGKGKKKQYLCPSQQSAEDLARVPANSTSNILNRLLVSYDPRIRPNFKGIPVDVVVNIFINSFGSIQETTMDYRVNIFLRQKWNDPRLKLPSDFRGSDALTVDPTMYKCLWKPDLFFANEKSANFHDVTQENILLFIFRDGDVLVSMRLSITLSCPLDLTLFPMDTQRCKMQLESFGYTTDDLRFIWQSGDPVQLEKIALPQFDIKKEDIEYGNCTKYYKGTGYYTCVEVIFTLRRQVGFYMMGVYAPTLLIVVLSWLSFWINPDASAARVPLGIFSVLSLASECTTLAAELPKVSYVKALDVWLIACLLFGFASLVEYAVVQVMLNNPKRVEAEKARIAKAEQADGKGGNVAKKNTVNGTGTPVHISTLQVGETRCKKVCTSKSDLRSNDFSIVGSLPRDFELSNYDCYGKPIEVNNGLGKSQAKNNKKPPPAKPVIPTAAKRIDLYARALFPFCFLFFNVIYWSIYL

SEQ ID NO: 6035 - protein, 497 aa, Homo sapiens; identical to SEQ ID NO: 6034

SEQ ID NO: 6036 - protein, 303 aa, Homo sapiens
MKFLLTTAFLILISLWVEEAYSKEKSSKKGKGKKKQYLCPSQQSAEDLARVPANSTSNILNRLLVSYDPRIRPNFKGIPVDVVVNIFINSFGSIQETTMDYRVNIFLRQKWNDPRLKLPSDFRGSDALTVDPTMYKCLWKPDLFFANEKSANFHDVTQENILLFIFRDGDVLVSMRLSITLSCPLDLTLFPMDTQRCKMQLESFGYTTDDLRFIWQSGDPVQLEKIALPQFDIKKEDIEYGNCTKYYKGTGYYTCVEVIFTLRRQVGFYMMGVYAPTLLIVVLSWLSFWINPDASAARVPLGW

SEQ ID NO: 6037 - protein, 182 aa, Homo sapiens
AKSGVAGGILLVVPNVMGMMCWSPPLDKMGNSVKGIHFCHDLVSLCNFHNYDNLRHFAKKLDPRREGGDQRVKSVINLLFAAYTGDVSALRRFALSAMDMEQRDYDSRTALHVAAAEGGITLPWMKHCTLDTMMYLKFSKNTKSSTHLKEILTTGRKIKPSIRILMDCCNGLKSQDLNHLPI

SEQ ID NO: 6038 - protein, 114 aa, Homo sapiens
ESAKKQSGGKVADYIPQLAKFSPDLWGVSVCTVDGQRHSTGDTKVPFCLQSCVKPLKYAIAVNDLGTEYVHRYVGKEPSGLRFNKLFLNEDDKPHNPMVNAGAIVVTSLIKDWW

SEQ ID NO: 6039 - protein, 169 aa, Homo sapiens
MAATLANGGFCPITGERVLSPEAVRNTLSLMHSCGMYDFSGQFAFHVGLPAKSGVAGGILLVVPNVMGMMCWSPPLDKMGNSVKGIHFCHDLVSLCNFHNYDNLRHFAKKLDPRREGGDQRHSFGPLDYESLQQELALKETVWKKVSPESNEDISTTVVYRMESLGEKS

SEQ ID NO: 6040 - protein, 164 aa, Homo sapiens
MAATLANGGFCPITGERVLSPEAVRNTLSLMHSCGMYDFSGQFAFHVGLPAKSGVAGGILLVVPNVMGMMCWSPPLDKMGNSVKGIHFCHDLVSLCNFHNYDNLRHFAKKLDPRREGGDQRVKSVINLLFAAYTGDVSALRRFALSAMDMEQRDYDSRTALHVA

SEQ ID NO: 6041 - protein, 103 aa, Homo sapiens
MGMMCWSPPLDKMGNSVKGIHFCHDLVSLCNFHNYDNLRHFAKKLDPRREGGDQRHSFGPLDYESLQQELALKETVWKKVSPESNEDISTTVVYRMESLGEKS

SEQ ID NO: 6042 - protein, 174 aa, Homo sapiens
MGMMCWSPPLDKMGNSVKGIHFCHDLVSLCNFHNYDNLRHFAKKLDPRREGGDQRVKSVINLLFAAYTGDVSALRRFALSAMDMEQRDYDSRTALHVAAAEGHVEVVKFLLEACKVNPFPKDRWNNTPMDEALHFGHHDVFKILQEYQVQYTPQGDSDNGKENQTVHKNLDGLL

SEQ ID NO: 6043 - protein, 669 aa, Homo sapiens
MMRLRGSGMLRDLLLRSPAGVSATLRRAQPLVTLCRRPRGGGRPAAGPAAAARLHPWWGGGGWPAEPLARGLSSSPSEILQELGKGSTHPQPGVSPPAAPAAPGPKDGPGETDAFGNSEGKELVASGENKIKQGLLPSLEDLLFYTIAEGQEKIPVHKFITALKSTGLRTSDPRLKECMDMLRLTLQTTSDGVMLDKDLFKKCVQSNIVLLTQAFRRKFVIPDFMSFTSHIDELYESAKKQSGGKVADYIPQLAKFSPDLWGVSVCTVDGQRHSTGDTKVPFCLQSCVKPLKYAIAVNDLGTEYVHRYVGKEPSGLRFNKLFLNEDDKPHNPMVNAGAIVVTSLIKQGVNNAEKFDYVMQFLNKMAGNEYVGFSNATFQSERESGDRNFAIGYYLKEKKCFPEGTDMVGILDFYFQLCSIEVTCESASVMAATLANGGFCPITGERVLSPEAVRNTLSLMHSCGMYDFSGQFAFHVGLPAKSGVAGGILLVVPNVMGMMCWSPPLDKMGNSVKGIHFCHDLVSLCNFHNYDNLRHFAKKLDPRREGGDQRVKSVINLLFAAYTGDVSALRRFALSAMDMEQRDYDSRTALHVAAAEGHVEVVKFLLEACKVNPFPKDRWNNTPMDEALHFGHHDVFKILQEYQVQYTPQGDSDNGKENQTVHKNLDGLL

SEQ ID NO: 6044 - protein, 598 aa, Homo sapiens
MMRLRGSGMLRDLLLRSPAGVSATLRRAQPLVTLCRRPRGGGRPAAGPAAAARLHPWWGGGGWPAEPLARGLSSSPSEILQELGKGSTHPQPGVSPPAAPAAPGPKDGPGETDAFGNSEGKELVASGENKIKQGLLPSLEDLLFYTIAEGQEKIPVHKFITALKSTGLRTSDPRLKECMDMLRLTLQTTSDGVMLDKDLFKKCVQSNIVLLTQAFRRKFVIPDFMSFTSHIDELYESAKKQSGGKVADYIPQLAKFSPDLWGVSVCTVDGQRHSTGDTKVPFCLQSCVKPLKYAIAVNDLGTEYVHRYVGKEPSGLRFNKLFLNEDDKPHNPMVNAGAIVVTSLIKQGVNNAEKFDYVMQFLNKMAGNEYVGFSNATFQSERESGDRNFAIGYYLKEKKCFPEGTDMVGILDFYFQLCSIEVTCESASVMAATLANGGFCPITGERVLSPEAVRNTLSLMHSCGMYDFSGQFAFHVGLPAKSGVAGGILLVVPNVMGMMCWSPPLDKMGNSVKGIHFCHDLVSLCNFHNYDNLRHFAKKLDPRREGGDQRHSFGPLDYESLQQELALKETVWKKVSPESNEDISTTVVYRMESLGEKS

SEQ ID NO: 6045 - protein, 276 aa, Homo sapiens
MNSKRMLLLVLFAFSLMLVERYFRNHQVEELRLSDWFHPRKRPDVITKTDWLAPVLWEGTFDRRVLEKHYRRRNITVGLAVFATGRFAEEYLRPFLHSANKHFMTGYRVIFYIMVDAFFKLPDIEPSPLRTFKAFKVGTERWWLDGPLVHVKSLGEHIASHIQDEVDFLFSMAANQVFQNEFGVETLGPLVAQLHAWWYFRNTKNFPYERRPTSAACIPFGQGDFYYGNLMVGGTPHNILDFIKEYLNGVIHDIKNGLNSTYEKHLNKYFYLNKPT

SEQ ID NO: 6046 - protein, 307 aa, Homo sapiens
MNSKRMLLLVLFAFSLMLVERYFRNHQVEELRLSDWFHPRKRPDVITKTDWLAPVLWEGTFDRRVLEKHYRRRNITVGLAVFATGRFAEEYLRPFLHSANKHFMTGYRVIFYIMVDAFFKLPDIEPSPLRTFKAFKVGTERWWLDGPLVHVKSLGEHIASHIQDEVDFLFSMAANQVFQNEFGVETLGPLVAQLHAWWYFRNTKNFPYERRPTSAACIPFGQGDFYYGNLMVGGTPHNILDFIKEYLNGVIHDIKNGLNSTYEKHLNKYFYLNKPTLLSPAYSWDLAFSPPPQIQYVKVAHDSQRKL

SEQ ID NO: 6047 - protein, 291 aa, Homo sapiens
MGVAARPPALRHWFSHSIPLAIFALLLLYLSVRSLGARSGCGPRAQPCVPGETAPFQVRQESGTLEAPERKQPPCLGPRGMLGRMMRRFHASLKPEGDVGLSPYLAGWRALVEFLTPLGSVFAFATREAFTKVTDLEARVHGPDAEHYWSLVAMAAWERRAGLLEQPGAAPRDPTRSSGSRTLLLLHRALRWSQLCLHRVATGALGGPDAGVQCSDAYRAALGPHHPWLVRQTARLAFLAFPGRRRLLELACPGATEAEARAALVRAAGTLEDVYNRTQSLLAERGLLQLA

SEQ ID NO: 6048 - protein, 558 aa, Homo sapiens
MYRYLGEALLLSRAGPAALGSASADSAALLGWARGQPAAAPQPGLALAARRHYSEAVADREDDPNFFKMVEGFFDRGASIVEDKLVEDLRTRESEEQKRNRVRGILRIIKPCNHVLSLSFPIRRDDGSWEVIEGYRAQHSQHRTPCKGGIRYSTDVSVDEVKALASLMTYKCAVVDVPFGGAKAGVKINPKNYTDNELEKITRRFTMELAKKGFIGPGIDVPAPDMSTGEREMSWIADTYASTIGHYDINAHACVTGKPISQGGIHGRISATGRGVFHGIENFINEASYMSILGMTPGFGDKTFVVQGFGNVGLHSMRYLHRFGAKCIAVGESDGSIWNPDGIDPKELEDFKLQHGSILGFPKAKPYEGSILEADCDILIPAASEKQLTKSNAPRVKAKIIAEGANGPTTPEADKIFLERNIMVIPDLYLNAGGVTVSYFEWLKNLNHVSYGRLTFKYERDSNYHLLMSVQESLERKFGKHGGTIPIVPTAEFQDRISGASEKDIVHSGLAYTMERSARQIMRTAMKYNLGLDLRTAAYVNAIEKVFKVYNEAGVTFT

SEQ ID NO: 6049 - protein, 193 aa, Homo sapiens
MQSLMQAPLLIALGLLLAAPAQAHLKKPSQLSSFSWDNCDEGKDPAVIRSLTLEPDPIIVPGNVTLSVMGSTSVPLSSPLKVDLVLEKEVAGLWIKIPCTDYIGSCTFEHFCDVLDMLIPTGEPCPEPLRTYGLPCHCPFKEGTYSLPKSEFVVPDLELPSWLTTGNYRIESVLSSSGKRLGCIKIAASLKGI

SEQ ID NO: 6050 - protein, 146 aa, Homo sapiens
MSWVEAAGVSSTALEDRIVAKHEEVPEVSVQYEEKFQNHHKLPSQLSSFSWDNCDEGKDPAVIRSLTLEPDPIIVPGNVTLSVMGSTSVPLSSPLKVDLVLEKEVAGLWIKIPCTDYIGSCTFEHFCDVLDMLIPTGEPCPEPLRT

SEQ ID NO: 6051 - protein, 104 aa, Homo sapiens
  SITE 1: note = misc_feature - Xaa can be any naturally occurring amino acid
XKDPAVIRSLTLEPDPIIVPGNVTLSVMGSTSVPLSSPLKVDLVLEKEVAGLWIKIPCTDYIGSCTFEHFCDVLDMLIPTGEPCPEPLRTYGLPCHCPFKEVST

SEQ ID NO: 6052 - protein, 118 aa, Homo sapiens
MLLFALLLAMELPLVAASATMRAQWTYSLRCHDCAVINDFNCPNIRVCPYHIRRCMTISIQLSSGDRAAVCPGPHPTFFQPGAWIPTQVTDSKHQPLPAHLTRRHPLHGPGNILPSAI

SEQ ID NO: 6053 - protein, 158 aa, Homo sapiens
MLLFALLLAMELPLVAASATMRAQWTYSLRCHDCAVINDFNCPNIRVCPYHIRRCMTISIRINSRELLVYKNCTNNCTFVYAAEQPPEAPGKIFKTNSFYWVCCCNSMVCNAGGPTNLERDMLPDEVTEEELPEGTVRLGVSKLLLSFASIIVSNILP

SEQ ID NO: 6054 - protein, 625 aa, Homo sapiens
MARPVDPQRSPDPTFRSSTRHSGKLEPMEATAHLLRKQCPSRLNSPAWEASGLHWSSLDSPVGSMQALRPSAQHSWSPEPSVVPDQAWEDTALHQKKLCPLSLTSLPREAAVNFSYRSQTLLQEAQVLQGSPELLPRSPKPSGLQRLAPEEATALPLRRLCHLSLMEKDLGTTAHPRGFPELSHKSTAAASSRQSRPRVRSASLPPRTRLPSGSQAPSAAHPKRLSDLLLTSRAAAPGWRSPDPRSRLAAPPLGSTTLPSTWTAPQSRLTARPSRSPEPQIRESEQRDPQLRRKQQRWKEPLMPRREEKYPLRGTDPLPPGQPQRIPLPGQPLQPQPILTPGQPQKIPTPGQHQPILTPGHSQPIPTPGQPLPPQPIPTPGRPLTPQPIPTPGRPLTPQPIQMPGRPLRLPPPLRLLRPGQPMSPQLRQTQGLPLPQPLLPPGQPKSAGRPLQPLPPGPDARSISDPPAPRSRLPIRLLRGLLARLPGGASPRAAAAAACTTMKGWPAATMTPAETSPTMGPPDASAGFSIGEIAAAESPSATYSATFSCKPSGAASVDLRVPSPKPRALSRSRRYPWRRSADRCAKKPWRSGPRSAQRRNAVSSSTNNSRTKRWATCVRTACCF

SEQ ID NO: 6055 - protein, 245 aa, Homo sapiens
MDRRSRAQQWRRARHNYNDLCPPIGRRAATALLWLSCSIALLRALATSNARAQQRAAAQQRRSFLNAHHRSGAQVFPESPESESDHEHEEADLELSLPECLEYEEEFDYETESETESEIESETDFETEPETAPTTEPETEPEDDRGPVVPKHSTFGQSLTQRLHALKLRSPDASPSRAPPSTQEPQSPREGEELKPEDKDPRDPEESKEPKEEKQRRRCKPKKPTRRDASPESPSKKGPIPIRRH

SEQ ID NO: 6056 - protein, 245 aa, Homo sapiens; identical to SEQ ID NO: 6055

SEQ ID NO: 6057 - protein, 245 aa, Homo sapiens; identical to SEQ ID NO: 6055

SEQ ID NO: 6058 - protein, 158 aa, Homo sapiens
MGCLGNSKTEDQRNEEKAQREANKKIEKQLQEALNLFKSIWNNRWLRTISVILFLNKQDLLAEKVLAGKSKIEDYFPEFARYTTPEDATPEPGEDPRVTRAKYFIRDEFLRISTASGDGRHYCYPHFTCAVDTENIRRVFNDCRDIIQRMHLRQYELL

SEQ ID NO: 6059 - protein, 379 aa, Homo sapiens
MGCLGNSKTEDQRNEEKAQREANKKIEKQLQKDKQVYRATHRLLLLGAGESGKSTIVKQMRILHVNGFNGDEKATKVQDIKNNLKEAIETIVAAMSNLVPPVELANPENQFRVDYILSVMNVPDFDFPPEFYEHAKALWEDEGVRACYERSNEYQLIDCAQYFLDKIDVIKQADYVPSDQDLLRCRVLTSGIFETKFQVDKVNFHMFDVGGQRDERRKWIQCFNDVTAIIFVVASSSYNMVIREDNQTNRLQEALNLFKSIWNNRWLRTISVILFLNKQDLLAEKVLAGKSKIEDYFPEFARYTTPEDATPEPGEDPRVTRAKYFIRDEFLRISTASGDGRHYCYPHFTCAVDTENIRRVFNDCRDIIQRMHLRQYELL

SEQ ID NO: 6060 - protein, 380 aa, Homo sapiens
MGCLGNSKTEDQRNEEKAQREANKKIEKQLQKDKQVYRATHRLLLLGAGESGKSTIVKQMRILHVNGFNGDSEKATKVQDIKNNLKEAIETIVAAMSNLVPPVELANPENQFRVDYILSVMNVPDFDFPPEFYEHAKALWEDEGVRACYERSNEYQLIDCAQYFLDKIDVIKQADYVPSDQDLLRCRVLTSGIFETKFQVDKVNFHMFDVGGQRDERRKWIQCFNDVTAIIFVVASSSYNMVIREDNQTNRLQEALNLFKSIWNNRWLRTISVILFLNKQDLLAEKVLAGKSKIEDYFPEFARYTTPEDATPEPGEDPRVTRAKYFIRDEFLRISTASGDGRHYCYPHFTCAVDTENIRRVFNDCRDIIQRMHLRQYELL

SEQ ID NO: 6061 - protein, 394 aa, Homo sapiens
MGCLGNSKTEDQRNEEKAQREANKKIEKQLQKDKQVYRATHRLLLLGAGESGKSTIVKQMRILHVNGFNGEGGEEDPQAARSNSDGEKATKVQDIKNNLKEAIETIVAAMSNLVPPVELANPENQFRVDYILSVMNVPDFDFPPEFYEHAKALWEDEGVRACYERSNEYQLIDCAQYFLDKIDVIKQADYVPSDQDLLRCRVLTSGIFETKFQVDKVNFHMFDVGGQRDERRKWIQCFNDVTAIIFVVASSSYNMVIREDNQTNRLQEALNLFKSIWNNRWLRTISVILFLNKQDLLAEKVLAGKSKIEDYFPEFARYTTPEDATPEPGEDPRVTRAKYFIRDEFLRISTASGDGRHYCYPHFTCAVDTENIRRVFNDCRDIIQRMHLRQYELL

SEQ ID NO: 6062 - protein, 87 aa, Homo sapiens
MGCLGNSKTEDQRNEEKAQREANKKIEKQLQKDKQVYRATHRLLLLGAGESGKSTIVKQMRILHVNGFNGEGGEEDPQAARSNSDGI

SEQ ID NO: 6063 - protein, 395 aa, Homo sapiens
MGCLGNSKTEDQRNEEKAQREANKKIEKQLQKDKQVYRATHRLLLLGAGESGKSTIVKQMRILHVNGFNGEGGEEDPQAARSNSDGSEKATKVQDIKNNLKEAIETIVAAMSNLVPPVELANPENQFRVDYILSVMNVPDFDFPPEFYEHAKALWEDEGVRACYERSNEYQLIDCAQYFLDKIDVIKQADYVPSDQDLLRCRVLTSGIFETKFQVDKVNFHMFDVGGQRDERRKWIQCFNDVTAIIFVVASSSYNMVIREDNQTNRLQEALNLFKSIWNNRWLRTISVILFLNKQDLLAEKVLAGKSKIEDYFPEFARYTTPEDATPEPGEDPRVTRAKYFIRDEFLRISTASGDGRHYCYPHFTCAVDTENIRRVFNDCRDIIQRMHLRQYELL

SEQ ID NO: 6064 - protein, 1023 aa, Homo sapiens
MGVRNCLYGNNMSGQRDIPPEIGEQPEQPPLEAPGAAAPGAGPSPAEEMETEPPHNEPIPVENDGEACGPPEVSRPNFQVLNPAFREAGAHGSYSPPPEEAMPFEAEQPSLGGFWPTLEQPGFPSGVHAGLEAFGPALMEPGAFSGARPGLGGYSPPPEEAMPFEFDQPAQRGCSQLLLQVPDLAPGGPGAAGVPGAPPEEPQALRPAKAGSRGGYSPPPEETMPFELDGEGFGDDSPPPGLSRVIAQVDGSSQFAAVAASSAVRLTPAANAPPLWVPGAIGSPSQEAVRPPSNFTGSSPWMEISGPPFEIGSAPAGVDDTPVNMDSPPIALDGPPIKVSGAPDKRERAERPPVEEEAAEMEGAADAAEGGKVPSPGYGSPAAGAASADTAARAAPAAPADPDSGATPEDPDSGTAPADPDSGAFAADPDSGAAPAAPADPDSGAAPDAPADPDSGAAPDAPADPDAGAAPEAPAAPAAAETRAAHVAPAAPDAGAPTAPAASATRAAQVRRAASAAPASGARRKIHLRPPSPEIQAADPPTPRPTRASAWRGKSESSRGRRVYYDEGVASSDDDSSGDESDDGTSGCLRWFQHRRNRRRRKPQRNLLRNFLVQAFGGCFGRSESPQPKASRSLKVKKVPLAEKRRQMRKEALEKRAQKRAEKKRSKLIDKQLQDEKMGYMCTHRLLLLGAGESGKSTIVKQMRILHVNGFNGDSEKATKVQDIKNNLKEAIETIVAAMSNLVPPVELANPENQFRVDYILSVMNVPDFDFPPEFYEHAKALWEDEGVRACYERSNEYQLIDCAQYFLDKIDVIKQADYVPSDQDLLRCRVLTSGIFETKFQVDKVNFHMFDVGGQRDERRKWIQCFNDVTAIIFVVASSSYNMVIREDNQTNRLQEALNLFKSIWNNRWLRTISVILFLNKQDLLAEKVLAGKSKIEDYFPEFARYTTPEDATPEPGEDPRVTRAKYFIRDEFLRISTASGDGRHYCYPHFTCAVDTENIRRVFNDCRDIIQRMHLRQYELL

SEQ ID NO: 6065 - protein, 720 aa, Homo sapiens [sequence omitted]

SEQ ID NO: 6066 - protein, 1037 aa, Homo sapiens
MGVRNCLYGNNMSGQRDIPPEIGEQPEQPPLEAPGAAAPGAGPSPAEEMETEPPHNEPIPVENDGEACGPPEVSRPNFQVLNPAFREAGAHGSYSPPPEEAMPFEAEQPSLGGFWPTLEQPGFPSGVHAGLEAFGPALMEPGAFSGARPGLGGYSPPPEEAMPFEFDQPAQRGCSQLLLQVPDLAPGGPGAAGVPGAPPEEPQALRPAKAGSRGGYSPPPEETMPFELDGEGFGDDSPPPGLSRVIAQVDGSSQFAAVAASSAVRLTPAANAPPLWVPGAIGSPSQEAVRPPSNFTGSSPWMEISGPPFEIGSAPAGVDDTPVNMDSPPIALDGPPIKVSGAPDKRERAERPPVEEEAAEMEGAADAAEGGKVPSPGYGSPAAGAASADTAARAAPAAPADPDSGATPEDPDSGTAPADPDSGAFAADPDSGAAPAAPADPDSGAAPDAPADPDSGAAPDAPADPDAGAAPEAPAAPAAAETRAAHVAPAAPDAGAPTAPAASATRAAQVRRAASAAPASGARRKIHLRPPSPEIQAADPPTPRPTRASAWRGKSESSRGRRVYYDEGVASSDDDSSGDESDDGTSGCLRWFQHRRNRRRRKPQRNLLRNFLVQAFGGCFGRSESPQPKASRSLKVKKVPLAEKRRQMRKEALEKRAQKRAEKKRSKLIDKQLQDEKMGYMCTHRLLLLGAGESGKSTIVKQMRILHVNGFNGEGGEEDPQAARSNSDGEKATKVQDIKNNLKEAIETIVAAMSNLVPPVELANPENQFRVDYILSVMNVPDFDFPPEFYEHAKALWEDEGVRACYERSNEYQLIDCAQYFLDKIDVIKQADYVPSDQDLLRCRVLTSGIFETKFQVDKVNFHMFDVGGQRDERRKWIQCFNDVTAIIFVVASSSYNMVIREDNQTNRLQEALNLFKSIWNNRWLRTISVILFLNKQDLLAEKVLAGKSKIEDYFPEFARYTTPEDATPEPGEDPRVTRAKYFIRDEFLRISTASGDGRHYCYPHFTCAVDTENIRRVFNDCRDIIQRMHLRQYELL

SEQ ID NO: 6067 - protein, 120 aa, Homo sapiens
MRILHVNGFNGEGGEEDPQAARSNSDGEKATKVQDIKNNLKEAIETIVAAMSNLVPPVELANPENQFRVDYILSVMNVPDFDFPPEFYEHAKALWEDEGVRACYERSNEYQLIDCAQYFL

SEQ ID NO: 6068 - protein, 160 aa, Homo sapiens
MRILHVNGFNGEGGEEDPQAARSNSDGEKATKVQDIKNNLKEAIETIVAAMSNLVPPVELANPENQFRVDYILSVMNVPDFDFPPEFYEHAKALWEDEGVRACYERSNEYQLIDCAQYFLDKIDVIKQADYVPSDQDLLRCRVLTSGIFETKFQVDKVNF

SEQ ID NO: 6069 - protein, 166 aa, Homo sapiens
PESESDHEHEEADLELSLPECLEYEEEFDYETESETESEIESETDFETEPETAPTTEPETEPEDDRGPVVPKHSTFGQSLTQRLHALKLRSPDASPSRAPPSTQEPQSPREGEELKPEDKDPRDPEESKEPKEEKQRRRCKPKKPTRRDASPESPSKKGPIPIRRH

SEQ ID NO: 6070 - protein, 193 aa, Homo sapiens
PKASRSLKVKKVPLAEKRRQMRKEALEKRAQKRAEKKRSKLIDKQLQDEKMGYMCTHRLLLLGAGESGKSTIVKQMRILHVNGFNGEGGEEDPQAARSNSDGSEKATKVQDIKNNLKEAIETIVAAMSNLVPPVELANPENQFRVDYILSVMNVPDFDFPPEFYEHAKALWEDEGVRACYERSNEYQLIDCAQ

SEQ ID NO: 6071 - protein, 61 aa, Homo sapiens
QRNEEKAQREANKKIEKQLQKDKQVYRATHRLLLLGAGESGKSTIVKQMRILHVNGFNGEI

SEQ ID NO: 6072 - protein, 199 aa, Homo sapiens
  SITE 1: note = misc_feature - Xaa can be any naturally occurring amino acid
XAFGGCFGRSESPQPKASRSLKVKKVPLAEKRRQMRKEALEKRAQKRAEKKRSKLIDKQLQDEKMGYMCTHRLLLLGAGESGKSTIVKQMRILHVNGFNGDEKATKVQDIKNNLKEAIETIVAAMSNLVPPVELANPENQFRVDYILSVMNVPDFDFPPEFYEHAKALWEDEGVRACYERSNEYQLIDCAQYFLDKIDV

SEQ ID NO: 6073 - protein, 184 aa, Homo sapiens
  SITE 1: note = misc_feature - Xaa can be any naturally occurring amino acid
XGRRVYYDEGVASSDDDSSGDESDDGTSGCLRWFQHRRNRRRRKPQRNLLRNFLVQAFGGCFGRSESPQPKASRSLKVKKVPLAEKRRQMRKEALEKRAQKRAEKKRSKLIDKQLQDEKMGYMCTHRLLLLGRKVVPSDTEGRFRLDRPAPATVSWTGRGFSVSSLLIRSPNPPAFTVEKPDTQ

SEQ ID NO: 6074 - protein, 113 aa, Homo sapiens
  SITE 1: note = misc_feature - Xaa can be any naturally occurring amino acid
XTTEPETEPEDDRGPVVPKHSTFGQSLTQRLHALKLRSPDASPSRAPPSTQEPQSPREGEELKPEDKDPRDPEESKEPKEEKQRRRCKPKKPTRRDASPESPSKKGPIPIRRH

SEQ ID NO: 6075 - protein, 93 aa, Homo sapiens
  SITE 1: note = misc_feature - Xaa can be any naturally occurring amino acid
XVPLAEKRRQMRKEALEKRAQKRAEKKRSKLIDKQLQDEKMGYMCTHRLLLLGAGESGKSTIVKQMRILHVNGFNGEGGEEDPQAARSNSDGI

SEQ ID NO: 6076 - protein, 172 aa, Homo sapiens
MATWALLLLAAMLLGNPGLEVSVSPKGKNTSGRESGFGWAIWMEGLVFSRLSPEYYDLARAHLRDEEKSCPCLAQEGPQGDLLTKTQELGRDYRTCLTIVQKLKKMVDKPTQRSVSNAATRVCRTGRSRWRDVCRNFMRRYQSRVTQGLVAGETAQQICEDLRLCIPSTGPL

SEQ ID NO: 6077 - protein, 145 aa, Homo sapiens
MATWALLLLAAMLLGNPGLVFSRLSPEYYDLARAHLRDEEKSCPCLAQEGPQGDLLTKTQELGRDYRTCLTIVQKLKKMVDKPTQRSVSNAATRVCRTGRSRWRDVCRNFMRRYQSRVTQGLVAGETAQQICEDLRLCIPSTGPL

SEQ ID NO: 6078 - protein, 130 aa, Homo sapiens
MEGLVFSRLSPEYYDLARAHLRDEEKSCPCLAQEGPQGDLLTKTQELGRDYRTCLTIVQKLKKMVDKPTQRSVSNAATRVCRTGRSRWRDVCRNFMRRYQSRVTQGLVAGETAQQICEDLRLCIPSTGPL

SEQ ID NO: 6079 - protein, 187 aa, Homo sapiens
  SITE 1: note = misc_feature - Xaa can be any naturally occurring amino acid
XHLRDEEKSCPCLAQEGPQGDLLTKTQELGRDYRTCLTIVQKLKKMVDKPTQRSVSNAATRVCRTGRSRWRDVCRNFMRRYQSRVTQGLVAGETAQQICEDLRLCIPSTGPTTCSGCRLASRMCLWVPSEPSHLVLWKKHRLLSSDPGNLSNLCRLLASSIQNPLSSLPPLTPSAVLPSHENKVSSK

SEQ ID NO: 6080 - protein, 76 aa, Homo sapiens
MAAGLARLLLLLGLSAGGPAPAGAAKMKVVEEPNAFGVNNPFLPQASRLQAKRDPSPVSETGFHRVSQDGLDLLTS

SEQ ID NO: 6081 - protein, 76 aa, Homo sapiens; identical to SEQ ID NO: 6080

SEQ ID NO: 6082 - protein, 61 aa, Homo sapiens
MAAGLARLLLLLGLSAGGPAPAGAAKMKVVEEPNAFGVNNPFLPQASRLQAKRDPSPVSGE

SEQ ID NO: 6083 - protein, 305 aa, Homo sapiens
MAAGLARLLLLLGLSAGGPAPAGAAKMKVVEEPNAFGVNNPFLPQASRLQAKRDPSPVSGPVHLFRLSGKCFSLVESTYKYEFCPFHNVTQHEQTFRWNAYSGILGIWHEWEIANNTFTGMWMRDGDACRSRSRQSKVELACGKSNRLAHVSEPSTCVYALTFETPLVCHPHALLVYPTLPEALQRQWDQVEQDLADELITPQGHEKLLRTLFEDAGYLKTPEENEPTQLEGGPDSLGFETLENCRKAHKELSKEIKRLKGLLTQHGIPYTRPTETSNLEHLGHETPRAKSPEQLRGDPGLRGSL

SEQ ID NO: 6084 - protein, 185 aa, Homo sapiens
  SITE 1: note = misc_feature - Xaa can be any naturally occurring amino acid
XRLLLLLGLSAGGEWPGRPRPQAPRALCTPASPLTVSLPVGPAPAGAAKMKVVEEPNAFGVNNPFLPQASRLQAKRDPSPVSGPVHLFRLSGKCFSLVESTYKYEFCPFHNVTQHEQTFRWNAYSGILGIWHEWEIANNTFTGMWMRDGDACRSRSRQSKVELACGKSNRLAHVSEPSTCVYALT

SEQ ID NO: 6085 - protein, 92 aa, Homo sapiens
MKPIQKLLAGLILLTWCVEGCSSQHWSYGLRPGGKRDAENLIDSFQEIVKEVGQLAETQRFECTTHQPRSPLRDLKGALESLIEEETGQKKI

SEQ ID NO: 6086 - protein, 92 aa, Homo sapiens; identical to SEQ ID NO: 6085

SEQ ID NO: 6087 - protein, 113 aa, Homo sapiens
MASSRRGLLLLLLLTAHLGPSEAQHWSHGWYPGGKRALSSAQDPQNALRPPAGSPVQTAHGLPSDALAPLDDSMPWEGRTTAQWSLHRKRHLARTLLTAAREPRPAPPSSNKV

SEQ ID NO: 6088 - protein, 113 aa, Homo sapiens; identical to SEQ ID NO: 6087

SEQ ID NO: 6089 - protein, 120 aa, Homo sapiens
MASSRRGLLLLLLLTAHLGPSEAQHWSHGWYPGGKRALSSAQDPQNALRPPGRALDTAAGSPVQTAHGLPSDALAPLDDSMPWEGRTTAQWSLHRKRHLARTLLTAAREPRPAPPSSNKV

SEQ ID NO: 6090 - protein, 112 aa, Homo sapiens
MASSRRGLLLLLLLTAHLGPSEAQHWSHGWYPGGKRALSSAQDPQNALRPPGSPVQTAHGLPSDALAPLDDSMPWEGRTTAQWSLHRKRHLARTLLTAAREPRPAPPSSNKV

SEQ ID NO: 6091 - protein, 496 aa, Homo sapiens
MDNYLLLQTPLKKTKALIGEMGMTFSSAYVPSALCCPSRASILTGKYPHNHHVVNNTLEGNCSSKSWQKIQEPNTFPAILRSMCGYQTFFAGKYLNEYGAPDAGGLEHVPLGWSYWYALEKNSKYYNYTLSINGKARKHGENYSVDYLTDVLANVSLDFLDYKSNFEPFFMMIATPAPHSPWTAAPQYQKAFQNVFAPRNKNFNIHGTNKHWLIRQAKTPMTNSSIQFLDNAFRKRWQTLLSVDDLVEKLVKRLEFTGELNNTYIFYTSDNGYHTGQFSLPIDKRQLYEFDIKVPLLVRGPGIKPNQTSKMLVANIDLGPTILDIAGYDLNKTQMDGMSLLPILRGASNLTWRSDVLVEYQGEGRNVTDPTCPSLSPGVSQCFPDCVCEDAYNNTYACVRTMSALWNLQYCEFDDQEVFVEVYNLTADPDQITNIAKTIDPELLGKMNYRLMMLQSCSGPTCRTPGVFDPGYRFDPRLMFSNRGSVRTRRFSKHLL

SEQ ID NO: 6092 - protein, 248 aa, Homo sapiens
MGMTFSSAYVPSALCCPSRASILTGKYPHNHHVVNNTLEGNCSSKSWQKIQEPNTFPAILRSMCGYQTFFAGKYLNEYGAPDAGGLEHVPLGWSYWYALEKNSKYYNYTLSINGKARKHGENYSVDYLTDVLANVSLDFLDYKSNFEPFFMMIATPAPHSPWTAAPQYQKAFQNVFAPRNKNFNIHGTNKHWLIRQAKTPMTNSSIQFLDNAFRKRWQTLLSVDDLVEKLVKRLEFTGELNNTYIFYT

SEQ ID NO: 6093 - protein, 584 aa, Homo sapiens
MRLLPLAPGRLRRGSPRHLPSCSPALLLLVLGGCLGVFGVAAGTRRPNVVLLLTDDQDEVLGGMAFSEYSTTNCQTGLQGEELGQEHLRTYLEPSRTPLKKTKALIGEMGMTFSSAYVPSALCCPSRASILTGKYPHNHHVVNNTLEGNCSSKSWQKIQEPNTFPAILRSMCGYQTFFAGKYLNEYGAPDAGGLEHVPLGWSYWYALEKNSKYYNYTLSINGKARKHGENYSVDYLTDVLANVSLDFLDYKSNFEPFFMMIATPAPHSPWTAAPQYQKAFQNVFAPRNKNFNIHGTNKHWLIRQAKTPMTNSSIQFLDNAFRKRWQTLLSVDDLVEKLVKRLEFTGELNNTYIFYTSDNGYHTGQFSLPIDKRQLYEFDIKVPLLVRGPGIKPNQTSKMLVANIDLGPTILDIAGYDLNKTQMDGMSLLPILRGASNLTWRSDVLVEYQGEGRNVTDPTCPSLSPGVSQCFPDCVCEDAYNNTYACVRTMSALWNLQYCEFDDQEVFVEVYNLTADPDQITNIAKTIDPELLGKMNYRLMMLQSCSGPTCRTPGVFDPGYRFDPRLMFSNRGSVRTRRFSKHLL

SEQ ID NO: 6094 - protein, 552 aa, Homo sapiens
MRLLPLAPGRLRRGSPRHLPSCSPALLLLVLGGCLGVFGVAAGTRRPNVVLLLTDDQDEVLGGMTPLKKTKALIGEMGMTFSSAYVPSALCCPSRASILTGKYPHNHHVVNNTLEGNCSSKSWQKIQEPNTFPAILRSMCGYQTFFAGKYLNEYGAPDAGGLEHVPLGWSYWYALEKNSKYYNYTLSINGKARKHGENYSVDYLTDVLANVSLDFLDYKSNFEPFFMMIATPAPHSPWTAAPQYQKAFQNVFAPRNKNFNIHGTNKHWLIRQAKTPMTNSSIQFLDNAFRKRWQTLLSVDDLVEKLVKRLEFTGELNNTYIFYTSDNGYHTGQFSLPIDKRQLYEFDIKVPLLVRGPGIKPNQTSKMLVANIDLGPTILDIAGYDLNKTQMDGMSLLPILRGASNLTWRSDVLVEYQGEGRNVTDPTCPSLSPGVSQCFPDCVCEDAYNNTYACVRTMSALWNLQYCEFDDQEVFVEVYNLTADPDQITNIAKTIDPELLGKMNYRLMMLQSCSGPTCRTPGVFDPGYRFDPRLMFSNRGSVRTRRFSKHLL

SEQ ID NO: 6095 - protein, 532 aa, Homo sapiens
MRLLPLAPGRLRRGSPRHLPSCSPALLLLVLGGCLGVFGVAAGTRRPNVVLLLTDDQDEVLGGMYVPSALCCPSRASILTGKYPHNHHVVNNTLEGNCSSKSWQKIQEPNTFPAILRSMCGYQTFFAGKYLNEYGAPDAGGLEHVPLGWSYWYALEKNSKYYNYTLSINGKARKHGENYSVDYLTDVLANVSLDFLDYKSNFEPFFMMIATPAPHSPWTAAPQYQKAFQNVFAPRNKNFNIHGTNKHWLIRQAKTPMTNSSIQFLDNAFRKRWQTLLSVDDLVEKLVKRLEFTGELNNTYIFYTSDNGYHTGQFSLPIDKRQLYEFDIKVPLLVRGPGIKPNQTSKMLVANIDLGPTILDIAGYDLNKTQMDGMSLLPILRGASNLTWRSDVLVEYQGEGRNVTDPTCPSLSPGVSQCFPDCVCEDAYNNTYACVRTMSALWNLQYCEFDDQEVFVEVYNLTADPDQITNIAKTIDPELLGKMNYRLMMLQSCSGPTCRTPGVFDPGYRFDPRLMFSNRGSVRTRRFSKHLL

SEQ ID NO: 6096 - protein, 303 aa, Homo sapiens
  SITE 1: note = misc_feature - Xaa can be any naturally occurring amino acid
XYNYTLSINGKARKHGENYSVDYLTDVLANVSLDFLDYKSNFEPFFMMIATPAPHSPWTAAPQYQKAFQNVFAPRNKNFNIHGTNKHWLIRQAKTPMTNSSIQFLDNAFRKRWQTLLSVDDLVEKLVKRLEFTGELNNTYIFYTSDNGYHTGQFSLPIDKRQLYEFDIKVPLLVRGPGIKPNQTSKRGASNLTWRSDVLVEYQGEGRNVTDPTCPSLSPGVSQCFPDCVCEDAYNNTYACVRTMSALWNLQYCEFDDQEVFVEVYNLTADPDQITNIAKTIDPELLGKMNYRLMMLQSCSGPT

SEQ ID NO: 6097 - protein, 80 aa, Homo sapiens
MMGLGNGRRSMKSPPLVLAALVACIIVLGFNYWIASSRSVDLQTRIMELEGRVRRAAAERGAVELKKNEFQGELEKQREQ

SEQ ID NO: 6098 - protein, 121 aa, Homo sapiens
MMGLGNGRRSMKSPPLVLAALVACIIVLGFNYWIASSRSVDLQTRIMELEGRVRRAAAERGAVELKKNEFQGELEKQREQLDKIQSSHNFQLESVNKLYQDEKAVLVNNITTGERLIRVLQ

SEQ ID NO: 6099 - protein, 401 aa, Homo sapiens
MMGLGNGRRSMKSPPLVLAALVACIIVLGFNYWIASSRSVDLQTRIMELEGRVRRAAAERGAVELKKNEFQGELEKQREQLDKIQSSHNFQLESVNKLYQDEKAVLVNNITTGERLIRVLQDQLKTLQRNYGRLQQDVLQFQKNQTNLERKFSYDLSQCINQMKEVKEQCEERIEEVTKKGNEAVASRDLSENNDQRQQLQALSEPQPRLQAAGLPHTEVPQGKGNVLGNSKSQTPAPSSEVVLDSKRQVEKEETNEIQVVNEEPQRDRLPQEPGREQVVEDRPVGGRGFGGAGELGQTPQVQAALSVSQENPEMEGPERDQLVIPDGQEEEQEAAGEGRNQQKLRGEDDYNMDENEAESETDKQAALAGNDRNIDVFNVEDQKRDTINLLDQREKRNHTL

SEQ ID NO: 6100 - protein, 401 aa, Homo sapiens; identical to SEQ ID NO: 6099

SEQ ID NO: 6101 - protein, 105 aa, Homo sapiens
MMGLGNGRRSMKSPPLVLAALVACIIVLGFNYWIASSRSVDLQTRIMELEGRVRRAAAERGAVELKKNEFQGELEKQREQLDKIQSSHNFQLESVNKLYQDEKTS

SEQ ID NO: 6102 - protein, 246 aa, Homo sapiens
MSWAAVLAVAAARFGHFWGCRWPGPMAQGWAGFSEEELRRLKQTKDPFEPQRRLPAKKSRQQLQREKALVEQSQKLGLQDGSTSLLPEQLLSAPKQRVNVQKPPFSSPTLPSHFTLTSPVGDGQPQGIESQPKELGLENSHDGHNNVEILPPKPDCKLEKKKVELQEKSRWEVLQQEQRLMEEKNKRKKALLAKAIAERSKRTQAETMKLKRIQKELQALDDMVSADIGILRNRIDQASLDYSYAR

SEQ ID NO: 6103 - protein, 394 aa, Homo sapiens
MSWAAVLAVAAARFGHFWGCRWPGPMAQGWAGFSEEELRRLKQTKDPFEPQRRLPAKKSRQQLQREKALVEQSQKLGLQDGSTSLLPEQLLSAPKQRVNVQKPPFSSPTLPSHFTLTSPVGDGQPQGIESQPKELGLENSHDGHNNVEILPPKPDCKLEKKKVELQEKSRWEVLQQEQRLMEEKNKRKKALLAKAIAERSKRTQAETMKLKRIQKELQALDDMVSADIGILRNRIDQASLDYSYARKRFDRAEAEYIAAKLDIQRKTEIKEQLTEHLCTIIQQNELRKAKKLEELMQQLDVEADEETLELEVEVERLLHEQEVESRRPVVRLERPFQPAEESVTLEFAKENRKCQEQAVSPKVDDQCGNSSSIPFLSPNCPNQEGNDISAALAT

SEQ ID NO: 6104 - protein, 126 aa, Homo sapiens
  SITE 1: note = misc_feature - Xaa can be any naturally occurring amino acid
XSWAAVLAVAAARFGHFWGCRWPGPMAQGWAGFSEEELRRLKQTKGYKCPGLWSDSSRLMRRQTTKLCDSRYCKNLLQRQEEPHSAGDWMELGKISQSLCVSRGAFSRTKEKSTKDMNRYFLEKEI

SEQ ID NO: 6105 - protein, 59 aa, Homo sapiens
MALLHSGRVLPGIAAAFHPGLAAAASARARQRPRLPQKIWTRNTCPLGDWLNFARHLQN

SEQ ID NO: 6106 - protein, 430 aa, Homo sapiens
MALLHSGRVLPGIAAAFHPGLAAAASARASSWWTHVEMGPPDPILGVTEAFKRDTNSKKMNLGVGAYRDDNGKPYVLPSVRKAEAQIAAKNLDKEYLPIGGLAEFCKASAELALGENSEVLKSGRFVTVQTISGTGALRIGASFLQRFFKFSRDVFLPKPTWGNHTPIFRDAGMQLQGYRYYDPKTCGFDFTGAVEDISKIPEQSVLLLHACAHNPTGVDPRPEQWKEIATVVKKRNLFAFFDMAYQGFASGDGDKDAWAVRHFIEQGINVCLCQSYAKNMGLYGERVGAFTMVCKDADEAKRVESQLKILIRPMYSNPPLNGARIAAAILNTPDLRKQWLQEVKVMADRIIGMRTQLVSNLKKEGSTHNWQHITDQIGMFCFTGLKPEQVERLIKEFSIYMTKDGRISVAGVTSSNVGYLAHAIHQVTK

SEQ ID NO: 6107 - protein, 387 aa, Homo sapiens
MALLHSGRVLPGIAAAFHPGLAAAASARASSWWTHVEMGPPDPILGVTEAFKRDTNSKKMNLGVGAYRDDNGKPYVLPSVRKFVTVQTISGTGALRIGASFLQRFFKFSRDVFLPKPTWGNHTPIFRDAGMQLQGYRYYDPKTCGFDFTGAVEDISKIPEQSVLLLHACAHNPTGVDPRPEQWKEIATVVKKRNLFAFFDMAYQGFASGDGDKDAWAVRHFIEQGINVCLCQSYAKNMGLYGERVGAFTMVCKDADEAKRVESQLKILIRPMYSNPPLNGARIAAAILNTPDLRKQWLQEVKVMADRIIGMRTQLVSNLKKEGSTHNWQHITDQIGMFCFTGLKPEQVERLIKEFSIYMTKDGRISVAGVTSSNVGYLAHAIHQVTK

SEQ ID NO: 6108 - protein, 145 aa, Homo sapiens
MPHLMERMVGSGLLWLALVSCILTQASAVQRDPSTVEDKCEKACRPEEECLALNSTWGCFCRQDLNSSDVHSLQPQLDCGPREIKVKVDKCLLGGLGLGEEVIAYLRDPNCSSILQTEERNWVSVTSPVQASACRNILERNQTHA

SEQ ID NO: 6109 - protein, 387 aa, Homo sapiens
MPHLMERMVGSGLLWLALVSCILTQASAVQRDPSTVEDKCEKACRPEEECLALNSTWGCFCRQDLNSSDVHSLQPQLDCGPREIKVKVDKCLLGGLGLGEEVIAYLRDPNCSSILQTEERNWVSVTSPVQASACRNILERNQTHAIYKNTLSLVNDFIIRDTILNINFQCAYPLDMKVSLQAALQPIVSSLNVSVDGNGEFIVRMALFQDQNYTNPYEGDAVELSVESVLYVGAILEQGDTSRFNLVLRNCYATPTEDKADLVKYFIIRNSCSNQRDSTIHVEENGQSSESRFSVQMFMFAGHYDLVFLHCEIHLCDSLNEQCQPSCSRSQVRSEVPAIDLARVLDLGPITRRGAQSPGVMNGTPSTAGFLVAWPMVLLTVLLAWLF

SEQ ID NO: 6110 - protein, 163 aa, Homo sapiens
MPHLMERMVGSGLLWLALVSCILTQASAVQRGEGGVRMSETCVQVHRCQTDAPMWLNGTHPALGDGITNHTACAHWSGNCCFWKTEVLVKACPGGYHVYRLEGTPWCNLRYCTDPSTVEDKCEKACRPEEECLALNSTWGCFCRQDLNSSDVHSLQPQLDCGP

SEQ ID NO: 6111 - protein, 128 aa, Homo sapiens
MPHLMERMVGSGLLWLALVSCILTQASAVQRGYGNPIEASSYGLDLDCGAPGTPEAHVCFDPCQNYTLLDEPFRSTENSAGSQGCDKNMSGWYRFVGEGGVRMSETCVQVHRCQTDAPMWLNGTHPAL

SEQ ID NO: 6112 - protein, 534 aa, Homo sapiens
MPHLMERMVGSGLLWLALVSCILTQASAVQRGYGNPIEASSYGLDLDCGAPGTPEAHVCFDPCQNYTLLDEPFRSTENSAGSQGCDKNMSGWYRFVGEGGVRMSETCVQVHRCQTDAPMWLNGTHPALGDGITNHTACAHWSGNCCFWKTEVLVKACPGGYHVYRLEGTPWCNLRYCTDPSTVEDKCEKACRPEEECLALNSTWGCFCRQDLNSSDVHSLQPQLDCGPREIKVKVDKCLLGGLGLGEEVIAYLRDPNCSSILQTEERNWVSVTSPVQASACRNILERNQTHAIYKNTLSLVNDFIIRDTILNINFQCAYPLDMKVSLQAALQPIVSSLNVSVDGNGEFIVRMALFQDQNYTNPYEGDAVELSVESVLYVGAILEQGDTSRFNLVLRNCYATPTEDKADLVKYFIIRNSCSNQRDSTIHVEENGQSSESRFSVQMFMFAGHYDLVFLHCEIHLCDSLNEQCQPSCSRSQVRSEVPAIDLARVLDLGPITRRGAQSPGVMNGTPSTAGFLVAWPMVLLTVLLAWLF

SEQ ID NO: 6113 - protein, 537 aa, Homo sapiens
MPHLMERMVGSGLLWLALVSCILTQASAVQRGYGNPIEASSYGLDLDCGAPGTPEAHVCFDPCQNYTLLDEPFRSTENSAGSQGCDKNMSGWYRFVGEGGVRMSETCVQVHRCQTDAPMWLNGTHPALGDGITNHTACAHWSGNCCFWKTEVLVKACPGGYHVYRLEGTPWCNLRYCTVPRDPSTVEDKCEKACRPEEECLALNSTWGCFCRQDLNSSDVHSLQPQLDCGPREIKVKVDKCLLGGLGLGEEVIAYLRDPNCSSILQTEERNWVSVTSPVQASACRNILERNQTHAIYKNTLSLVNDFIIRDTILNINFQCAYPLDMKVSLQAALQPIVSSLNVSVDGNGEFIVRMALFQDQNYTNPYEGDAVELSVESVLYVGAILEQGDTSRFNLVLRNCYATPTEDKADLVKYFIIRNSCSNQRDSTIHVEENGQSSESRFSVQMFMFAGHYDLVFLHCEIHLCDSLNEQCQPSCSRSQVRSEVPAIDLARVLDLGPITRRGAQSPGVMNGTPSTAGFLVAWPMVLLTVLLAWLF

SEQ ID NO: 6114 - protein, 390 aa, Homo sapiens
MPHLMERMVGSGLLWLALVSCILTQASAVQRVPRDPSTVEDKCEKACRPEEECLALNSTWGCFCRQDLNSSDVHSLQPQLDCGPREIKVKVDKCLLGGLGLGEEVIAYLRDPNCSSILQTEERNWVSVTSPVQASACRNILERNQTHAIYKNTLSLVNDFIIRDTILNINFQCAYPLDMKVSLQAALQPIVSSLNVSVDGNGEFIVRMALFQDQNYTNPYEGDAVELSVESVLYVGAILEQGDTSRFNLVLRNCYATPTEDKADLVKYFIIRNSCSNQRDSTIHVEENGQSSESRFSVQMFMFAGHYDLVFLHCEIHLCDSLNEQCQPSCSRSQVRSEVPAIDLARVLDLGPITRRGAQSPGVMNGTPSTAGFLVAWPMVLLTVLLAWLF

SEQ ID NO: 6115 - protein, 141 aa, Homo sapiens
MSGWYRFVGEGGVRMSETCVQVHRCQTDAPMWLNGTHPALGDGITNHTACAHWSGNCCFWKTEVLVKACPGGYHVYRLEGTPWCNLRYCTDPSTVEDKCEKACRPEEECLALNSTWGCFCRQDLNSSDVHSLQPQLDCGPR

SEQ ID NO: 6116 - protein, 42 aa, Homo sapiens
  SITE 1: note = misc_feature - Xaa can be any naturally occurring amino acid
XERMVGSGLLWLALVSCILTQASAVQRGKYSAHLASQMSRKT

SEQ ID NO: 6117 - protein, 117 aa, Homo sapiens
MKRSLAGRYRCSYQNGSLWSLPSDQLELVATGVFAKPSLSAQPGPAVSSGGDVTLQCQTRYGFDQFALYKEGDPAPYKNPERWYRASFPIITVTAAHSGTYRCYSFSSRDPYLWSAP

SEQ ID NO: 6118 - protein, 321 aa, Homo sapiens
MSPSPTALFCLGLCLGRVPAQSGPLPKPSLQALPSSLVPLEKPVTLRCQGPPGVDLYRLEKLSSSRYQDQAVLFIPAMKRSLAGRYRCSYQNGSLWSLPSDQLELVATGVFAKPSLSAQPGPAVSSGGDVTLQCQTRYGFDQFALYKEGDPAPYKNPERWYRASFPIITVTAAHSGTYRCYSFSSRDPYLWSAPSDPLELVVTEFSEATAELTVSFTNEVFTTETSRSITASPKESDSPAGPARQYYTKGNLVRICLGAVILIILAGFLAEDWHSRRKRLRHRGRAVQRPLPPLPPLPLTRKSNGGQDGGRQDVHSRGLCS

SEQ ID NO: 6119 - protein, 620 aa, Homo sapiens
MSPSPTALFCLGLCLGRVPAQSGPLPKPSLQALPSSLVPLEKPVTLRCQGPPGVDLYRLEKLSSSRYQDQAVLFIPAMKRSLAGRYRCSYQNGSLWSLPSDQLELVATGVFAKPSLSAQPGPAVSSGGDVTLQCQTRYGFDQFALYKEGDPAPYKNPERWYRASFPIITVTAAHSGTYRCYSFSSRDPYLWSAPSDPLELVVTGTSVTPSRLPTEPPSPVAEFSEATAELTVSFTNEVFTTETSRSITASPKESDSPAGESCPPVLHQGQPGPDMPRGCDPNNPGGVSGRGLAQPEEAPAAQGQGCAEAASAPPAPPADPEIKRGSGWRPTGCSQPRVMFMTAEPQARSYPREGSWHGRRLKDWRVWSVEAGGQRLQLWKRGHAASSWCSIREPFGQCLSVCLPLCLRAPSIWDGRNLWRPHPPPCTLWMTWYPGWTTYWPLSSTSLIWAPDGSLRFPALRVDSVPSSVQNPPVLPFGPLCSCLVFPRNSHPHSISHCGLTNLLSSLRTGLAGSLGMSFIFLSVKLARCPLPFTLENKISLCNMVKPHLYQQNKKTQKLARCGGASLYSQQLRGLRWENGLSLGGRGCSELRSHHCTLARVTKPDFVSKNTGMNMSITLI

SEQ ID NO: 6120 - protein, 339 aa, Homo sapiens
MSPSPTALFCLGLCLGRVPAQSGPLPKPSLQALPSSLVPLEKPVTLRCQGPPGVDLYRLEKLSSSRYQDQAVLFIPAMKRSLAGRYRCSYQNGSLWSLPSDQLELVATGVFAKPSLSAQPGPAVSSGGDVTLQCQTRYGFDQFALYKEGDPAPYKNPERWYRASFPIITVTAAHSGTYRCYSFSSRDPYLWSAPSDPLELVVTGTSVTPSRLPTEPPSPVAEFSEATAELTVSFTNEVFTTETSRSITASPKESDSPAGPARQYYTKGNLVRICLGAVILIILAGFLAEDWHSRRKRLRHRGRAVQRPLPPLPPLPLTRKSNGGQDGGRQDVHSRGLCS

SEQ ID NO: 6121 - protein, 134 aa, Homo sapiens
MSALRPLLLLLLPLCPGPGPGPGSEAKVTRSCAETRQVLGARGYSLNLIPPALISGEHLRVCPQEYTCCSSETEQRLIRETEATFRGLVEDSGSFLVHTLAARHRKFDDNPDPGGCPSLCAGPGDWKKCGQRSA

SEQ ID NO: 6122 - protein, 579 aa, Homo sapiens
MSALRPLLLLLLPLCPGPGPGPGSEAKVTRSCAETRQVLGARGYSLNLIPPALISGEHLRVCPQEYTCCSSETEQRLIRETEATFRGLVEDSGSFLVHTLAARHRKFDEFFLEMLSVAQHSLTQLFSHSYGRLYAQHALIFNGLFSRLRDFYGESGEGLDDTLADFWAQLLERVFPLLHPQYSFPPDYLLCLSRLASSTDGSLQPFGDSPRRLRLQITRTLVAARAFVQGLETGRNVVSEALKVPVSEGCSQALMRLIGCPLCRGVPSLMPCQGFCLNVVRGCLSSRGLEPDWGNYLDGLLILADKLQGPFSFELTAESIGVKISEGLMYLQENSAKVSAQVFQECGPPDPVPARNRRAPPPREEAGRLWSMVTEEERPTTAAGTNLHRLVWELRERLARMRGFWARLSLTVCGDSRMAADASLEAAPCWTGAGRGRYLPPVVGGSPAEQVNNPELKVDASGPDVPTRRRRLQLRAATARMKTAALGHDLDGQDADEDASGSGGGQQYADDWMAGAVAPPARPPRPPYPPRRDGSGGKGGGGSARYNQGRSRSGGASIGFHTQTILILSLSALALLGPR

SEQ ID NO: 6123 - protein, 320 aa, Homo sapiens [sequence omitted]

SEQ ID NO: 6124 - protein, 572 aa, Homo sapiens
MDAQTWPVGFRCLLLLALVGSARSEGVQTCEEVRKLFQWRLLGAVRGLPDSPRAGPDLQVCISKKPTCCTRKMEERYQIAARQDMQQFLQTSSSTLKFLISRNAAAFQETLETLIKQAENYTSILFCSTYRNMALEAAASVQEFFTDVGLYLFGADVNPEEFVNRFFDSLFPLVYNHLINPGVTDSSLEYSECIRMARRDVSPFGNIPQRVMGQMGRSLLPSRTFLQALNLGIEVINTTDYLHFSKECSRALLKMQYCPHCQGLALTKPCMGYCLNVMRGCLAHMAELNPHWHAYIRSLEELSDAMHGTYDIGHVLLNFHLLVNDAVLQAHLNGQKLLEQVNRICGRPVRTPTQSPRCSFDQSKEKHGMKTTTRNSEETLANRRKEFINSLRLYRSFYGGLADQLCANELAAADGLPCWNGEDIVKSYTQRVVGNGIKAQSGNPEVKVKGIDPVINQIIDKLKHVVQLLQGRSPKPDKWELLQLGSGGGMVEQVSGDCDDEDGCGGSGSGEVKRTLKITDWMPDDMNFSDVKQIHQTDTGSTLDTTGAGCAVATESMTFTLISVVMLLPGIW

SEQ ID NO: 6125 - protein, 51 aa, Homo sapiens
  SITE 1: note = misc_feature - Xaa can be any naturally occurring amino acid
XMPDDMNFSDVKQIHQTDTGSTLDTTGAGCAVATESMTFTLISVVMLLPGI

SEQ ID NO: 6126 - protein, 263 aa, Homo sapiens
DAMLLVAERLEGPFNIESVMDPIDVKISEAIMNMQENSMQVSAKVFQGCGQPKPAPALRSARSAPENFNTRFRPYNPEERPTTAAGTSLDRLVTDIKEKLKLSKKVWSALPYTICKDESVTAGTSNEEECWNGHSKARYLPEIMNDGLTNQINNPEVDVDITRPDTFIRQQIMALRVMTNKLKNAYNGNDVNFQDTSDESSGSGSGSGCMDDVCPTEFEFVTTEAPAVDPDRREVDSSAAQRGHSLLSWSLTCIVLALQRLCR

SEQ ID NO: 6127 - protein, 555 aa, Homo sapiens
MPSWIGAVILPLLGLLLSLPAGADVKARSCGEVRQAYGAKGFSLADIPYQEIAGEHLRICPQEYTCCTTEMEDKLSQQSKLEFENLVEETSHFVRTTFVSRHKKFDEFFRELLENAEKSLNDMFVRTYGMLYMQNSEVFQDLFTELKRYYTGGNVNLEEMLNDFWARLLERMFQLINPQYHFSEDYLECVSKYTDQLKPFGDVPRKLKIQVTRAFIAARTFVQGLTVGREVANRVSKVSPTPGCIRALMKMLYCPYCRGLPTVRPCNNYCLNVMKGCLANQADLDTEWNLFIDAMLLVAERLEGPFNIESVMDPIDVKISEAIMNMQENSMQVSAKVFQGCGQPKPAPALRSARSAPENFNTRFRPYNPEERPTTAAGTSLDRLVTDIKEKLKLSKKVWSALPYTICKDESVTAGTSNEEECWNGHSKARYLPEIMNDGLTNQINNPEVDVDITRPDTFIRQQIMALRVMTNKLKNAYNGNDVNFQDTSDESSGSGSGSGCMDDVCPTEFEFVTTEAPAVDPDRREVDSSAAQRGHSLLSWSLTCIVLALQRLCR

SEQ ID NO: 6128 - protein, 109 aa, Homo sapiens
MAFQKAVKGTILVGGGALATVLGLSQFAHYRRKQMNLAYVKAADCISEPVNREPPSREAQLLTLQNTSEFDILVIGGGATGSGCALDAVTRGLKTALVERDDFSSGTSS

SEQ ID NO: 6129 - protein, 727 aa, Homo sapiens
MAFQKAVKGTILVGGGALATVLGLSQFAHYRRKQMNLAYVKAADCISEPVNREPPSREAQLLTLQNTSEFDILVIGGGATGSGCALDAVTRGLKTALVERDDFSSGTSSRSTKLIHGGVRYLQKAIMKLDIEQYRMVKEALHERANLLEIAPHLSAPLPIMLPVYKWWQLPYYWVGIKLYDLVAGSNCLKSSYVLSKSRALEHFPMLQKDKLVGAIVYYDGQHNDARMNLAIALTAARYGAATANYMEVVSLLKKTDPQTGKVRVSGARCKDVLTGQEFDVRAKCVINATGPFTDSVRKMDDKDAAAICQPSAGVHIVMPGYYSPESMGLLDPATSDGRVIFFLPWQKMTIAGTTDTPTDVTHHPIPSEEDINFILNEVRNYLSCDVEVRRGDVLAAWSGIRPLVTDPKSADTQSISRNHVVDISESGLITIAGGKWTTYRSMAEDTINAAVKTHNLKAGPSRTVGLFLQGGKDWSPTLYIRLVQDYGLESEVAQHLAATYGDKAFEVAKMASVTGKRWPIVGVRLVSEFPYIEAEVKYGIKEYACTAVDMISRRTRLAFLNVQAAEEALPRIVELMGRELNWDDYKKQEQLETARKFLYYEMGYKSRSEQLTDRSEISLLPSDIDRYKKRFHKFDADQKGFITIVDVQRVLESINVQMDENTLHEILNEVDLNKNGQVELNEFLQLMSAIQKGRVSGSRLAILMKTAEENLDRRVPIPVDRSCGGL

SEQ ID NO: 6130 - protein, 727 aa, Homo sapiens; identical to SEQ ID NO: 6129

SEQ ID NO: 6131 - protein, 727 aa, Homo sapiens; identical to SEQ ID NO: 6129

SEQ ID NO: 6132 - protein, 727 aa, Homo sapiens; identical to SEQ ID NO: 6129

SEQ ID NO: 6133 - protein, 379 aa, Homo sapiens
MAFQKAVKGTILVGGGALATVLGLSQFAHYRRKQMNLAYVKAADCISEPVNREPPSREAQLLTLQNTSEFDILVIGGGATGSGCALDAVTRGLKTALVERDDFSSGTSSRSTKLIHGGVRYLQKAIMKLDIEQYRMVKEALHERANLLEIAPHLSAPLPIMLPVYKWWQLPYYWVGIKLYDLVAGSNCLKSSYVLSKSRALEHFPMLQKDKLVGAIVYYDGQHNDARMNLAIALTAARYGAATANYMEVVSLLKKTDPQTGKVRVSGARCKDVLTGQEFDVRAKCVINATGPFTDSVRKMDDKDAAAICQPSAGVHIVMPGYYSPESMGLLDPATSDGRVIFFLPWQKMTIAGTTDTPTDVTHHPIPSEEDINFILNEV

SEQ ID NO: 6134 - protein, 56 aa, Homo sapiens
MAFQKAVKGTILVGGGALATVLGLSQFAHYRRKQNIVLSGELRNEECILLRKCGKT

SEQ ID NO: 6135 - protein, 56 aa, Homo sapiens; identical to SEQ ID NO: 6134

SEQ ID NO: 6136 - protein, 601 aa, Homo sapiens
MKLDIEQYRMVKEALHERANLLEIAPHLSAPLPIMLPVYKWWQLPYYWVGIKLYDLVAGSNCLKSSYVLSKSRALEHFPMLQKDKLVGAIVYYDGQHNDARMNLAIALTAARYGAATANYMEVVSLLKKTDPQTGKVRVSGARCKDVLTGQEFDVRAKCVINATGPFTDSVRKMDDKDAAAICQPSAGVHIVMPGYYSPESMGLLDPATSDGRVIFFLPWQKMTIAGTTDTPTDVTHHPIPSEEDINFILNEVRNYLSCDVEVRRGDVLAAWSGIRPLVTDPKSADTQSISRNHVVDISESGLITIAGGKWTTYRSMAEDTINAAVKTHNLKAGPSRTVGLFLQGGKDWSPTLYIRLVQDYGLESEVAQHLAATYGDKAFEVAKMASVTGKRWPIVGVRLVSEFPYIEAEVKYGIKEYACTAVDMISRRTRLAFLNVQAAEEALPRIVELMGRELNWDDYKKQEQLETARKFLYYEMGYKSRSEQLTDRSEISLLPSDIDRYKKRFHKFDADQKGFITIVDVQRVLESINVQMDENTLHEILNEVDLNKNGQVELNEFLQLMSAIQKGRVSGSRLAILMKTAEENLDRRVPIPVDRSCGGL

SEQ ID NO: 6137 - protein, 73 aa, Homo sapiens
MDVTSQARGVGLEMYPGTAQPAAPNTTSPELNLSHPLLGTALANGTGELSEHQQYVIGLFLSCLYTIFLFPIG

SEQ ID NO: 6138 - protein, 375 aa, Homo sapiens
MDVTSQARGVGLEMYPGTAQPAAPNTTSPELNLSHPLLGTALANGTGELSEHQQYVIGLFLSCLYTIFLFPIGFVGNILILVVNISFREKMTIPDLYFINLAVADLILVADSLIEVFNLHERYYDIAVLCTFMSLFLQVNMYSSVFFLTWMSFDRYIALARAMRCSLFRTKHHARLSCGLIWMASVSATLVPFTAVHLQHTDEACFCFADVREVQWLEVTLGFIVPFAIIGLCYSLIVRVLVRAHRHRGLRPRRQKALRMILAVVLVFFVCWLPENVFISVHLLQRTQPGAAPCKQSFRHAHPLTGHIVNLAAFSNSCLNPLIYSFLGETFRDKLRLYIEQKTNLPALNRFCHAALKAVIPDSTEQSDVRFSSAV

SEQ ID NO: 6139 - protein, 375 aa, Homo sapiens; identical to SEQ ID NO: 6138

SEQ ID NO: 6140 - protein, 375 aa, Homo sapiens; identical to SEQ ID NO: 6138

SEQ ID NO: 6141 - protein, 375 aa, Homo sapiens; identical to SEQ ID NO: 6138

SEQ ID NO: 6142 - protein, 408 aa, Homo sapiens
MDVTSQARGVGLEMYPGTAQPAAPNTTSPELNLSHPLLGTALANGTGELSEHQQYVIGLFLSCLYTIFLFPIGFVGNILILVVNISFREKMTIPDLYFINLAVADLILVADSLIEVFNLHERYYDIAVLCTFMSLFLQVNMYSSVFFLTWMSFDRYIALARAMRCSLFRTKHHARLSCGLIWMASVSATLVPFTAVHLQHTDEACFCFADVREVQWLEVTLGFIVPFAIIGLCYSLIVRVLVRAHRHRGLRPRRQKALRMILAVVLVFFVCWLPENVFISVHLLQRTQPGAAPCKQSFRHAHPLTHGHVMSLNCGQMWLLAPRGLARVTLAWSPWGCLGNLTTGHLALLTQNCYNPKALAPQGPKASGDQPVTQLLPANPACRCTCLPLQETFLTPSTRKATRRGHCG

SEQ ID NO: 6143 - protein, 176 aa, Homo sapiens
MSLNCGQMWLLAPRGLARVTLAWSPWGCLGNLTTGHLALLTQNCYNPKALAPQGPKASGDQPVTQLLPANPACRCTCLPLQETFLSVLHLPGWQQWRCAASPGPRGAAALGPEQQEGPSVERPPSAPGWFSHCLLTSTWQLHSCGLGPCELPCGLVGCQDNEILQHLWLTNLFLQK

SEQ ID NO: 6144 - protein, 129 aa, Homo sapiens
MPMASPQTLVLYLLVLAVTEAWGQEAVIPGCHLHPFNVTVRSDRQGTCQGSHVAQACVGHCESSAFPSRYSVLVASGYRHNITSVSQCCTISGLKKVKVQLQCVGSRREELEIFTARACQCDMCRLSRY

SEQ ID NO: 6145 - protein, 129 aa, Homo sapiens; identical to SEQ ID NO: 6144

SEQ ID NO: 6146 - protein, 118 aa, Homo sapiens
MPMASPQTLVLYLLVLAVTEAWGQEAVIPGCHLHPFNVTVRSDRQGTCQGSHVAQACVGHCESSAFPSRYSVLVASGYRHNITSVSQCCTISGLKKVRRARARWMDAGVAGRPERWRS

SEQ ID NO: 6147 - protein, 130 aa, Homo sapiens
MKLAFLFLGPMALLLLAGYGCVLGASSGNLRTFVGCAVREFTFLAKKPGCRGLRITTDACWGRCETWEKPILEPPYIEAHHRVCTYNETKQVTVKLPNCAPGVDPFYTYPVAIRCDCGACSTATTECETI

SEQ ID NO: 6148 - protein, 130 aa, Homo sapiens; identical to SEQ ID NO: 6147

SEQ ID NO: 6149 - protein, 184 aa, Homo sapiens
MKALGAVLLALLLFGRPGRGQTQQEEEEEDEDHGPDDYDEEDEDEVEEEETNRLPGGRSRVLLRCYTCKSLPRDERCNLTQNCSHGQTCTTLIAHGNTESGLLTTHSTWCTDSCQPITKTVEGTQVTMTCCQSSLCNVPPWQSSRVQDPTGKGAGGPRGSSETVGAALLLNLLAGLGAMGARRP

SEQ ID NO: 6150 - protein, 840 aa, Homo sapiens
MSAFRLWPGLLIMLGSLCHRGSPCGLSTHVEIGHRALEFLQLHNGRVNYRELLLEHQDAYQAGIVFPDCFYPSICKGGKFHDVSESTHWTPFLNASVHYIRENYPLPWEKDTEKLVAFLFGITSHMAADVSWHSLGLEQGFLRTMGAIDFHGSYSEAHSAGDFGGDVLSQFEFNFNYLARRWYVPVKDLLGIYEKLYGRKVITENVIVDCSHIQFLEMYGEMLAVSKLYPTYSTKSPFLVEQFQEYFLGGLDDMAFWSTNIYHLTSFMLENGTSDCNLPENPLFIACGGQQNHTQGSKMQKNDFHRNLTTSLTESVDRNINYTERGVFFSVNSWTPDSMSFIYKALERNIRTMFIGGSQLSQKHVSSPLASYFLSFPYARLGWAMTSADLNQDGHGDLVVGAPGYSRPGHIHIGRVYLIYGNDLGLPPVDLDLDKEAHRILEGFQPSGRFGSALAVLDFNVDGVPDLAVGAPSVGSEQLTYKGAVYVYFGSKQGGMSSSPNITISCQDIYCNLGWTLLAADVNGDSEPDLVIGSPFAPGGGKQKGIVAAFYSGPSLSDKEKLNVEAANWTVRGEEDFSWFGYSLHGVTVDNRTLLLVGSPTWKNASRLGHLLHIRDEKKSLGRVYGYFPPNGQSWFTISGDKAMGKLGTSLSSGHVLMNGTLKQVLLVGAPTYDDVSKVAFLTVTLHQGGATRMYALTSDAQPLLLSTFSGDRRFSRFGGVLHLSDLDDDGLDEIIMAAPLRIADVTSGLIGGEDGRVYVYNGKETTLGDMTGKCKSWITPCPEEKAQYVLISPEASSRFGSSLITVRSKAKNQVVIAAGRSSLGARLSGALHVYSLGSD

SEQ ID NO: 6151 - protein, 560 aa, Homo sapiens
MECLYYFLGFLLLAARLPLDAAKRFHDVLGNERPSAYMREHNQLNGWSSDENDWNEKLYPVWKRGDMRWKNSWKGGRVQAVLTSDSPALVGSNITFAVNLIFPRCQKEDANGNIVYEKNCRNEAGLSADPYVYNWTAWSEDSDGENGTGQSHHNVFPDGKPFPHHPGWRRWNFIYVFHTLGQYFQKLGRCSVRVSVNTANVTLGPQLMEVTVYRRHGRAYVPIAQVKDVYVVTDQIPVFVTMFQKNDRNSSDETFLKDLPIMFDVLIHDPSHFLNYSTINYKWSFGDNTGLFVSTNHTVNHTYVLNGTFSLNLTVKAAAPGPCPPPPPPPRPSKPTPSLGPAGDNPLELSRIPDENCQINRYGHFQATITIVEGILEVNIIQMTDVLMPVPWPESSLIDFVVTCQGSIPTEVCTIISDPTCEITQNTVCSPVDVDEMCLLTVRRTFNGSGTYCVNLTLGDDTSLALTSTLISVPDRDPASPLRMANSALISVGCLAIFVTVISLLVYKKHKEYNPIENSPGNVVRSKGLSVFLNRAKAVFFPGNQEKDPLLKNQEFKGVS

SEQ ID NO: 6152 - protein, 572 aa, Homo sapiens
MECLYYFLGFLLLAARLPLDAAKRFHDVLGNERPSAYMREHNQLNGWSSDENDWNEKLYPVWKRGDMRWKNSWKGGRVQAVLTSDSPALVGSNITFAVNLIFPRCQKEDANGNIVYEKNCRNEAGLSADPYVYNWTAWSEDSDGENGTGQSHHNVFPDGKPFPHHPGWRRWNFIYVFHTLGQYFQKLGRCSVRVSVNTANVTLGPQLMEVTVYRRHGRAYVPIAQVKDVYVVTDQIPVFVTMFQKNDRNSSDETFLKDLPIMFDVLIHDPSHFLNYSTINYKWSFGDNTGLFVSTNHTVNHTYVLNGTFSLNLTVKAAAPGPCPPPPPPPRPSKPTPSLATTLKSYDSNTPGPAGDNPLELSRIPDENCQINRYGHFQATITIVEGILEVNIIQMTDVLMPVPWPESSLIDFVVTCQGSIPTEVCTIISDPTCEITQNTVCSPVDVDEMCLLTVRRTFNGSGTYCVNLTLGDDTSLALTSTLISVPDRDPASPLRMANSALISVGCLAIFVTVISLLVYKKHKEYNPIENSPGNVVRSKGLSVFLNRAKAVFFPGNQEKDPLLKNQEFKGVS

SEQ ID NO: 6153 - protein, 206 aa, Homo sapiens
MECLYYFLGFLLLAARLPLDAAKRFHDVLGNERPSAYMREHNQLNGWSSDENDWNEKLYPVWKRGDMRWKNSWKGGRVQAVLTSDSPALVGSNITFAVNLIFPRCQKEDANGNIVYEKNCRNEAGLSADPYVYNWTAWSEDSDGENGTGQSHHNVFPDGKPFPHHPGWRRWNFIYVFHTLGWLLQTPKLLLYLSLKFQPSLFLLYN

SEQ ID NO: 6154 - protein, 588 aa, Homo sapiens
MARGGAGAEEASLRSNALSWLACGLLALLANAWIILSISAKQQKHKPLELLLCFLAGTHILMAAVPLTTFAVVQLRRQASSDYDWNESICKVFVSTYYTLALATCFTVASLSYHRMWMVRWPVNYRLSNAKKQALHAVMGIWMVSFILSTLPSIGWHNNGERYYARGCQFIVSKIGLGFGVCFSLLLLGGIVMGLVCVAITFYQTLWARPRRARQARRVGGGGGTKAGGPGALGTRPAFEVPAIVVEDARGKRRSSLDGSESAKTSLQVTNLVSAIVFLYDSLTGVPILVVSFFSLKSDSAPPWMVLAVLWCSMAQTLLLPSFIWSCERYRADVRTVWEQCVAIMSEEDGDDDGGCDDYAEGRVCKVRFDANGATGPGSRDPAQVKLLPGRHMLFPPLERVHYLQVPLSRRLSHDETNIFSTPREPGSFLHKWSSSDDIRVLPAQSRALGGPPEYLGQRHRLEDEEDEEEAEGGGLASLRQFLESGVLGSGGGPPRGPGFFREEITTFIDETPLPSPTASPGHSPRRPRPLGLSPRRLSLGSPESRAVGLPLGLSAGRRCSLTGGEESARAWGGSWGPGNPIFPQLTL

SEQ ID NO: 6155 - protein, 304 aa, Homo sapiens
MLSTGVVSFFSLKSDSAPPWMVLAVLWCSMAQTLLLPSFIWSCERYRADVRTVWEQCVAIMSEEDGDDDGGCDDYAEGRVCKVRFDANGATGPGSRDPAQVKLLPGRHMLFPPLERVHYLQVPLSRRLSHDETNIFSTPREPGSFLHKWSSSDDIRVLPAQSRALGGPPEYLGQRHRLEDEEDEEEAEGGGLASLRQFLESGVLGSGGGPPRGPGFFREEITTFIDETPLPSPTASPGHSPRRPRPLGLSPRRLSLGSPESRAVGLPLGLSAGRRCSLTGGEESARAWGGSWGPGNPIFPQLTL

SEQ ID NO: 6156 - protein, 284 aa, Homo sapiens
MVLAVLWCSMAQTLLLPSFIWSCERYRADVRTVWEQCVAIMSEEDGDDDGGCDDYAEGRVCKVRFDANGATGPGSRDPAQVKLLPGRHMLFPPLERVHYLQVPLSRRLSHDETNIFSTPREPGSFLHKWSSSDDIRVLPAQSRALGGPPEYLGQRHRLEDEEDEEEAEGGGLASLRQFLESGVLGSGGGPPRGPGFFREEITTFIDETPLPSPTASPGHSPRRPRPLGLSPRRLSLGSPESRAVGLPLGLSAGRRCSLTGGEESARAWGGSWGPGNPIFPQLTL

SEQ ID NO: 6157 - protein, 228 aa, Homo sapiens
  SITE 1: note = misc_feature - Xaa can be any naturally occurring amino acid
XITFYQTLWARPRRARQARRVGGGGGTKAGGPGALGTRPAFEVPAIVVEDARGKRRSSLDGSESAKTSLQVTNLVVSFFSLKSDSAPPWMVLAVLWCSMAQTLLLPSFIWSCERYRADVRTVWEQCVAIMSEEDGDDDGGCDDYAEGRVCKVRFDANGATGPGSRDPAQVKLLPGRHMLFPPLERVHYLQLKKLDLAAAAAHTFFVANPMHLQMREDMAKYRRMSGVR

SEQ ID NO: 6158 - protein, 138 aa, Homo sapiens
MARLLQASCLLSLLLAGFVSQSRGQEKSKAPRQMGNPQMDCHGGISGTIYEYGALTIDGEEYIPFKQYAGKYVLFVNVASYGLTGQYIELNALQEELAPFGLVILGFPCNQFGKQEPGENSEILPTLKYVRPGGGFVP

SEQ ID NO: 6159 - protein, 62 aa, Homo sapiens
MARLLQASCLLSLLLAGFVSQSRGQEKSKAPRQMGNPQVRETSTPFAAPSAAGTPPPTVVVS

SEQ ID NO: 6160 - protein, 72 aa, Homo sapiens
MARLLQASCLLSLLLAGFVSQSRGQEKSKMDCHGGISGTIYEYGALTIDGEEYIPFKQYAGKYVLFVNVASY

SEQ ID NO: 6161 - protein, 225 aa, Homo sapiens
MARLLQASCLLSLLLAGFVSQSRGQEKSKMDCHGGISGTIYEYGALTIDGEEYIPFKQYAGKYVLFVNVASYGLTGQYIELNALQEELAPFGLVILGFPCNQFGKQEPGENSEILPTLKYVRPGGGFVPNFQLFEKGDVNGEKEQKFYTFLKNSCPPTSELLGTSDRLFWEPMKVHDIRWNFEKFLVGPDGIPIMRWHHRTTVSNVKMDILSYMRRQAALGVKRK

SEQ ID NO: 6162 - protein, 225 aa, Homo sapiens; identical to SEQ ID NO: 6161

SEQ ID NO: 6163 - protein, 99 aa, Homo sapiens
MARLLQASCLLSLLLAGFVSQSRGQEKSKNMHYRKSLHHSVWSFWAFPATNLENRNQERTQRSFLPSSMSDQVEALSLISSSLRKGMSMERKSRNSTLS

SEQ ID NO: 6164 - protein, 170 aa, Homo sapiens
  SITE 1: note = misc_feature - Xaa can be any naturally occurring amino acid
XCHGGISGTIYEYGALTIDGEEYIPFKQYAGKYVLFVNVASYGLTGQYIELNALQEELAPFGLVILGFPCNQFGKQEPGENSEILPTLKTPVLPPRSSWVHLTASSGNPRFTTSAGTLRSSWWGQMVYPSCAGTTGPRSATSRWTSCPTGGRQPWGSRGSNRPSHPMSTM

SEQ ID NO: 6165 - protein, 79 aa, Homo sapiens
  SITE 1: note = misc_feature - Xaa can be any naturally occurring amino acid
XFGKQEPGENSEILPTLKYVRPGGGFVPNFQLFEKGDVNGEKEQKFYTFLKGQAIPQEGLGRKRVRGPQARLTLLLSLL

SEQ ID NO: 6166 - protein, 174 aa, Homo sapiens
MCASRDDWRCARSMHEFSAKDIDGHMVNLDKYRGFVCIVTNVASQGKTEVNYTQLVDLHARYAECGLRILAFPCNQFGKQEPGSNEEIKEFAAGYNVKFDMFSKICVNGDDAHPLWKWMKIQPKGKGILGKTAWGLWGAAGDAHVHVLLFQCHQVELHQVPHRQERLRGEALRT

SEQ ID NO: 6167 - protein, 240 aa, Homo sapiens
MCASRDDWRCARSMHEFSAKDIDGHMVNLDKYRGFVCIVTNVASQGKTEVNYTQLVDLHARYAECGLRILAFPCNQFGKQEPGSNEEIKEFAAGYNVKFDMFSKICVNGDDAHPLWKWMKIQPKGKGILGNAIKWNFTKFGHRLSTVPHRQERLRGEALRTHGGAPGDREGPAPLFLAPQVCGPARAPAHALGAFHRHSRPACKPAGGADPKIQRAPRRRKVPWPAGLGSAPPPLATLWE

SEQ ID NO: 6168 - protein, 169 aa, Homo sapiens
MCASRDDWRCARSMHEFSAKDIDGHMVNLDKYRGFVCIVTNVASQGKTEVNYTQLVDLHARYAECGLRILAFPCNQFGKQEPGSNEEIKEFAAGYNVKFDMFSKICVNGDDAHPLWKWMKIQPKGKGILGNAIKWNFTKFLIDKNGCVVKRYGPMEEPLVIEKDLPHYF

SEQ ID NO: 6169 - protein, 133 aa, Homo sapiens
MGRAGAGSPGRRRQRCQSRGRRRPRAPRRRKAPACRRRRARRRRKKPCPRSLRPEIHECPKSQDPCASRDDWRCARSMHEFSAKDIDGHMVNLDKGFVCIVTNVASQGKTEVNYTQLVDLHARYAECGLRILA

SEQ ID NO: 6170 - protein, 233 aa, Homo sapiens
MGRAGAGSPGRRRQRCQSRGRRRPRAPRRRKAPACRRRRARRRRKKPCPRSLRPEIHECPKSQDPCASRDDWRCARSMHEFSAKDIDGHMVNLDKYRGFVCIVTNVASQGKTEVNYTQLVDLHARYAECGLRILAFPCNQFGKQEPGSNEEIKEFAAGYNVKFDMFSKICVNGDDAHPLWKWMKIQPKGKGILGNAIKWNFTKFLIDKNGCVVKRYGPMEEPLVIEKDLPHYF

SEQ ID NO: 6171 - protein, 179 aa, Homo sapiens
MGRAGAGSPGRRRQRCQSRGRRRPRAPRRRKAPACRRRRARRRRKKPCPRSLRPEIHECPKSQDPCASRDDWRCARSMHEFSAKDIDGHMVNLDKYRGFVCIVTNVASQGKTEVNYTQLVDLHARYAECGLRILAFPCNQFGKQEPGSNEEIKEFAAGYNVKFDMFSKICVNGDDAHPL

SEQ ID NO: 6172 - protein, 154 aa, Homo sapiens
MHEFSAKDIDGHMVNLDKYRGFVCIVTNVASQGKTEVNYTQLVDLHARYAECGLRILAFPCNQFGKQEPGSNEEIKEFAAGYNVKFDMFSKICVNGDDAHPLWKWMKIQPKGKGILGNAIKWNFTKFLIDKNGCVVKRYGPMEEPLVIEKDLPH

SEQ ID NO: 6173 - protein, 196 aa, Homo sapiens
MSLGRLCRLLKPALLCGALAAPGLAGTMCASRDDWRCARSMHEFSAKDIDGHMVNLDKYRGFVCIVTNVASQGKTEVNYTQLVDLHARYAECGLRILAFPCNQFGKQEPGSNEEIKEFAAGYNVKFDMFSKICVNGDDAHPLWKWMKIQPKGKGILGNAIKWNFTKFLIDKNGCVVKRYGPMEEPLVIEKDLPHYF

SEQ ID NO: 6174 - protein, 196 aa, Homo sapiens; identical to SEQ ID NO: 6173

SEQ ID NO: 6175 - protein, 177 aa, Homo sapiens
MSLGRLCRLLKPALLCGALAAPGLAGTMCASRDDWRCARSMHEFSAKDIDGHMVNLDKYRGFVCIVTNVASQGKTEVNYTQLVDLHARYAECGLRILAFPCNQFGKQEPGSNEEIKEFAAGYNVKFDMFSKICVNGDDAHPLWKWMKIQPKGKGILGNSSSTRTAAWSATDPWRSPW

SEQ ID NO: 6176 - protein, 166 aa, Homo sapiens
YAECGLRILAFPCNQFGKQEPGSNEEIKEFAAGYNVKFDMFSKICVNGDDAHPLWKWMKIQPKGKGILGNAIKWNFTKFLIDKNGCVVKRYGPMEEPLLHKCVAPPEPLPTPLEPSTGTHDGLPANLLVGQTRKSSVHPAGGRSHGLLGLARRPHPWLPCGNKQTN

SEQ ID NO: 6177 - protein, 221 aa, Homo sapiens
MTTQLRVVHLLPLLLACFVQTSPKQEKMKMDCHKDEKGTIYDYEAIALNKNEYVSFKQYVGKHILFVNVATYCGLTAQYPELNALQEELKPYGLVVLGFPCNQFGKQEPGDNKEILPGLKYVRPGGGFVPSFQLFEKGDVNGEKEQKVFSFLKHSCPHPSEILGTFKSISWDPVKVHDIRWNFEKFLVGPDGIPVMRWSHRATVSSVKTDILAYLKQFKTK

SEQ ID NO: 6178 - protein, 100 aa, Homo sapiens
MTTQLRVVHLLPLLLACFVQTSPKQEKMKMDCHKDEKGTIYDYEAIALNKNEYVSFKQYVGKHILFVNVATYCGLTAQYPGMSVQGEDLYLVSSFLRKGM

SEQ ID NO: 6179 - protein, 220 aa, Homo sapiens
MFQQFQASCLVLFFLVGFAQQTLKPQNRKVDCNKGVTGTIYEYGALTLNGEEYIQFKQFAGKHVLFVNVAAYGLAAQYPELNALQEELKNFGVIVLAFPCNQFGKQEPGTNSEILLGLKYVCPGSGFVPSFQLFEKGDVNGEKEQKVFTFLKNSCPPTSDLLGSSSQLFWEPMKVHDIRWNFEKFLVGPDGVPVMHWFHQAPVSTVKSDILEYLKQFNTH

SEQ ID NO: 6180 - protein, 179 aa, Homo sapiens
MFQQFQASCLVLFFLVGFAQQTLKPQNRKVDCNKGVTGTIYEYGALTLNGEEYIQFKQFAGKHVLFVNVAAYGLAAQYPELNALQEELKNFGVIVLAFPCNQFGKQEPGTNSEILLGLKTPALRPLIFWAHQANSSGSPRSMISAGTLRNFWWGPMESLSCIGSTRLQSAQSSQTSWST

SEQ ID NO: 6181 - protein, 220 aa, Homo sapiens; identical to SEQ ID NO: 6179

SEQ ID NO: 6182 - protein, 187 aa, Homo sapiens
MVAATVAAAWLLLWAAACAQQEQDFYDFKAVNIRGKLVSLEKYRGSVSLVVNVASECGFTDQHYRALQQLQRDLGPHHFNVLAFPCNQFGQQEPDSNKEIESFARRTYSVSFPMFSKIAVTGTGAHPAFKYLAQTSGKEPTWNFWKYLVAPDGKVVGAWDPTVSVEEVRPQITALVRKLILLKREDL

SEQ ID NO: 6183 - protein, 42 aa, Homo sapiens
MSRTAYTVGALLLLLGTLLPAAEGKKKGSQGAIPPPAKRPCM

SEQ ID NO: 6184 - protein, 143 aa, Homo sapiens
MSRTAYTVGALLLLLGTLLPAAEGKKKGSQGAIPPPDKALHVTERKYLKRDWCKTQPLKQTIHEEGCNSRTIINRFCYGQCNSFYIPRHIRKEEGSFQSCSFCKPKKFTTMMVTLNCPELQPPTKKKRVTRVKQCRCISIDLD

SEQ ID NO: 6185 - protein, 184 aa, Homo sapiens
MSRTAYTVGALLLLLGTLLPAAEGKKKGSQGAIPPPDKAQHNDSEQTQSPQQPGSRNRGRGQGRGTAMPGEEVLESSQEALHVTERKYLKRDWCKTQPLKQTIHEEGCNSRTIINRFCYGQCNSFYIPRHIRKEEGSFQSCSFCKPKKFTTMMVTLNCPELQPPTKKKRVTRVKQCRCISIDLD

SEQ ID NO: 6186 - protein, 168 aa, Homo sapiens
MFWKLSLSLFLVAVLVKVAEARKNRPAGAIPSPYKDGSSNNSERWQHQIKEVLASSQEALVVTERKYLKSDWCKTQPLRQTVSEEGCRSRTILNRFCYGQCNSFYIPRHVKKEEESFQSCAFCKPQRVTSVLVELECPGLDPPFRLKKIQKVKQCRCMSVNLSDSDKQ

SEQ ID NO: 6187 - protein, 81 aa, Homo sapiens
MMRVNGDDDSVAALSFLYDYYMGPKEKRILSSSTGGRNDQGKRYYHGMEYETDLTPLESPTHLMKFLTENVSGTPEYPDLL

SEQ ID NO: 6188 - protein, 556 aa, Homo sapiens
MMRVNGDDDSVAALSFLYDYYMGPKEKRILSSSTGGRNDQGKRYYHGMEYETDLTPLESPTHLMKFLTENVSGTPEYPDLLKKNNLMSLEGALPTPGKAAPLPAGPSKLEAGSVDSYLLPTTDMYDNGSLNSLFESIHGVPPTQRWQPDSTFKDDPQESMLFPDILKTSPEPPCPEDYPSLKSDFEYTLGSPKAIHIKSGESPMAYLNKGQFYPVTLRTPAGGKGLALSSNKVKSVVMVVFDNEKVPVEQLRFWKHWHSRQPTAKQRVIDVADCKENFNTVEHIEEVAYNALSFVWNVNEEAKVFIGVNCLSTDFSSQKGVKGVPLNLQIDTYDCGLGTERLVHRAVCQIKIFCDKGAERKMRDDERKQFRRKVKCPDSSNSGVKGCLLSGFRGNETTYLRPETDLETPPVLFIPNVHFSSLQRSGGAAPSAGPSSSNRLPLKRTCSPFTEEFEPLPSKQAKEGDLQRVLLYVRRETEEVFDALMLKTPDLKGLRNAISEKYGFPEENIYKVYKKCKRGILVNMDNNIIQHYSNHVAFLLDMGELDGKIQIILKEL

SEQ ID NO: 6189 - protein, 626 aa, Homo sapiens
MSNELDFRSVRLLKNDPVNLQKFSYTSEDEAWKTYLENPLTAATKAMMRVNGDDDSVAALSFLYDYYMGPKEKRILSSSTGGRNDQGKRYYHGMEYETDLTPLESPTHLMKFLTENVSGTPEYPDLLKKNNLMSLEGALPTPGKAAPLPAGPSKLEAGSVDSYLLPTTDMYDNGSLNSLFESIHGVPPTQRWQPDSTFKDDPQESMLFPDILKTSPEPPCPEDYPSLKSDFEYTLGSPKAIHIKSGESPMAYLNKGQFYPVTLRTPAGGKGLALSSNKVKSVVMVVFDNEKVPVEQLRFWKHWHSRQPTAKQRVIDVADCKENFNTVEHIEEVAYNALSFVWNVNEEAKVFIGVNCLSTDFSSQKGVKGVPLNLQIDTYDCGLGTERLVHRAVCQIKIFCDKGAERKMRDDERKQFRRKVKCPDSSNSGVKGCLLSGFRGNETTYLRPETDLETPPVLFIPNVHFSSLQRSGGAAPSAGPSSSNRLPLKRTCSPFTEEFEPLPSKQAKEGDLQRVLLYVRRETEEVFDALMLKTPDLKGLRNAISEKYGFPEENIYKVYKKCKRGETSLLHPRLSRHPPPDCLECSHPVTQVRNMGFGDGFWRQRDLDSNPSPTTVNSLHFTVNSE

SEQ ID NO: 6190 - protein, 602 aa, Homo sapiens
MSNELDFRSVRLLKNDPVNLQKFSYTSEDEAWKTYLENPLTAATKAMMRVNGDDDSVAALSFLYDYYMGPKEKRILSSSTGGRNDQGKRYYHGMEYETDLTPLESPTHLMKFLTENVSGTPEYPDLLKKNNLMSLEGALPTPGKAAPLPAGPSKLEAGSVDSYLLPTTDMYDNGSLNSLFESIHGVPPTQRWQPDSTFKDDPQESMLFPDILKTSPEPPCPEDYPSLKSDFEYTLGSPKAIHIKSGESPMAYLNKGQFYPVTLRTPAGGKGLALSSNKVKSVVMVVFDNEKVPVEQLRFWKHWHSRQPTAKQRVIDVADCKENFNTVEHIEEVAYNALSFVWNVNEEAKVFIGVNCLSTDFSSQKGVKGVPLNLQIDTYDCGLGTERLVHRAVCQIKIFCDKGAERKMRDDERKQFRRKVKCPDSSNSGVKGCLLSGFRGNETTYLRPETDLETPPVLFIPNVHFSSLQRSGGAAPSAGPSSSNRLPLKRTCSPFTEEFEPLPSKQAKEGDLQRVLLYVRRETEEVFDALMLKTPDLKGLRNAISEKYGFPEENIYKVYKKCKRGILVNMDNNIIQHYSNHVAFLLDMGELDGKIQIILKEL

SEQ ID NO: 6191 - protein, 607 aa, Homo sapiens
MWMNSILPIFLFRSVRLLKNDPVNLQKFSYTSEDEAWKTYLENPLTAATKAMMRVNGDDDSVAALSFLYDYYMGPKEKRILSSSTGGRNDQGKRYYHGMEYETDLTPLESPTHLMKFLTENVSGTPEYPDLLKKNNLMSLEGALPTPGKAAPLPAGPSKLEAGSVDSYLLPTTDMYDNGSLNSLFESIHGVPPTQRWQPDSTFKDDPQESMLFPDILKTSPEPPCPEDYPSLKSDFEYTLGSPKAIHIKSGESPMAYLNKGQFYPVTLRTPAGGKGLALSSNKVKSVVMVVFDNEKVPVEQLRFWKHWHSRQPTAKQRVIDVADCKENFNTVEHIEEVAYNALSFVWNVNEEAKVFIGVNCLSTDFSSQKGVKGVPLNLQIDTYDCGLGTERLVHRAVCQIKIFCDKGAERKMRDDERKQFRRKVKCPDSSNSGVKGCLLSGFRGNETTYLRPETDLETPPVLFIPNVHFSSLQRSGGAAPSAGPSSSNRLPLKRTCSPFTEEFEPLPSKQAKEGDLQRVLLYVRRETEEVFDALMLKTPDLKGLRNAISEKYGFPEENIYKVYKKCKRGILVNMDNNIIQHYSNHVAFLLDMGELDGKIQIILKEL

SEQ ID NO: 6192 - protein, 52 aa, Homo sapiens
MWMNSILPIFLVPRRSGYCPPALGAGMTKERGTTMAWNMRRTSLPLKAPHTS

SEQ ID NO: 6193 - protein, 48 aa, Homo sapiens
MQKIMHISVLLSPVLWGLIFGVSSNSIQIGGLFPRGADQEYSAFRVGM

SEQ ID NO: 6194 - protein, 125 aa, Homo sapiens
MQKIMHISVLLSPVLWGLIFGVSSNSIQIGGLFPRGADQEYSAFRVGMVQFSTSEFRLTPHIDNLEVANSFAVTNAFCSQFSRGVYAIFGFYDKKSVNTITSFCGTLHVSFITPSFPTDGTHPFV

SEQ ID NO: 6195 - protein, 883 aa, Homo sapiens
MQKIMHISVLLSPVLWGLIFGVSSNSIQIGGLFPRGADQEYSAFRVGMVQFSTSEFRLTPHIDNLEVANSFAVTNAFCSQFSRGVYAIFGFYDKKSVNTITSFCGTLHVSFITPSFPTDGTHPFVIQMRPDLKGALLSLIEYYQWDKFAYLYDSDRGLSTLQAVLDSAAEKKWQVTAINVGNINNDKKDEMYRSLFQDLELKKERRVILDCERDKVNDIVDQVITIGKHVKGYHYIIANLGFTDGDLLKIQFGGANVSGFQIVDYDDSLVSKFIERWSTLEEKEYPGAHTTTIKYTSALTYDAVQVMTEAFRNLRKQRIEISRRGNAGDCLANPAVPWGQGVEIERALKQVQVEGLSGNIKFDQNGKRINYTINIMELKTNGPRKIGYWSEVDKMVVTLTELPSGNDTSGLENKTVVVTTILESPYVMMKKNHEMLEGNERYEGYCVDLAAEIAKHCGFKYKLTIVGDGKYGARDADTKIWNGMVGELVYGKADIAIAPLTITLVREEVIDFSKPFMSLGISIMIKKPQKSKPGVFSFLDPLAYEIWMCIVFAYIGVSVVLFLVSRFSPYEWHTEEFEDGRETQSSESTNEFGIFNSLWFSLGAFMQQGCDISPRSLSGRIVGGVWWFFTLIIISSYTANLAAFLTVERMVSPIESAEDLSKQTEIAYGTLDSGSTKEFFRRSKIAVFDKMWTYMRSAEPSVFVRTTAEGVARVRKSKGKYAYLLESTMNEYIEQRKPCDTMKVGGNLDSKGYGIATPKGSSLRNAVNLAVLKLNEQGLLDKLKNKWWYDKGECGSGGGDSKEKTSALSLSNVAGVFYILVGGLGLAMLVALIEFCYKSRAEAKRMKVAKNAQNINPSSSQNSQNFATYKEGYNVYGIESVKI

SEQ ID NO: 6196 - protein, 883 aa, Homo sapiens
MQKIMHISVLLSPVLWGLIFGVSSNSIQIGGLFPRGADQEYSAFRVGMVQFSTSEFRLTPHIDNLEVANSFAVTNAFCSQFSRGVYAIFGFYDKKSVNTITSFCGTLHVSFITPSFPTDGTHPFVIQMRPDLKGALLSLIEYYQWDKFAYLYDSDRGLSTLQAVLDSAAEKKWQVTAINVGNINNDKKDEMYRSLFQDLELKKERRVILDCERDKVNDIVDQVITIGKHVKGYHYIIANLGFTDGDLLKIQFGGANVSGFQIVDYDDSLVSKFIERWSTLEEKEYPGAHTTTIKYTSALTYDAVQVMTEAFRNLRKQRIEISRRGNAGDCLANPAVPWGQGVEIERALKQVQVEGLSGNIKFDQNGKRINYTINIMELKTNGPRKIGYWSEVDKMVVTLTELPSGNDTSGLENKTVVVTTILESPYVMMKKNHEMLEGNERYEGYCVDLAAEIAKHCGFKYKLTIVGDGKYGARDADTKIWNGMVGELVYGKADIAIAPLTITLVREEVIDFSKPFMSLGISIMIKKPQKSKPGVFSFLDPLAYEIWMCIVFAYIGVSVVLFLVSRFSPYEWHTEEFEDGRETQSSESTNEFGIFNSLWFSLGAFMQQGCDISPRSLSGRIVGGVWWFFTLIIISSYTANLAAFLTVERMVSPIESAEDLSKQTEIAYGTLDSGSTKEFFRRSKIAVFDKMWTYMRSAEPSVFVRTTAEGVARVRKSKGKYAYLLESTMNEYIEQRKPCDTMKVGGNLDSKGYGIATPKGSSLRTPVNLAVLKLSEQGVLDKLKNKWWYDKGECGAKDSGSKEKTSALSLSNVAGVFYILVGGLGLAMLVALIEFCYKSRAEAKRMKVAKNAQNINPSSSQNSQNFATYKEGYNVYGIESVKI

SEQ ID NO: 6197 - protein, 901 aa, Homo sapiens
MQKIMHISVLLSPVLWGLIFGVSSNSIQIGGLFPRGADQEYSAFRVGMVQFSTSEFRLTPHIDNLEVANSFAVTNAFCSQFSRGVYAIFGFYDKKSVNTITSFCGTLHVSFITPSFPTDGTHPFVIQMRPDLKGALLSLIEYYQWDKFAYLYDSDRGLSTLQAVLDSAAEKKWQVTAINVGNINNDKKDEMYRSLFQDLELKKERRVILDCERDKVNDIVDQVITIGKHVKGYHYIIANLGFTDGDLLKIQFGGANVSGFQIVDYDDSLVSKFIERWSTLEEKEYPGAHTTTIKYTSALTYDAVQVMTEAFRNLRKQRIEISRRGNAGDCLANPAVPWGQGVEIERALKQVQVEGLSGNIKFDQNGKRINYTINIMELKTNGPRKIGYWSEVDKMVVTLTELPSGNDTSGLENKTVVVTTILESPYVMMKKNHEMLEGNERYEGYCVDLAAEIAKHCGFKYKLTIVGDGKYGARDADTKIWNGMVGELVYGKADIAIAPLTITLVREEVIDFSKPFMSLGISIMIKKPQKSKPGVFSFLDPLAYEIWMCIVFAYIGVSVVLFLVSRFSPYEWHTEEFEDGRETQSSESTNEFGIFNSLWFSLGAFMQQGCDISPRSLSGRIVGGVWWFFTLIIISSYTANLAAFLTVERMVSPIESAEDLSKQTEIAYGTLDSGSTKEFFRRSKIAVFDKMWTYMRSAEPSVFVRTTAEGVARVRKSKGKYAYLLESTMNEYIEQRKPCDTMKVGGNLDSKGYGIATPKGSSLRNAVNLAVLKLNEQGLLDKLKNKWWYDKGECGSGGGDSKEKTSALSLSNVAGVFYILVGGLGLAMLVALIEFCYKSRAEAKRMKMTLNDAMRNKARLSITGSTGENGRVMTPEFPKAVHAVPYVSPGMGMNVSVTDLS

SEQ ID NO: 6198 - protein, 105 aa, Homo sapiens
MRPDLKGALLSLIEYYQWDKFAYLYDSDRGLSTLQAVLDSAAEKKWQVTAINVGNINNDKKDEMYRSLFQDLELKKERRVILDCERDKVNDIVDQVITIGKHVKG

SEQ ID NO: 6199 - protein, 57 aa, Homo sapiens
MVQFSTSEFRLTPHIDNLEVANSFAVTNAFCSQFSRGVYAIFGFYDKKSVNTITSFC

SEQ ID NO: 6200 - protein, 145 aa, Homo sapiens
MVQFSTSEFRLTPHIDNLEVANSFAVTNAFCSQFSRGVYAIFGFYDKKSVNTITSFCGTLHVSFITPSFPTDGTHPFVIQMRPDLKGALLSLIEYYQWDKFAYLYDSDRGLSTLQAVLDSAAEKKWQVTAINVGNINNDKKDEMY

SEQ ID NO: 6201 - protein, 730 aa, Homo sapiens
MVQFSTSEFRLTPHIDNLEVANSFAVTNAFCSQFSRGVYAIFGFYDKKSVNTITSFCGTLHVSFITPSFPTDGTHPFVIQMRPDLKGALLSLIEYYQWDKFAYLYDSDRGLSTLQAVLDSAAEKKWQVTAINVGNINNDKKDEMYRSLFQDLELKKERRVILDCERDKVNDIVDQVITIGKHVKGYHYIIANLGFTDGDLLKIQFGGANVSGFQIVDYDDSLVSKFIERWSTLEEKEYPGAHTTTIKYTSALTYDAVQVMTEAFRNLRKQRIEISRRGNAGDCLANPAVPWGQGVEIERALKQVQVEGLSGNIKFDQNGKRINYTINIMELKTNGPRKIGYWSEVDKMVVTLTELPSGNDTSGLENKTVVVTTILESPYVMMKKNHEMLEGNERYEGYCVDLAAEIAKHCGFKYKLTIVGDGKYGARDADTKIWNGMVGELVYGKADIAIAPLTITLVREEVIDFSKPFMSLGISIMIKKPQKSKPGVFSFLDPLAYEIWMCIVFAYIGVSVVLFLVSRFSPYEWHTEEFEDGRETQSSESTNEFGIFNSLWFSLGAFMQQGCDISPRSLSGRIVGGVWWFFTLIIISSYTANLAAFLTVERMVSPIESAEDLSKQTEIAYGTLDSGSTKEFFRRSKIAVFDKMWTYMRSAEPSVFVRTTAEGVARVRKSKGKYAYLLESTMNEYIEQRKPCDTMKVGGNLDSKGYGIATPKGSSLSGVTFKTLLFVCCG

SEQ ID NO: 6202 - protein, 836 aa, Homo sapiens
MVQFSTSEFRLTPHIDNLEVANSFAVTNAFCSQFSRGVYAIFGFYDKKSVNTITSFCGTLHVSFITPSFPTDGTHPFVIQMRPDLKGALLSLIEYYQWDKFAYLYDSDRGLSTLQAVLDSAAEKKWQVTAINVGNINNDKKDEMYRSLFQDLELKKERRVILDCERDKVNDIVDQVITIGKHVKGYHYIIANLGFTDGDLLKIQFGGANVSGFQIVDYDDSLVSKFIERWSTLEEKEYPGAHTTTIKYTSALTYDAVQVMTEAFRNLRKQRIEISRRGNAGDCLANPAVPWGQGVEIERALKQVQVEGLSGNIKFDQNGKRINYTINIMELKTNGPRKIGYWSEVDKMVVTLTELPSGNDTSGLENKTVVVTTILESPYVMMKKNHEMLEGNERYEGYCVDLAAEIAKHCGFKYKLTIVGDGKYGARDADTKIWNGMVGELVYGKADIAIAPLTITLVREEVIDFSKPFMSLGISIMIKKPQKSKPGVFSFLDPLAYEIWMCIVFAYIGVSVVLFLVSRFSPYEWHTEEFEDGRETQSSESTNEFGIFNSLWFSLGAFMQQGCDISPRSLSGRIVGGVWWFFTLIIISSYTANLAAFLTVERMVSPIESAEDLSKQTEIAYGTLDSGSTKEFFRRSKIAVFDKMWTYMRSAEPSVFVRTTAEGVARVRKSKGKYAYLLESTMNEYIEQRKPCDTMKVGGNLDSKGYGIATPKGSSLRTPVNLAVLKLSEQGVLDKLKNKWWYDKGECGAKDSGSKEKTSALSLSNVAGVFYILVGGLGLAMLVALIEFCYKSRAEAKRMKVAKNAQNINPSSSQNSQNFATYKEGYNVYGIESVKI

SEQ ID NO: 6203 - protein, 836 aa, Homo sapiens; identical to SEQ ID NO: 6202

SEQ ID NO: 6204 - protein, 214 aa, Homo sapiens
  SITE 1: note = misc_feature - Xaa can be any naturally occurring amino acid
XLDSGSTKEFFRRSKIAVFDKMWTYMRSAEPSVFVRTTAEGVARVRKSKGKYAYLLESTMNEYIEQRKPCDTMKVGGNLDSKGYGIATPKGSSLRTPVNLAVLKLSEQGVLDKLKNKWWYDKGECGAKDSGSKEKTSALSLSNVAGVFYILVGGLGLAMLVALIEFCYKSRAEAKRMKVAKNAQNINPSSSQNSQNFATYKEGYNVYGIESVKI

SEQ ID NO: 6205 - protein, 144 aa, Homo sapiens
MARQKKMGQSVLRAVFFLVLGLLGHSHGGFPNTISIGGLFMRNTVQEHSAFRFAVQLYNTNQNTTEKPFHLNYHVDHLDSSNSFSVTNACPAERDYLPWPGSIRENNWTALPCCKDHGLLHLKCSPGGARQNWAYCIWGVTGEL

SEQ ID NO: 6206 - protein, 144 aa, Homo sapiens; identical to SEQ ID NO: 6205

SEQ ID NO: 6207 - protein, 894 aa, Homo sapiens
MARQKKMGQSVLRAVFFLVLGLLGHSHGGFPNTISIGGLFMRNTVQEHSAFRFAVQLYNTNQNTTEKPFHLNYHVDHLDSSNSFSVTNAFCSQFSRGVYAIFGFYDQMSMNTLTSFCGALHTSFVTPSFPTDADVQFVIQMRPALKGAILSLLGHYKWEKFVYLYDTERGFSILQAIMEAAVQNNWQVTARSVGNIKDVQEFRRIIEEMDRRQEKRYLIDCEVERINTILEQVVILGKHSRGYHYMLANLGFTDILLERVMHGGANITGFQIVNNENPMVQQFIQRWVRLDEREFPEAKNAPLKYTSALTHDAILVIAEAFRYLRRQRVDVSRRGSAGDCLANPAVPWSQGIDIERALKMVQVQGMTGNIQFDTYGRRTNYTIDVYEMKVSGSRKAGYWNEYERFVPFSDQQISNDSASSENRTIVVTTILESPYVMYKKNHEQLEGNERYEGYCVDLAYEIAKHVRIKYKLSIVGDGKYGARDPETKIWNGMVGELVYGRADIAVAPLTITLVREEVIDFSKPFMSLGISIMIKKPQKSKPGVFSFLDPLAYEIWMCIVFAYIGVSVVLFLVSRFSPYEWHLEDNNEEPRDPQSPPDPPNEFGIFNSLWFSLGAFMQQGCDISPRSLSGRIVGGVWWFFTLIIISSYTANLAAFLTVERMVSPIESAEDLAKQTEIAYGTLDSGSTKEFFRRSKIAVYEKMWSYMKSAEPSVFTKTTADGVARVRKSKGKFAFLLESTMNEYIEQRKPCDTMKVGGNLDSKGYGVATPKGSALRTPVNLAVLKLSEQGILDKLKNKWWYDKGECGAKDSGSKDKTSALSLSNVAGVFYILVGGLGLAMMVALIEFCYKSRAESKRMKLTKNTQNFKPAPATNTQNYATYREGYNVYGTESVKI

SEQ ID NO: 6208 - protein, 824 aa, Homo sapiens
MARQKKMGQSVLRAVFFLVLGLLGHSHGGFPNTISIGGLFMRNTVQEHSAFRFAVQLYNTNQNTTEKPFHLNYHVDHLDSSNSFSVTNAFCSQFSRGVYAIFGFYDQMSMNTLTSFCGALHTSFVTPSFPTDADVQFVIQMRPALKGAILSLLGHYKWEKFVYLYDTERGFSILQAIMEAAVQNNWQVTARSVGNIKDVQEFRRIIEEMDRRQEKRYLIDCEVERINTILEQVVILGKHSRGYHYMLANLGFTDILLERVMHGGANITGFQIVNNENPMVQQFIQRWVRLDEREFPEAKNAPLKYTSALTHDAILVIAEAFRYLRRQRVDVSRRGSAGDCLANPAVPWSQGIDIERALKMVQVQGMTGNIQFDTYGRRTNYTIDVYEMKVSGSRKAGYWNEYERFVPFSDQQISNDSASSENRTIVVTTILESPYVMYKKNHEQLEGNERYEGYCVDLAYEIAKHVRIKYKLSIVGDGKYGARDPETKIWNGMVGELVYGRADIAVAPLTITLVREEVIDFSKPFMSLGISIMIKKPQKSKPGVFSFLDPLAYEIWMCIVFAYIGVSVVLFLVSRFSPYEWHLEDNNEEPRDPQSPPDPPNEFGIFNSLWFSLGAFMQQGCDISPRSLSGRIVGGVWWFFTLIIISSYTANLAAFLTVERMVSPIESAEDLAKQTEIAYGTLDSGSTKEFFRRSKIAVYEKMWSYMKSAEPSVFTKTTADGVARVRKSKGKFAFLLESTMNEYIEQRKPCDTMKVGGNLDSKGYGVATPKGSALRNAVNLAVLKLNEQGLLDKLKNKWWYDKGECGSGGGDSKNACKPCSIETQ

SEQ ID NO: 6209 - protein, 894 aa, Homo sapiens
MARQKKMGQSVLRAVFFLVLGLLGHSHGGFPNTISIGGLFMRNTVQEHSAFRFAVQLYNTNQNTTEKPFHLNYHVDHLDSSNSFSVTNAFCSQFSRGVYAIFGFYDQMSMNTLTSFCGALHTSFVTPSFPTDADVQFVIQMRPALKGAILSLLGHYKWEKFVYLYDTERGFSILQAIMEAAVQNNWQVTARSVGNIKDVQEFRRIIEEMDRRQEKRYLIDCEVERINTILEQVVILGKHSRGYHYMLANLGFTDILLERVMHGGANITGFQIVNNENPMVQQFIQRWVRLDEREFPEAKNAPLKYTSALTHDAILVIAEAFRYLRRQRVDVSRRGSAGDCLANPAVPWSQGIDIERALKMVQVQGMTGNIQFDTYGRRTNYTIDVYEMKVSGSRKAGYWNEYERFVPFSDQQISNDSASSENRTIVVTTILESPYVMYKKNHEQLEGNERYEGYCVDLAYEIAKHVRIKYKLSIVGDGKYGARDPETKIWNGMVGELVYGRADIAVAPLTITLVREEVIDFSKPFMSLGISIMIKKPQKSKPGVFSFLDPLAYEIWMCIVFAYIGVSVVLFLVSRFSPYEWHLEDNNEEPRDPQSPPDPPNEFGIFNSLWFSLGAFMQQGCDISPRSLSGRIVGGVWWFFTLIIISSYTANLAAFLTVERMVSPIESAEDLAKQTEIAYGTLDSGSTKEFFRRSKIAVYEKMWSYMKSAEPSVFTKTTADGVARVRKSKGKFAFLLESTMNEYIEQRKPCDTMKVGGNLDSKGYGVATPKGSALRNAVNLAVLKLNEQGLLDKLKNKWWYDKGECGSGGGDSKDKTSALSLSNVAGVFYILVGGLGLAMMVALIEFCYKSRAESKRMKLTKNTQNFKPAPATNTQNYATYREGYNVYGTESVKI

SEQ ID NO: 6210 - protein, 894 aa, Homo sapiens; identical to SEQ ID NO: 6209

SEQ ID NO: 6211 - protein, 82 aa, Homo sapiens
MRIISRQIVLLFSGFWGLAMGAFPSSVQIGGLFIRNTDQEYTAFRLAIFLHNTSPNASEAPFNLVPHVDNIETANSFAVTNA

SEQ ID NO: 6212 - protein, 82 aa, Homo sapiens; identical to SEQ ID NO: 6211

SEQ ID NO: 6213 - protein, 82 aa, Homo sapiens; identical to SEQ ID NO: 6211

SEQ ID NO: 6214 - protein, 84 aa, Homo sapiens
MRIISRQIVLLFSGFWGLAMGAFPSSVQIGGLFIRNTDQEYTAFRLAIFLHNTSPNASEAPFNLVPHVDNIETANSFAVTNACK

SEQ ID NO: 6215 - protein, 225 aa, Homo sapiens
MRIISRQIVLLFSGFWGLAMGAFPSSVQIGGLFIRNTDQEYTAFRLAIFLHNTSPNASEAPFNLVPHVDNIETANSFAVTNAFCSQYSRGVFAIFGLYDKRSVHTLTSFCSALHISLITPSFPTEGESQFVLQLRPSLRGALLSLLDHYEWNCFVFLYDTDRGLVISTTPLASNCMPSSVVHSWLYVLYNKSINSITACLLGPSTELNVFNYLIADSNLNNGNYI

SEQ ID NO: 6216 - protein, 902 aa, Homo sapiens
MRIISRQIVLLFSGFWGLAMGAFPSSVQIGGLFIRNTDQEYTAFRLAIFLHNTSPNASEAPFNLVPHVDNIETANSFAVTNAFCSQYSRGVFAIFGLYDKRSVHTLTSFCSALHISLITPSFPTEGESQFVLQLRPSLRGALLSLLDHYEWNCFVFLYDTDRGYSILQAIMEKAGQNGWHVSAICVENFNDVSYRQLLEELDRRQEKKFVIDCEIERLQNILEQIVSVGKHVKGYHYIIANLGFKDISLERFIHGGANVTGFQLVDFNTPMVIKLMDRWKKLDQREYPGSETPPKYTSALTYDGVLVMAETFRSLRRQKIDISRRGNAGDCLANPAAPWGQGIDMERTLKQVRIQGLTGNVQFDHYGRRVNYTMDVFELKSTGPRKVGYWNDMDKLVLIQDVPTLGNDTAAIENRTVVVTTIMESPYVMYKKNHEMFEGNDKYEGYCVDLASEIAKHIGIKYKIAIVPDGKYGARDADTKIWNGMVGELVYGKAEIAIAPLTITLVREEVIDFSKPFMSLGISIMIKKPQKSKPGVFSFLDPLAYEIWMCIVFAYIGVSVVLFLVSRFSPYEWHTEEPEDGKEGPSDQPPNEFGIFNSLWFSLGAFMQQGCDISPRSLSGRIVGGVWWFFTLIIISSYTANLAAFLTVERMVSPIESAEDLAKQTEIAYGTLDSGSTKEFFRRSKIAVYEKMWTYMRSAEPSVFTRTTAEGVARVRKSKGKFAFLLESTMNEYIEQRKPCDTMKVGGNLDSKGYGVATPKGSSLRTPVNLAVLKLSEAGVLDKLKNKWWYDKGECGPKDSGSKDKTSALSLSNVAGVFYILVGGLGLAMLVALIEFCYKSRAEAKRMKLTFSEAIRNKARLSITGSVGENGRVLTPDCPKAVHTGTAIRQSSGLAVIASDLP

SEQ ID NO: 6217 - protein, 433 aa, Homo sapiens
MRIISRQIVLLFSGFWGLAMGAFPSSVQIGGLFIRNTDQEYTAFRLAIFLHNTSPNASEAPFNLVPHVDNIETANSFAVTNAFCSQYSRGVFAIFGLYDKRSVHTLTSFCSALHISLITPSFPTEGESQFVLQLRPSLRGALLSLLDHYEWNCFVFLYDTDRGYSILQAIMEKAGQNGWHVSAICVENFNDVSYRQLLEELDRRQEKKFVIDCEIERLQNILEQIVSVGKHVKGYHYIIANLGFKDISLERFIHGGANVTGFQLVDFNTPMVIKLMDRWKKLDQREYPGSETPPKYTSALTYDGVLVMAETFRSLRRQKIDISRRGNAGDCLANPAAPWGQGIDMERTLKQVRIQGLTGNVQFDHYGRRVNYTMDVFELKSTGPRKVGYWNDMDKLVLIQDVPTLGNDTAAIENRTVVVTTIMPLMKNPILRN

SEQ ID NO: 6218 - protein, 884 aa, Homo sapiens
MRIISRQIVLLFSGFWGLAMGAFPSSVQIGGLFIRNTDQEYTAFRLAIFLHNTSPNASEAPFNLVPHVDNIETANSFAVTNAFCSQYSRGVFAIFGLYDKRSVHTLTSFCSALHISLITPSFPTEGESQFVLQLRPSLRGALLSLLDHYEWNCFVFLYDTDRGYSILQAIMEKAGQNGWHVSAICVENFNDVSYRQLLEELDRRQEKKFVIDCEIERLQNILEQIVSVGKHVKGYHYIIANLGFKDISLERFIHGGANVTGFQLVDFNTPMVIKLMDRWKKLDQREYPGSETPPKYTSALTYDGVLVMAETFRSLRRQKIDISRRGNAGDCLANPAAPWGQGIDMERTLKQVRIQGLTGNVQFDHYGRRVNYTMDVFELKSTGPRKVGYWNDMDKLVLIQDVPTLGNDTAAIENRTVVVTTIMESPYVMYKKNHEMFEGNDKYEGYCVDLASEIAKHIGIKYKIAIVPDGKYGARDADTKIWNGMVGELVYGKAEIAIAPLTITLVREEVIDFSKPFMSLGISIMIKKPQKSKPGVFSFLDPLAYEIWMCIVFAYIGVSVVLFLVSRFSPYEWHTEEPEDGKEGPSDQPPNEFGIFNSLWFSLGAFMQQGCDISPRSLSGRIVGGVWWFFTLIIISSYTANLAAFLTVERMVSPIESAEDLAKQTEIAYGTLDSGSTKEFFRRSKIAVYEKMWTYMRSAEPSVFTRTTAEGVARVRKSKGKFAFLLESTMNEYIEQRKPCDTMKVGGNLDSKGYGVATPKGSSLRNAVNLAVLKLNEQGLLDKLKNKWWYDKGECGSGGGDSKDKTSALSLSNVAGVFYILVGGLGLAMLVALIEFCYKSRAEAKRMKVAKSAQTFNPTSSQNTQNLATYREGYNVYGTESIKI

SEQ ID NO: 6219 - protein, 433 aa, Homo sapiens; identical to SEQ ID NO: 6217

SEQ ID NO: 6220 - protein, 902 aa, Homo sapiens; identical to SEQ ID NO: 6216

SEQ ID NO: 6221 - protein, 884 aa, Homo sapiens; identical to SEQ ID NO: 6218

SEQ ID NO: 6222 - protein, 104 aa, Homo sapiens
  SITE 1: note = misc_feature - Xaa can be any naturally occurring amino acid
XVARVRKSKGKFAFLLESTMNEYIEQRKPCDTMKVGGNLDSKGYGVATPKGSSLRNAVNLAVLKLNEQGLLDKLKNKWWYDKGECGSGGGDSKNSCKPCRFETQ

SEQ ID NO: 6223 - protein, 180 aa, Homo sapiens
CSHEMAAGILKQALAMGMMTEYYHYIFTTLTDAALMYDAVHVVSVAVQQFPQMTVSSLQCNRHKPWRFGTRFMSLIKEAHWEGLTGRITFNKTNGLRTDFDLDVISLKEEGLEKIGTWDPASGLNMTESQKGKPANITDSLSNRSLIVTTILEEPYVLFKKSDKPLYGNDRFEGYCIDLL

SEQ ID NO: 6224 - protein, 854 aa, Homo sapiens
GGIFEYVESGPMGAEELAFRFAVNTINRNRTLLPNTTLTYDTQKINLYDSFEASKKACDQLSLGVAAIFGPSHSSSANAVQSICNALGVPHIQTRWKHQVSDNKDSFYVSLYPDFSSLSRAILDLVQFFKWKTVTVVYDDSTGLIRLQELIKAPSRYNLRLKIRQLPADTKDAKPLLKEMKRGKEFHVIFDCSHEMAAGILKQALAMGMMTEYYHYIFTTLDLFALDVEPYRYSGVNMTGFRILNTENTQVSSIIEKWSMERLQAPPKPDSGLLDGFMTTDAALMYDAVHVVSVAVQQFPQMTVSSLQCNRHKPWRFGTRFMSLIKEAHWEGLTGRITFNKTNGLRTDFDLDVISLKEEGLEKIGTWDPASGLNMTESQKGKPANITDSLSNRSLIVTTILEEPYVLFKKSDKPLYGNDRFEGYCIDLLRELSTILGFTYEIRLVEDGKYGAQDDANGQWNGMVRELIDHKADLAVAPLAITYVREKVIDFSKPFMTLGISILYRKPNGTNPGVFSFLNPLSPDIWMYILLAYLGVSCVLFVIARFSPYEWYNPHPCNPDSDVVENNFTLLNSFWFGVGALMQQGSELMPKALSTRIVGGIWWFFTLIIISSYTANLAAFLTVERMESPIDSADDLAKQTKIEYGAVEDGATMTFFKKSKISTYDKMWAFMSSRRQSVLVKSNEEGIQRVLTSDYAFLMESTTIEFVTQRNCNLTQIGGLIDSKGYGVGTPMGSPYRDKITIAILQLQEEGKLHMMKEKWWRGNGCPEEESKEASALGVQNIGGIFIVLAAGLVLSVFVAVGEFLYKSKKNAQLEKRAKTKLPQDYVFLPILESVSISTVLSSSPSSSSLSSCS

SEQ ID NO: 6225 - protein, 870 aa, Homo sapiens
GGIFEYVESGPMGAEELAFRFAVNTINRNRTLLPNTTLTYDTQKINLYDSFEASKKACDQLSLGVAAIFGPSHSSSANAVQSICNALGVPHIQTRWKHQVSDNKDSFYVSLYPDFSSLSRAILDLVQFFKWKTVTVVYDDSTGLIRLQELIKAPSRYNLRLKIRQLPADTKDAKPLLKEMKRGKEFHVIFDCSHEMAAGILKQALAMGMMTEYYHYIFTTLDLFALDVEPYRYSGVNMTGFRILNTENTQVSSIIEKWSMERLQAPPKPDSGLLDGFMTTDAALMYDAVHVVSVAVQQFPQMTVSSLQCNRHKPWRFGTRFMSLIKEAHWEGLTGRITFNKTNGLRTDFDLDVISLKEEGLEKIGTWDPASGLNMTESQKGKPANITDSLSNRSLIVTTILEEPYVLFKKSDKPLYGNDRFEGYCIDLLRELSTILGFTYEIRLVEDGKYGAQDDANGQWNGMVRELIDHKADLAVAPLAITYVREKVIDFSKPFMTLGISILYRKPNGTNPGVFSFLNPLSPDIWMYILLAYLGVSCVLFVIARFSPYEWYNPHPCNPDSDVVENNFTLLNSFWFGVGALMQQGSELMPKALSTRIVGGIWWFFTLIIISSYTANLAAFLTVERMESPIDSADDLAKQTKIEYGAVEDGATMTFFKKSKISTYDKMWAFMSSRRQSVLVKSNEEGIQRVLTSDYAFLMESTTIEFVTQRNCNLTQIGGLIDSKGYGVGTPMGSPYRDKITIAILQLQEEGKLHMMKEKWWRGNGCPEEESKEASALGVQNIGGIFIVLAAGLVLSVFVAVGEFLYKSKKNAQLEKRSFCSAMVEELRMSLKCQRRLKHKPQAPVIVKTEEVINMHTFNDRRLPGKETMA

SEQ ID NO: 6226 - protein, 831 aa, Homo sapiens
GGIFEYVESGPMGAEELAFRFAVNTINRNRTLLPNTTLTYDTQKINLYDSFEASKKACDQLSLGVAAIFGPSHSSSANAVQSICNALGVPHIQTRWKHQVSDNKDSFYVSLYPDFSSLSRAILDLVQFFKWKTVTVVYDDSTGLIRLQELIKAPSRYNLRLKIRQLPADTKDAKPLLKEMKRGKEFHVIFDCSHEMAAGILKQALAMGMMTEYYHYIFTTLDLFALDVEPYRYSGVNMTGFRILNTENTQVSSIIEKWSMERLQAPPKPDSGLLDGFMTTDAALMYDAVHVVSVAVQQFPQMTVSSLQCNRHKPWRFGTRFMSLIKEAHWEGLTGRITFNKTNGLRTDFDLDVISLKEEGLEKIGTWDPASGLNMTESQKGKPANITDSLSNRSLIVTTILEEPYVLFKKSDKPLYGNDRFEGYCIDLLRELSTILGFTYEIRLVEDGKYGAQDDANGQWNGMVRELIDHKADLAVAPLAITYVREKVIDFSKPFMTLGISILYRKPNGTNPGVFSFLNPLSPDIWMYILLAYLGVSCVLFVIARFSPYEWYNPHPCNPDSDVVENNFTLLNSFWFGVGALMQQGSELMPKALSTRIVGGIWWFFTLIIISSYTANLAAFLTVERMESPIDSADDLAKQTKIEYGAVEDGATMTFFKKSKISTYDKMWAFMSSRRQSVLVKSNEEGIQRVLTSDYAFLMESTTIEFVTQRNCNLTQIGGLIDSKGYGVGTPMGSPYRDKITIAILQLQEEGKLHMMKEKWWRGNGCPEEESKEASALGVQNIGGIFIVLAAGLVLSVFVAVGEFLYKSKKNAQLEKESSIWLVPPYHPDTV

SEQ ID NO: 6227 - protein, 182 aa, Homo sapiens
IGTWDPASGLNMTESQKGKPANITDSLSNRSLIVTTILEEPYVLFKKSDKPLYGNDRFEGYCIDLLRELSTILGFTYEIRLVEDGKYGAQDDANGQWNGMVRELIDHKADLAVAPLAITYVREKVIDFSKPFMTLGISILYRKPNGTNPGVFSFLNPLSPDIWMYILLAYLGVSCVLFVIAR

SEQ ID NO: 6228 - protein, 892 aa, Homo sapiens
MKIIFPILSNPVFRRTVKLLLCLLWIGYSQGTTHVLRFGGIFEYVESGPMGAEELAFRFAVNTINRNRTLLPNTTLTYDTQKINLYDSFEASKKACDQLSLGVAAIFGPSHSSSANAVQSICNALGVPHIQTRWKHQVSDNKDSFYVSLYPDFSSLSRAILDLVQFFKWKTVTVVYDDSTGLIRLQELIKAPSRYNLRLKIRQLPADTKDAKPLLKEMKRGKEFHVIFDCSHEMAAGILKQALAMGMMTEYYHYIFTTLDLFALDVEPYRYSGVNMTGFRILNTENTQVSSIIEKWSMERLQAPPKPDSGLLDGFMTTDAALMYDAVHVVSVAVQQFPQMTVSSLQCNRHKPWRFGTRFMSLIKEAHWEGLTGRITFNKTNGLRTDFDLDVISLKEEGLEKIGTWDPASGLNMTESQKGKPANITDSLSNRSLIVTTILEEPYVLFKKSDKPLYGNDRFEGYCIDLLRELSTILGFTYEIRLVEDGKYGAQDDANGQWNGMVRELIDHKADLAVAPLAITYVREKVIDFSKPFMTLGISILYRKPNGTNPGVFSFLNPLSPDIWMYILLAYLGVSCVLFVIARFSPYEWYNPHPCNPDSDVVENNFTLLNSFWFGVGALMQQGSELMPKALSTRIVGGIWWFFTLIIISSYTANLAAFLTVERMESPIDSADDLAKQTKIEYGAVEDGATMTFFKKSKISTYDKMWAFMSSRRQSVLVKSNEEGIQRVLTSDYAFLMESTTIEFVTQRNCNLTQIGGLIDSKGYGVGTPMGSPYRDKITIAILQLQEEGKLHMMKEKWWRGNGCPEEESKEASALGVQNIGGIFIVLAAGLVLSVFVAVGEFLYKSKKNAQLEKRAKTKLPQDYVFLPILESVSISTVLSSSPSSSSLSSCS

SEQ ID NO: 6229 - protein, 353 aa, Homo sapiens
MKIIFPILSNPVFRRTVKLLLCLLWIGYSQGTTHVLRFGGIFEYVESGPMGAEELAFRFAVNTINRNRTLLPNTTLTYDTQKINLYDSFEASKKACDQLSLGVAAIFGPSHSSSANAVQSICNALGVPHIQTRWKHQVSDNKDSFYVSLYPDFSSLSRAILDLVQFFKWKTVTVVYDDSTGLIRLQELIKAPSRYNLRLKIRQLPADTKDAKPLLKEMKRGKEFHVIFDCSHEMAAGILKQALAMGMMTEYYHYIFTTLDLFALDVEPYRYSGVNMTGFRILNTENTQVSSIIEKWSMERLQAPPKPDSGLLDGFMTMEFHSCCPGWSAMARSQLTATSASWVQAILLPQPPE

SEQ ID NO: 6230 - protein, 869 aa, Homo sapiens
MKIIFPILSNPVFRRTVKLLLCLLWIGYSQGTTHVLRFGGIFEYVESGPMGAEELAFRFAVNTINRNRTLLPNTTLTYDTQKINLYDSFEASKKACDQLSLGVAAIFGPSHSSSANAVQSICNALGVPHIQTRWKHQVSDNKDSFYVSLYPDFSSLSRAILDLVQFFKWKTVTVVYDDSTGLIRLQELIKAPSRYNLRLKIRQLPADTKDAKPLLKEMKRGKEFHVIFDCSHEMAAGILKQALAMGMMTEYYHYIFTTLDLFALDVEPYRYSGVNMTGFRILNTENTQVSSIIEKWSMERLQAPPKPDSGLLDGFMTTDAALMYDAVHVVSVAVQQFPQMTVSSLQCNRHKPWRFGTRFMSLIKEAHWEGLTGRITFNKTNGLRTDFDLDVISLKEEGLEKIGTWDPASGLNMTESQKGKPANITDSLSNRSLIVTTILEEPYVLFKKSDKPLYGNDRFEGYCIDLLRELSTILGFTYEIRLVEDGKYGAQDDANGQWNGMVRELIDHKADLAVAPLAITYVREKVIDFSKPFMTLGISILYRKPNGTNPGVFSFLNPLSPDIWMYILLAYLGVSCVLFVIARFSPYEWYNPHPCNPDSDVVENNFTLLNSFWFGVGALMQQGSELMPKALSTRIVGGIWWFFTLIIISSYTANLAAFLTVERMESPIDSADDLAKQTKIEYGAVEDGATMTFFKKSKISTYDKMWAFMSSRRQSVLVKSNEEGIQRVLTSDYAFLMESTTIEFVTQRNCNLTQIGGLIDSKGYGVGTPMGSPYRDKITIAILQLQEEGKLHMMKEKWWRGNGCPEEESKEASALGVQNIGGIFIVLAAGLVLSVFVAVGEFLYKSKKNAQLEKESSIWLVPPYHPDTV

SEQ ID NO: 6231 - protein, 908 aa, Homo sapiens
MKIIFPILSNPVFRRTVKLLLCLLWIGYSQGTTHVLRFGGIFEYVESGPMGAEELAFRFAVNTINRNRTLLPNTTLTYDTQKINLYDSFEASKKACDQLSLGVAAIFGPSHSSSANAVQSICNALGVPHIQTRWKHQVSDNKDSFYVSLYPDFSSLSRAILDLVQFFKWKTVTVVYDDSTGLIRLQELIKAPSRYNLRLKIRQLPADTKDAKPLLKEMKRGKEFHVIFDCSHEMAAGILKQALAMGMMTEYYHYIFTTLDLFALDVEPYRYSGVNMTGFRILNTENTQVSSIIEKWSMERLQAPPKPDSGLLDGFMTTDAALMYDAVHVVSVAVQQFPQMTVSSLQCNRHKPWRFGTRFMSLIKEAHWEGLTGRITFNKTNGLRTDFDLDVISLKEEGLEKIGTWDPASGLNMTESQKGKPANITDSLSNRSLIVTTILEEPYVLFKKSDKPLYGNDRFEGYCIDLLRELSTILGFTYEIRLVEDGKYGAQDDANGQWNGMVRELIDHKADLAVAPLAITYVREKVIDFSKPFMTLGISILYRKPNGTNPGVFSFLNPLSPDIWMYILLAYLGVSCVLFVIARFSPYEWYNPHPCNPDSDVVENNFTLLNSFWFGVGALMQQGSELMPKALSTRIVGGIWWFFTLIIISSYTANLAAFLTVERMESPIDSADDLAKQTKIEYGAVEDGATMTFFKKSKISTYDKMWAFMSSRRQSVLVKSNEEGIQRVLTSDYAFLMESTTIEFVTQRNCNLTQIGGLIDSKGYGVGTPMGSPYRDKITIAILQLQEEGKLHMMKEKWWRGNGCPEEESKEASALGVQNIGGIFIVLAAGLVLSVFVAVGEFLYKSKKNAQLEKRSFCSAMVEELRMSLKCQRRLKHKPQAPVIVKTEEVINMHTFNDRRLPGKETMA

SEQ ID NO: 6232 - protein, 46 aa, Homo sapiens
ANLAAFMIQEEYVDQVSGLSDKKMRTLRLRRSIFPKVTKLVTEPGF

SEQ ID NO: 6233 - protein, 35 aa, Homo sapiens
MKPRAECCSPKFWLVLAVLAVSGSRARSQKSPPSI

SEQ ID NO: 6234 - protein, 35 aa, Homo sapiens; identical to SEQ ID NO: 6233

SEQ ID NO: 6235 - protein, 1484 aa, Homo sapiens [sequence omitted]

SEQ ID NO: 6236 - protein, 70 aa, Homo sapiens [sequence omitted]

SEQ ID NO: 6237 - protein, 435 aa, Homo sapiens
MGSLLALLALLLLWGAVAEGPAKKVLTLEGDLVLGGLFPVHQKGGPAEDCGPVNEHRGIQRLEAMLFALDRINRDPHLLPGVRLGAHILDSCSKDTHALEQALDFVRASLSRGADGSRHICPDGSYATHGDAPTAITGVIGGSYSDVSIQVANLLRLFQIPQISYASTSAKLSDKSRYDYFARTVPPDFFQAKAMAEILRFFNWTYVSTVASEGDYGETGIEAFELEARARNICVATSEKVGRAMSRAAFEGVVRALLQKPSARVAVLFTRSEDARELLAASQRLNASFTWVASDGWGALESVVAGSEGAAEGAITIELASYPISDFASYFQSLDPWNNSRNPWFREFWEQRFRCSFRQRDCAAHSLRAVPFEQESKIMFVVNAVYAMAHALHNMHRALCPNTTRLCDAMRPVNGRRLYKDFVLNVKFDGDLKVS

SEQ ID NO: 6238 - protein, 872 aa, Homo sapiens [sequence omitted]

SEQ ID NO: 6239 - protein, 594 aa, Homo sapiens
MGSLLALLALLLLWGAVAEGPAKKVLTLEGDLVLGGLFPVHQKGGPAEDCGPVNEHRGIQRLEAMLFALDRINRDPHLLPGVRLGAHILDSCSKDTHALEQALDFVRASLSRGADGSRHICPDGSYATHGDAPTAITGVIGGSYSDVSIQVANLLRLFQIPQISYASTSAKLSDKSRYDYFARTVPPDFFQAKAMAEILRFFNWTYVSTVASEGDYGETGIEAFELEARARNICVATSEKVGRAMSRAAFEGVVRALLQKPSARVAVLFTRSEDARELLAASQRLNASFTWVASDGWGALESVVAGSEGAAEGAITIELASYPISDFASYFQSLDPWNNSRNPWFREFWEQRFRCSFRQRDCAAHSLRAVPFEQESKIMFVVNAVYAMAHALHNMHRALCPNTTRLCDAMRPVNGRRLYKDFVLNVKFDAPFRPADTHNEVRFDRFGDGIGRYNIFTYLRAGSGRYRYQKTRKCPENFNEAKFIGFTMYTTCIIWLAFLPIFYVTSSDYRVQTTTMCVSVSLSGSVVLGCLFAPKLHIILFQPQKNVVSHRAPTSRFGSAAARASSSLGQGSGSQFVPTVCNGREVVDSTTSSL

SEQ ID NO: 6240 - protein, 81 aa, Homo sapiens
MKMLTRLQVLTLALFSKGFLLSLGDHNFLRREIKIEGDLVLGGLFPINEKGTGTEECGRINEDRGIQRLEAMLFAIDEINK

SEQ ID NO: 6241 - protein, 87 aa, Homo sapiens
MKMLTRLQVLTLALFSKGFLLSLGDHNFLRREIKIEGDLVLGGLFPINEKGTGTEECGRINEDRGIQRLEAMLFAIDEINKDDYLLP

SEQ ID NO: 6242 - protein, 879 aa, Homo sapiens
MKMLTRLQVLTLALFSKGFLLSLGDHNFLRREIKIEGDLVLGGLFPINEKGTGTEECGRINEDRGIQRLEAMLFAIDEINKDDYLLPGVKLGVHILDTCSRDTYALEQSLEFVRASLTKVDEAEYMCPDGSYAIQENIPLLIAGVIGGSYSSVSIQVANLLRLFQIPQISYASTSAKLSDKSRYDYFARTVPPDFYQAKAMAEILRFFNWTYVSTVASEGDYGETGIEAFEQEARLRNICIATAEKVGRSNIRKSYDSVIRELLQKPNARVVVLFMRSDDSRELIAAASRANASFTWVASDGWGAQESIIKGSEHVAYGAITLELASQPVRQFDRYFQSLNPYNNHRNPWFRDFWEQKFQCSLQNKRNHRRVCDKHLAIDSSNYEQESKIMFVVNAVYAMAHALHKMQRTLCPNTTKLCDAMKILDGKKLYKDYLLKINFTAPFNPNKDADSIVKFDTFGDGMGRYNVFNFQNVGGKYSYLKVGHWAETLSLDVNSIHWSRNSVPTSQCSDPCAPNEMKNMQPGDVCCWICIPCEPYEYLADEFTCMDCGSGQWPTADLTGCYDLPEDYIRWEDAWAIGPVTIACLGFMCTCMVVTVFIKHNNTPLVKASGRELCYILLFGVGLSYCMTFFFIAKPSPVICALRRLGLGSSFAICYSALLTKTNCIARIFDGVKNGAQRPKFISPSSQVFICLGLILVQIVMVSVWLILEAPGTRRYTLAEKRETVILKCNVKDSSMLISLTYDVILVILCTVYAFKTRKCPENFNEAKFIGFTMYTTCIIWLAFLPIFYVTSSDYRVQTTTMCISVSLSGFVVLGCLFAPKVHIILFQPQKNVVTHRLHLNRFSVSGTGTTYSQSSASTYVPTVCNGREVLDSTTSSL

SEQ ID NO: 6243 - protein, 537 aa, Homo sapiens
MKMLTRLQVLTLALFSKGFLLSLGDHNFLRREIKIEGDLVLGGLFPINEKGTGTEECGRINEDRGIQRLEAMLFAIDEINKDDYLLPGVKLGVHILDTCSRDTYALEQSLEFVRASLTKVDEAEYMCPDGSYAIQENIPLLIAGVIGGSYSSVSIQVANLLRLFQIPQISYASTSAKLSDKSRYDYFARTVPPDFYQAKAMAEILRFFNWTYVSTVASEGDYGETGIEAFEQEARLRNICIATAEKVGRSNIRKSYDSVIRELLQKPNARVVVLFMRSDDSRELIAAASRANASFTWVASDGWGAQESIIKGSEHVAYGAITLELASQPVRQFDRYFQSLNPYNNHRNPWFRDFWEQKFQCSLQNKRNHRRVCDKHLAIDSSNYEQESKIMFVVNAVYAMAHALHKMQRTLCPNTTKLCDAMKILDGKKLYKDYLLKINFTGADDNHVHLCQPEWLCGLGLFVCTQGSHHPVSTPEECCHTQTAPQQVQCQWNWDHILSVLCKHVCANGVQWAGSPRLHHLISVIVNCSSVLVFLDC

SEQ ID NO: 6244 - protein, 171 aa, Homo sapiens
MSQSPGAGSPPPLPPRSAPVPARSCRCEVANLLRLFQIPQISYASTSAKLSDKSRYDYFARTVPPDFYQAKAMAEILRFFNWTYVSTVASEGDYGETGIEAFEQEARLRNICIATAEKVGRSNIRKSYDSVIRELLQKPNARVVVLFMRSDDSRELIAAASRANASFTWVA

SEQ ID NO: 6245 - protein, 1212 aa, Homo sapiens
MVLLLILSVLLLKEDVRGSAQSSERRVVAHMPGDIIIGALFSVHHQPTVDKVHERKCGAVREQYGIQRVEAMLHTLERINSDPTLLPNITLGCEIRDSCWHSAVALEQSIEFIRDSLISSEEEEGLVRCVDGSSSSFRSKKPIVGVIGPGSSSVAIQVQNLLQLFNIPQIAYSATSMDLSDKTLFKYFMRVVPSDAQQARAMVDIVKRYNWTYVSAVHTEGNYGESGMEAFKDMSAKEGICIAHSYKIYSNAGEQSFDKLLKKLTSHLPKARVVACFCEGMTVRGLLMAMRRLGLAGEFLLLGSDGWADRYDVTDGYQREAVGGITIKLQSPDVKWFDDYYLKLRPETNHRNPWFQEFWQHRFQCRLEGFPQENSKYNKTCNSSLTLKTHHVQDSKMGFVINAIYSMAYGLHNMQMSLCPGYAGLCDAMKPIDGRKLLESLMKTNFTGVSGDTILFDENGDSPGRYEIMNFKEMGKDYFDYINVGSWDNGELKMDDDEVWSKKSNIIRSVCSEPCEKGQIKVIRKGEVSCCWTCTPCKENEYVFDEYTCKACQLGSWPTDDLTGCDLIPVQYLRWGDPEPIAAVVFACLGLLATLFVTVVFIIYRDTPVVKSSSRELCYIILAGICLGYLCTFCLIAKPKQIYCYLQRIGIGLSPAMSYSALVTKTNRIARILAGSKKKICTKKPRFMSACAQLVIAFILICIQLGIIVALFIMEPPDIMHDYPSIREVYLICNTTNLGVVTPLGYNGLLILSCTFYAFKTRNVPANFNEAKYIAFTMYTTCIIWLAFVPIYFGSNYKIITMCFSVSLSATVALGCMFVPKVYIILAKPERNVRSAFTTSTVVRMHVGDGKSSSAASRSSSLVNLWKRRGSSGETLRYKDRRLAQHKSEIECFTPKGSMGNGGRATMSSSNGKSVTWAQNEKSSRGQHLWQRLSIHINKKENPNQTAVIKPFPKSTESRGLGAGAGAGGSAGGVGATGGAGCAGAGPGGPESPDAGPKALYDVAEAEEHFPAPARPRSPSPISTLSHRAGSASRTDDDVPSLHSEPVARSSSSQGSLMEQISSVVTRFTANISELNSMMLSTAAPSPGVGAPLCSSYLIPKEIQLPTTMTTFAEIQPLPAIEVTGGAQPAAGAQAAGDAARESPAAGPEAAAAKPDLEELVALTPPSPFRDSVDSGSTTPNSPVSESALCIPSSPKYDTLIIRDYTQSSSSL

SEQ ID NO: 6246 - protein, 1180 aa, Homo sapiens
MVLLLILSVLLLKEDVRGSAQSSERRVVAHMPGDIIIGALFSVHHQPTVDKVHERKCGAVREQYGIQRVEAMLHTLERINSDPTLLPNITLGCEIRDSCWHSAVALEQSIEFIRDSLISSEEEEGLVRCVDGSSSSFRSKKPIVGVIGPGSSSVAIQVQNLLQLFNIPQIAYSATSMDLSDKTLFKYFMRVVPSDAQQARAMVDIVKRYNWTYVSAVHTEGNYGESGMEAFKDMSAKEGICIAHSYKIYSNAGEQSFDKLLKKLTSHLPKARVVACFCEGMTVRGLLMAMRRLGLAGEFLLLGSDGWADRYDVTDGYQREAVGGITIKLQSPDVKWFDDYYLKLRPETNHRNPWFQEFWQHRFQCRLEGFPQENSKYNKTCNSSLTLKTHHVQDSKMGFVINAIYSMAYGLHNMQMSLCPGYAGLCDAMKPIDGRKLLESLMKTNFTGVSGDTILFDENGDSPGRYEIMNFKEMGKDYFDYINVGSWDNGELKMDDDEVWSKKSNIIRSVCSEPCEKGQIKVIRKGEVSCCWTCTPCKENEYVFDEYTCKACQLGSWPTDDLTGCDLIPVQYLRWGDPEPIAAVVFACLGLLATLFVTVVFIIYRDTPVVKSSSRELCYIILAGICLGYLCTFCLIAKPKQIYCYLQRIGIGLSPAMSYSALVTKTNRIARILAGSKKKICTKKPRFMSACAQLVIAFILICIQLGIIVALFIMEPPDIMHDYPSIREVYLICNTTNLGVVTPLGYNGLLILSCTFYAFKTRNVPANFNEAKYIAFTMYTTCIIWLAFVPIYFGSNYKIITMCFSVSLSATVALGCMFVPKVYIILAKPERNVRSAFTTSTVVRMHVGDGKSSSAASRSSSLVNLWKRRGSSGETLSSNGKSVTWAQNEKSSRGQHLWQRLSIHINKKENPNQTAVIKPFPKSTESRGLGAGAGAGGSAGGVGATGGAGCAGAGPGGPESPDAGPKALYDVAEAEEHFPAPARPRSPSPISTLSHRAGSASRTDDDVPSLHSEPVARSSSSQGSLMEQISSVVTRFTANISELNSMMLSTAAPSPGVGAPLCSSYLIPKEIQLPTTMTTFAEIQPLPAIEVTGGAQPAAGAQAAGDAARESPAAGPEAAAAKPDLEELVALTPPSPFRDSVDSGSTTPNSPVSESALCIPSSPKYDTLIIRDYTQSSSSL

SEQ ID NO: 6247 - protein, 1180 aa, Homo sapiens; identical to SEQ ID NO: 6246

SEQ ID NO: 6248 - protein, 298 aa, Homo sapiens
MVLLLILSVLLLKEDVRGSAQSSERRVVAHMPGDIIIGALFSVHHQPTVDKVHERKCGAVREQYGIQRVEAMLHTLERINSDPTLLPNITLGCEIRDSCWHSAVALEQSIEFIRDSLISSEEEEGLVRCVDGSSSSFRSKKPIVGVIGPGSSSVAIQVQNLLQLFNIPQIAYSATSMDLSDKTLFKYFMRVVPSDAQQARAMVDIVKRYNWTYVSAVHTEGRGTKKEEMRKRDQTLMLSFMRCVFLRFEEIRWNDSLVYDALENENIQVLSLCFPSSAVIQINTFLSPIALINRLNVT

SEQ ID NO: 6249 - protein, 87 aa, Homo sapiens
  SITE 1: note = misc_feature - Xaa can be any naturally occurring amino acid
XQIAYSATSMDLSDKTLFKYFMRVVPSDAQQARAMVDIVKRYNWTYVSAVHTEGRGTKKEEMRKRDQTLMLSFMRFKLFSCLSLQRS

SEQ ID NO: 6250 - protein, 37 aa, Homo sapiens
MWTLVSWVALTAGLVAGTRCPDGQFCPVACCLDPGGA

SEQ ID NO: 6251 - protein, 62 aa, Homo sapiens
MWTLVSWVALTAGLVAGTRCPDGQFCPVACCLDPGGASYSCCRPLLDKWPTTLSRHLGGPCQ

SEQ ID NO: 6252 - protein, 172 aa, Homo sapiens
MWTLVSWVALTAGLVAGTRCPDGQFCPVACCLDPGGASYSCCRPLLDKWPTTLSRHLGGPCQVDAHCSAGHSCIFTVSGTSSCCPFPEASCCEDRVHCCPHGAFCDLVHTRCITPTGTHPLAKKLPAQRTNRAVALSSSVMCPDARSRCPDGSTCCELPSGKYGCCPMPNAT

SEQ ID NO: 6253 - protein, 111 aa, Homo sapiens
MWTLVSWVALTAGLVAGTRCPDGQFCPVACCLDPGGASYSCCRPLLDKWPTTLSRHLGGPCQVDAHCSAGHSCIFTVSGTSSCCPFPEAVACGDGHHCCPRGFHCSADGRS

SEQ ID NO: 6254 - protein, 135 aa, Homo sapiens
MWTLVSWVALTAGLVAGTRCPDGQFCPVACCLDPGGASYSCCRPLLDKWPTTLSRHLGGPCQVDAHCSAGHSCIFTVSGTSSCCPFPEAVACGDGHHCCPRGFHCSADGRSCFQRSGNNSVGAIQCPDSQFECPD

SEQ ID NO: 6255 - protein, 136 aa, Homo sapiens
MWTLVSWVALTAGLVAGTRCPDGQFCPVACCLDPGGASYSCCRPLLDKWPTTLSRHLGGPCQVDAHCSAGHSCIFTVSGTSSCCPFPEAVACGDGHHCCPRGFHCSADGRSCFQRSGNNSVGAIQCPDSQFECPDF

SEQ ID NO: 6256 - protein, 142 aa, Homo sapiens
MWTLVSWVALTAGLVAGTRCPDGQFCPVACCLDPGGASYSCCRPLLDKWPTTLSRHLGGPCQVDAHCSAGHSCIFTVSGTSSCCPFPEAVACGDGHHCCPRGFHCSADGRSCFQRSGNNSVGAIQCPDSQFECPDFSTCCVM

SEQ ID NO: 6257 - protein, 149 aa, Homo sapiens
MWTLVSWVALTAGLVAGTRCPDGQFCPVACCLDPGGASYSCCRPLLDKWPTTLSRHLGGPCQVDAHCSAGHSCIFTVSGTSSCCPFPEAVACGDGHHCCPRGFHCSADGRSCFQRSGNNSVGAIQCPDSQFECPDFSTCCVMVDGSWGC

SEQ ID NO: 6258 - protein, 163 aa, Homo sapiens
MWTLVSWVALTAGLVAGTRCPDGQFCPVACCLDPGGASYSCCRPLLDKWPTTLSRHLGGPCQVDAHCSAGHSCIFTVSGTSSCCPFPEAVACGDGHHCCPRGFHCSADGRSCFQRSGNNSVGAIQCPDSQFECPDFSTCCVMVDGSWGCCPMPQASCCEDRVH

SEQ ID NO: 6259 - protein, 593 aa, Homo sapiens
MWTLVSWVALTAGLVAGTRCPDGQFCPVACCLDPGGASYSCCRPLLDKWPTTLSRHLGGPCQVDAHCSAGHSCIFTVSGTSSCCPFPEAVACGDGHHCCPRGFHCSADGRSCFQRSGNNSVGAIQCPDSQFECPDFSTCCVMVDGSWGCCPMPQASCCEDRVHCCPHGAFCDLVHTRCITPTGTHPLAKKLPAQRTNRAVALSSSVMCPDARSRCPDGSTCCELPSGKYGCCPMPNATCCSDHLHCCPQDTVCDLIQSKCLSKENATTDLLTKLPAHTVGDVKCDMEVSCPDGYTCCRLQSGAWGCCPFTQAVCCEDHIHCCPAGFTCDTQKGTCEQGPHQVPWMEKAPAHLSLPDPQALKRDVPCDNVSSCPSSDTCCQLTSGEWGCCPIPEAVCCSDHQHCCPQGYTCVAEGQCQRGSEIVAGLEKMPARRASLSHPRDIGCDQHTSCPVGQTCCPSLGGSWACCQLPHAVCCEDRQHCCPAGYTCNVKARSCEKEVVSAQPATFLARSPHVGVKDVECGEGHFCHDNQTCCRDNRQGWACCPYRQGVCCADRRHCCPAGFRCAARGTKCLRREAPRWDAPLRDPALRQLL

SEQ ID NO: 6260 - protein, 438 aa, Homo sapiens
MWTLVSWVALTAGLVAGTRCPDGQFCPVACCLDPGGASYSCCRPLLDKWPTTLSRHLGGPCQVDAHCSAGHSCIFTVSGTSSCCPFPEAVACGDGHHCCPRGFHCSADGRSCFQRSGNNSVGAIQCPDSQFECPDFSTCCVMVDGSWGCCPMPQASCCEDRVHCCPHGAFCDLVHTRCITPTGTHPLAKKLPAQRTNRAVALSSSVMCPDARSRCPDGSTCCELPSGKYGCCPMPNATCCSDHLHCCPQDTVCDLIQSKCLSKENATTDLLTKLPAHTVGDVKCDMEVSCPDGYTCCRLQSGAWGCCPFTQAVCCEDHIHCCPAGFTCDTQKGTCEQGPHQVPWMEKAPAHLSLPDPQALKRDVPCDNVSSCPSSDTCCRDNRQGWACCPYRQGVCCADRRHCCPAGFRCAARGTKCLRREAPRWDAPLRDPALRQLL

SEQ ID NO: 6261 - protein, 436 aa, Homo sapiens
MWTLVSWVALTAGLVAGTRCPDGQFCPVACCLDPGGASYSCCRPLLDKWPTTLSRHLGGPCQVDAHCSAGHSCIFTVSGTSSCCPFPEAVACGDGHHCCPRGFHCSADGRSCFQRSGNNSVGAIQCPDSQFECPDFSTCCVMVDGSWGCCPMPQAVCCEDHIHCCPAGFTCDTQKGTCEQGPHQVPWMEKAPAHLSLPDPQALKRDVPCDNVSSCPSSDTCCQLTSGEWGCCPIPEAVCCSDHQHCCPQGYTCVAEGQCQRGSEIVAGLEKMPARRASLSHPRDIGCDQHTSCPVGQTCCPSLGGSWACCQLPHAVCCEDRQHCCPAGYTCNVKARSCEKEVVSAQPATFLARSPHVGVKDVECGEGHFCHDNQTCCRDNRQGWACCPYRQGVCCADRRHCCPAGFRCAARGTKCLRREAPRWDAPLRDPALRQLL

SEQ ID NO: 6262 - protein, 189 aa, Homo sapiens
MWTLVSWVALTAGLVAGTRCPDGQFCPVACCLDPGGASYSCCRPLLDKWPTTLSRHLGGPCQVDAHCSAGHSCIFTVSGTSSCCPFPEAVACGDGHHCCPRGFHCSADGRSCFQRSGNNSVGAIQCPDSQFECPDFSTCCVMVDGSWGCCPMPQGALLSARCLLRPGSHPLHHTHGHPPPGKEAPCPED

SEQ ID NO: 6263 - protein, 191 aa, Homo sapiens
MWTLVSWVALTAGLVAGTRCPDGQFCPVACCLDPGGASYSCCRPLLDKWPTTLSRHLGGPCQVDAHCSAGHSCIFTVSGTSSCCPFPEIKGPCQCRFLCVPQAVACGDGHHCCPRGFHCSADGRSCFQRSGNNSVGAIQCPDSQFECPDFSTCCVMVDGSWGCCPMPQASCCEDRVHCCPHGAFCDLVHTR

SEQ ID NO: 6264 - protein, 388 aa, Homo sapiens
  SITE 1: note = misc_feature - Xaa can be any naturally occurring amino acid
XAKKLPAQRTNRAVALSSSVMCPDARSRCPDGSTCCELPSGKYGCCPMPNATCCSDHLHCCPQDTVCDLIQSKCLSKENATTDLLTKLPAHTVGDVKCDMEVSCPDGYTCCRLQSGAWGCCPFTQAVCCEDHIHCCPAGFTCDTQKGTCEQGPHQVPWMEKAPAHLSLPDPQALKRDVPCDNVSSCPSSDTCCQLTSGEWGCCPIPEAVCCSDHQHCCPQGYTCVAEGQCQRGSEIVAGLEKMPARRASLSHPRDIGCDQHTSCPVGQTCCPSLGGSWACCQLPHAVCCEDRQHCCPAGYTCNVKARSCEKEVVSAQPATFLARSPHVGVKDVECGEGHFCHDNQTCCRDNRQGWACCPYRQVSANPHPGAGYGQGPGPTSSNPLAPL

SEQ ID NO: 6265 - protein, 110 aa, Homo sapiens
  SITE 1: note = misc_feature - Xaa can be any naturally occurring amino acid
XCPSLGGSWACCQLPHAVCCEDRQHCCPAGYTCNVKARSCEKEVVSAQPATFLARSPHVGVKDVECGEGHFCHDNQTCCRDNRQGWACCPYRQPGVPSVCAGRPRAGTPL

SEQ ID NO: 6266 - protein, 138 aa, Homo sapiens
MRGRELPLVLLALVLCLAPRGRAVPLPAGGGTVLTKMYPRGNHWAVGHLMGKKSTGESSSVSERGSLKQQLREYIRWEEAARNLLGLIEAKENRNHQPPQPKALGNQQPSWDSEDSSNFKDLVDSLLQVLNVKEGTPS

SEQ ID NO: 6267 - protein, 141 aa, Homo sapiens
MRGRELPLVLLALVLCLAPRGRAVPLPAGGGTVLTKMYPRGNHWAVGHLMGKKSTGESSSVSERGSLKQQLREYIRWEEAARNLLGLIEAKENRNHQPPQPKALGNQQPSWDSEDSSNFKDVGSKGKGSQREGRNPQLNQQ

SEQ ID NO: 6268 - protein, 148 aa, Homo sapiens
MRGRELPLVLLALVLCLAPRGRAVPLPAGGGTVLTKMYPRGNHWAVGHLMGKKSTGESSSVSERGSLKQQLREYIRWEEAARNLLGLIEAKENRNHQPPQPKALGNQQPSWDSEDSSNFKDVGSKGKVGRLSAPGSQREGRNPQLNQQ

SEQ ID NO: 6269 - protein, 96 aa, Homo sapiens
  SITE 1: note = misc_feature - Xaa can be any naturally occurring amino acid
XHLMGKKSTGESSSVSERGSLKQQLREYIRWEEAARNLLGLIEAKENRNHQPPQPKALGNQQPSWDSEDSSNFKDVGSKGKDSLLQVLNVKEGTPS

SEQ ID NO: 6270 - protein, 35 aa, Homo sapiens
  SITE 1: note = misc_feature - Xaa can be any naturally occurring amino acid
XISSLRGIQRIAATSKILSAPGSQREGRNPQLNQQ

SEQ ID NO: 6271 - protein, 496 aa, Homo sapiens
MFAKATRNFLREVDADGDLIAVSNLNDSDKLQLLSLVTKKKRFWCWQRPKYQFLSLTLGDVLIEDQFPSPVVVESDFVKYEGKFANHVSGTLETALGKVKLNLGGSSRVESQSSFGTLRKQEVDLQQLIRDSAERTINLRNPVLQQVLEGRNEVLCVLTQKITTMQKCVISEHMQVEEKCGGIVGIQTKTVQVSATEDGNVTKDSNVVLEIPAATTIAYGVIELYVKLDGQFEFCLLRGKQGGFENKKRIDSVYLDPLVFREFAFIDMPDAAHGISSQDGPLSVLKQATLLLERNFHPFAELPEPQQTALSDIFQAVLFDDELLMVLEPVCDDLVSGLSPTVAVLGELKPRQQQDLVAFLQLVGCSLQGGCPGPEDAGSKQLFMTAYFLVSALAEMPDSAAALLGTCCKLQIIPTLCHLLRALSDDGVSDLEDPTLTPLKDTERFGIVQRLFASADISLERLKSSVKAVILKDSKVFPLLLCITLNGLCALGREHS

SEQ ID NO: 6272 - protein, 356 aa, Homo sapiens
MFAKATRNFLREVDADGDLIAVSNLNDSDKLQLLSLVTKKKRFWCWQRPKYQFLSLTLGDVLIEDQFPSPVVVESDFVKYEGKFANHVSGTLETALGKVKLNLGGSSRVESQSSFGTLRKQEVDLQQLIRDSAERTINLRNPVLQQVLEGRNEVLCVLTQKITTMQKCVISEHMQVEEKCGGIVGIQTKTVQVSATEDGNVTKDSNVVLEIPAATTIAYGVIELYVKLDGQFEFCLLRGKQGGFENKKRIDSVYLDPLVFREFAFIDMPDAAHGISSQDGPLSVLKQATLLLERNFHPFAELPEPQQTALSDIFQAVLFDDELLMVLEPVVSPETSQGSVFTGVFWNRGGGRMELC

SEQ ID NO: 6273 - protein, 496 aa, Homo sapiens; identical to SEQ ID NO: 6271

SEQ ID NO: 6274 - protein, 496 aa, Homo sapiens; identical to SEQ ID NO: 6271

SEQ ID NO: 6275 - protein, 332 aa, Homo sapiens
MQKCVISEHMQVEEKCGGIVGIQTKTVQVSATEDGNVTKDSNVVLEIPAATTIAYGVIELYVKLDGQFEFCLLRGKQGGFENKKRIDSVYLDPLVFREFAFIDMPDAAHGISSQDGPLSVLKQATLLLERNFHPFAELPEPQQTALSDIFQAVLFDDELLMVLEPVCDDLVSGLSPTVAVLGELKPRQQQDLVAFLQLVGCSLQGGCPGPEDAGSKQLFMTAYFLVSALAEMPDSAAALLGTCCKLQIIPTLCHLLRALSDDGVSDLEDPTLTPLKDTERFGIVQRLFASADISLERLKSSVKAVILKDSKVFPLLLCITLNGLCALGREHS

SEQ ID NO: 6276 - protein, 332 aa, Homo sapiens; identical to SEQ ID NO: 6275

SEQ ID NO: 6277 - protein, 55 aa, Homo sapiens
QLFMTAYFLVSALAEMPDSAAALLGTCCKLQIIPTLCHLVSNLPGGTLEWIGMGK

SEQ ID NO: 6278 - protein, 155 aa, Homo sapiens
  SITE 1: note = misc_feature - Xaa can be any naturally occurring amino acid
XAATTIAYGVIELYVKLDGQFEFCLLRGKQGGFENKKRIDSVYLDPLVFREFAFIDMPDAAHGISSQDGPLSVLKQATLLLERNFHPFAELPEPQQTALSDIFQAVLFDDELLMVLEPVKDILGRSSSLTLSCTNGESHTSCQPSSHPDSVSSLS

SEQ ID NO: 6279 - protein, 192 aa, Homo sapiens
  SITE 1: note = misc_feature - Xaa can be any naturally occurring amino acid
XEEKCGGIVGIQTKTVQVSATEDGNVTKDSNVVLEIPAATTIAYGVIELYVKLDGQFEFCLLRGKQGGFENKKRIDSVYLDPLVFREFAFIDMPDAAHGISSQDGPLSVLKQATLLLERNFHPFAELPEPQQTALSDIFQAVLFDDELLMVLEPVQKDILGRSSSLTLSCTNGESHTSCQPSSHPDSVSSLS

SEQ ID NO: 6280 - protein, 211 aa, Homo sapiens
MAKMELSKAFSGQRTLLSAILSMLSLSFSTTSLLSNYWFVGTQKVPKPLCEKGLAAKCFDMPVSLDGDTNTSTQEVVQYNWETGDDRFSFRSFRSGMWLSCEETVEEPAKSEMEEELKKCVYLHLYLLLCHLALLHPQSWKQFRALRSSGTAAAKGERCRSFIELTPPAKRGEKGLLEFATLQGPCHPTLRFGGKRLMEKASLPSPPLGLC

SEQ ID NO: 6281 - protein, 298 aa, Homo sapiens
MAKMELSKAFSGQRTLLSAILSMLSLSFSTTSLLSNYWFVGTQKVPKPLCEKGLAAKCFDMPVSLDGDTNTSTQEVVQYNWETGDDRFSFRSFRSGMWLSCEETVEEPALLHPQSWKQFRALRSSGTAAAKGERCRSFIELTPPAKRGLLGMVAHMMYSQVFQATVNLGPEDWRPHVWNYGWAFYMAWLSFTCCMASAVTTFNTYTRMVLEFKCKHSKSFKENPNCLPHHHQCFPRRLSSAAPTVGPLTSYHQYHNQPIHSVSEGVDFYSELRNKGFQRGASQELKEAVRSSVEEEQC

SEQ ID NO: 6282 - protein, 326 aa, Homo sapiens
MAKMELSKAFSGQRTLLSAILSMLSLSFSTTSLLSNYWFVGTQKVPKPLCEKGLAAKCFDMPVSLDGDTNTSTQEVVQYNWETGDDRFSFRSFRSGMWLSCEETVEEPGERCRSFIELTPPAKREILWLSLGTQITYIGLQFISFLLLLTDLLLTGNPACGLKLSAFAAVSSVLSGLLGMVAHMMYSQVFQATVNLGPEDWRPHVWNYGWAFYMAWLSFTCCMASAVTTFNTYTRMVLEFKCKHSKSFKENPNCLPHHHQCFPRRLSSAAPTVGPLTSYHQYHNQPIHSVSEGVDFYSELRNKGFQRGASQELKEAVRSSVEEEQC

SEQ ID NO: 6283 - protein, 285 aa, Homo sapiens
MAKMELSKAFSGQRTLLSAILSMLSLSFSTTSLLSNYWFVGTQKVPKPLCEKGLAAKCFDMPVSLDGDTNTSTQEVVQYNWETGDDRFSFRSFRSGMWLSCEETVEEPGERCRSFIELTPPAKRGEKGLLEFATLQGPCHPTLRFGGKRLMEKASLPSPPLGLCGKNPMVIPGNADHLHRTSIHQLPPATNRLATHWEPCLWAQTERLCCCFLCPVRSPGDGGPHDVFTSLPSDCQLGSRRLETTCLELWLGLLHGLALLHLLHGVGCHHLQHVHQDGAGVQVQA

SEQ ID NO: 6284 - protein, 275 aa, Homo sapiens
MAKMELSKAFSGQRTLLSAILSMLSLSFSTTSLLSNYWFVGTQKVPKPLCEKGLAAKCFDMPVSLDGDTNTSTQEVVQYNWETGDDRFSFRSFRSGMWLSCEETVEEPGERCRSFIELTPPAKRGLLGMVAHMMYSQVFQATVNLGPEDWRPHVWNYGWAFYMAWLSFTCCMASAVTTFNTYTRMVLEFKCKHSKSFKENPNCLPHHHQCFPRRLSSAAPTVGPLTSYHQYHNQPIHSVSEGVDFYSELRNKGFQRGASQELKEAVRSSVEEEQC

SEQ ID NO: 6285 - protein, 220 aa, Homo sapiens
MSDPSQLTQNVCLTQEMELSKAFSGQRTLLSAILSMLSLSFSTTSLLSNYWFVGTQKVPKPLCEKGLAAKCFDMPVSLDGDTNTSTQEVVQYNWETGDDRFSFRSFRSGMWLSCEETVEEPAKSEMEEELKKCVYLHLYLLLCHLALLHPQSWKQFRALRSSGTAAAKGERCRSFIELTPPAKREILWLSLGTQITYIGLQFISFLLLLTDLLLTGNPAC

SEQ ID NO: 6286 - protein, 321 aa, Homo sapiens
MSDPSQLTQNVCLTQEMELSKAFSGQRTLLSAILSMLSLSFSTTSLLSNYWFVGTQKVPKPLCEKGLAAKCFDMPVSLDGDTNTSTQEVVQYNWETGDDRFSFRSFRSGMWLSCEETVEEPALLHPQSWKQFRALRSSGTAAAKGERCRSFIELTPPAKRGEKGLLEFATLQGPCHPTLRFGGKRLMEKASLPSPPLGLCGKNPMVIPGNADHLHRTSIHQLPPATNRLATHWEPCLWAQTERLCCCFLCPVRSPGDGGPHDVFTSLPSDCQLGSRRLETTCLELWLGLLHGLALLHLLHGVGCHHLQHVHQDGAGVQVQA

SEQ ID NO: 6287 - protein, 339 aa, Homo sapiens
MSDPSQLTQNVCLTQEMELSKAFSGQRTLLSAILSMLSLSFSTTSLLSNYWFVGTQKVPKPLCEKGLAAKCFDMPVSLDGDTNTSTQEVVQYNWETGDDRFSFRSFRSGMWLSCEETVEEPGERCRSFIELTPPAKREILWLSLGTQITYIGLQFISFLLLLTDLLLTGNPACGLKLSAFAAVSSVLSGLLGMVAHMMYSQVFQATVNLGPEDWRPHVWNYGWAFYMAWLSFTCCMASAVTTFNTYTRMVLEFKCKHSKSFKENPNCLPHHHQCFPRRLSSAAPTVGPLTSYHQYHNQPIHSVSEGVDFYSELRNKGFQRGASQELKEAVRSSVEEEQC

SEQ ID NO: 6288 - protein, 236 aa, Homo sapiens
MSDPSQLTQNVCLTQEMELSKAFSGQRTLLSAILSMLSLSFSTTSLLSNYWFVGTQKVPKPLCEKGLAAKCFDMPVSLDGDTNTSTQEVVQYNWETGDDRFSFRSFRSGMWLSCEETVEEPGERCRSFIELTPPAKRGEKGLLEFATLQGPCHPTLRFGGKRLMEKASLPSPPLGLCGKNPMVIPGNADHLHRTSIHQLPPATNRLATHWEPCLWAQTERLCCCFLCPVRSPGDGG

SEQ ID NO: 6289 - protein, 748 aa, Homo sapiens
MAEEEALRGNSDPWPNSMVVEHPEFLKAGKEPGLQIWRVEKFDLVPVPTNLYGDFFTGDAYVILKTVQLRNGNLQYDLHYWLGNECSQDESGAAAIFTVQLDDYLNGRAVQHREVQGFESATFLGYFKSGLKYKKGGVASGFKHVVPNEVVVQRLFQVKGRRVVRATEVPVSWESFNNGDCFILDLGNNIHQWCGSNSNRYERLKATQVSKGIRDNERSGRARVHVSEEGTEPEAMLQVLGPKPALPAGTEDTAKEDAANRKLAKLYKVSNGAGTMSVSLVADENPFAQGALKSEDCFILDHGKDGKIFVWKGKQANTEERKAALKTASDFITKMDYPKQTQVSVLPEGGETPLFKQFFKNWRDPDQTDGLGLSYLSSHIANVERVPFDAATLHTSTAMAAQHGMDDDGTGQKQIWRIEGSNKVPVDPATYGQFYGGDSYIILYNYRHGGRQGQIIYNWQGAQSTQDEVAASAILTAQLDEELGGTPVQSRVVQGKEPAHLMSLFGGKPMIIYKGGTSREGGQTAPASTRLFQVRANSAGATRAVEVLPKAGALNSNDAFVLKTPSAAYLWVGTGASEAEKTGAQELLRVLRAQPVQVAEGSEPDGFWEALGGKAAYRTSPRLKDKKMDAHPPRLFACSNKIGRFVIEEVPGELMQEDLATDDVMLLDTWDQVFVWVGKDSQEEEKTEALTSAKRYIETDPANRDRRTPITVVKQGFEPPSFVGWFLGWDDDYWSVDPLDRAMAELAA

SEQ ID NO: 6290 - protein, 782 aa, Homo sapiens
MAPHRPAPALLCALSLALCALSLPVRAATASRGASQAGAPQGRVPEARPNSMVVEHPEFLKAGKEPGLQIWRVEKFDLVPVPTNLYGDFFTGDAYVILKTVQLRNGNLQYDLHYWLGNECSQDESGAAAIFTVQLDDYLNGRAVQHREVQGFESATFLGYFKSGLKYKKGGVASGFKHVVPNEVVVQRLFQVKGRRVVRATEVPVSWESFNNGDCFILDLGNNIHQWCGSNSNRYERLKATQVSKGIRDNERSGRARVHVSEEGTEPEAMLQVLGPKPALPAGTEDTAKEDAANRKLAKLYKVSNGAGTMSVSLVADENPFAQGALKSEDCFILDHGKDGKIFVWKGKQANTEERKAALKTASDFITKMDYPKQTQVSVLPEGGETPLFKQFFKNWRDPDQTDGLGLSYLSSHIANVERVPFDAATLHTSTAMAAQHGMDDDGTGQKQIWRIEGSNKVPVDPATYGQFYGGDSYIILYNYRHGGRQGQIIYNWQGAQSTQDEVAASAILTAQLDEELGGTPVQSRVVQGKEPAHLMSLFGGKPMIIYKGGTSREGGQTAPASTRLFQVRANSAGATRAVEVLPKAGALNSNDAFVLKTPSAAYLWVGTGASEAEKTGAQELLRVLRAQPVQVAEGSEPDGFWEALGGKAAYRTSPRLKDKKMDAHPPRLFACSNKIGRFVIEEVPGELMQEDLATDDVMLLDTWDQVFVWVGKDSQEEEKTEALTSAKRYIETDPANRDRRTPITVVKQGFEPPSFVGWFLGWDDDYWSVDPLDRAMAELAA

SEQ ID NO: 6291 - protein, 232 aa, Homo sapiens
MEKLFCCFPNSMVVEHPEFLKAGKEPGLQIWRVEKFDLVPVPTNLYGDFFTGDAYVILKTVQLRNGNLQYDLHYWLGNECSQDESGAAAIFTVQLDDYLNGRAVQHREVQGFESATFLGYFKSGLKYKKGGVASGFKHVVPNEVVVQRLFQVKGRRVVRATEVPVSWESFNNGDCFILDLGNNIHQWCGSNSNRYERLKATQVSKGIRDNERSGRARVHVSEEGTEPEAMLQ

SEQ ID NO: 6292 - protein, 742 aa, Homo sapiens
MEKLFCCFPNSMVVEHPEFLKAGKEPGLQIWRVEKFDLVPVPTNLYGDFFTGDAYVILKTVQLRNGNLQYDLHYWLGNECSQDESGAAAIFTVQLDDYLNGRAVQHREVQGFESATFLGYFKSGLKYKKGGVASGFKHVVPNEVVVQRLFQVKGRRVVRATEVPVSWESFNNGDCFILDLGNNIHQWCGSNSNRYERLKATQVSKGIRDNERSGRARVHVSEEGTEPEAMLQVLGPKPALPAGTEDTAKEDAANRKLAKLYKVSNGAGTMSVSLVADENPFAQGALKSEDCFILDHGKDGKIFVWKGKQANTEERKAALKTASDFITKMDYPKQTQVSVLPEGGETPLFKQFFKNWRDPDQTDGLGLSYLSSHIANVERVPFDAATLHTSTAMAAQHGMDDDGTGQKQIWRIEGSNKVPVDPATYGQFYGGDSYIILYNYRHGGRQGQIIYNWQGAQSTQDEVAASAILTAQLDEELGGTPVQSRVVQGKEPAHLMSLFGGKPMIIYKGGTSREGGQTAPASTRLFQVRANSAGATRAVEVLPKAGALNSNDAFVLKTPSAAYLWVGTGASEAEKTGAQELLRVLRAQPVQVAEGSEPDGFWEALGGKAAYRTSPRLKDKKMDAHPPRLFACSNKIGRFVIEEVPGELMQEDLATDDVMLLDTWDQVFVWVGKDSQEEEKTEALTSAKRYIETDPANRDRRTPITVVKQGFEPPSFVGWFLGWDDDYWSVDPLDRAMAELAA

SEQ ID NO: 6293 - protein, 767 aa, Homo sapiens
MNTGLTRLLWPSWLPDGDMSHPQPELFLFPKAQPNSMVVEHPEFLKAGKEPGLQIWRVEKFDLVPVPTNLYGDFFTGDAYVILKTVQLRNGNLQYDLHYWLGNECSQDESGAAAIFTVQLDDYLNGRAVQHREVQGFESATFLGYFKSGLKYKKGGVASGFKHVVPNEVVVQRLFQVKGRRVVRATEVPVSWESFNNGDCFILDLGNNIHQWCGSNSNRYERLKATQVSKGIRDNERSGRARVHVSEEGTEPEAMLQVLGPKPALPAGTEDTAKEDAANRKLAKLYKVSNGAGTMSVSLVADENPFAQGALKSEDCFILDHGKDGKIFVWKGKQANTEERKAALKTASDFITKMDYPKQTQVSVLPEGGETPLFKQFFKNWRDPDQTDGLGLSYLSSHIANVERVPFDAATLHTSTAMAAQHGMDDDGTGQKQIWRIEGSNKVPVDPATYGQFYGGDSYIILYNYRHGGRQGQIIYNWQGAQSTQDEVAASAILTAQLDEELGGTPVQSRVVQGKEPAHLMSLFGGKPMIIYKGGTSREGGQTAPASTRLFQVRANSAGATRAVEVLPKAGALNSNDAFVLKTPSAAYLWVGTGASEAEKTGAQELLRVLRAQPVQVAEGSEPDGFWEALGGKAAYRTSPRLKDKKMDAHPPRLFACSNKIGRFVIEEVPGELMQEDLATDDVMLLDTWDQVFVWVGKDSQEEEKTEALTSAKRYIETDPANRDRRTPITVVKQGFEPPSFVGWFLGWDDDYWSVDPLDRAMAELAA

SEQ ID NO: 6294 - protein, 739 aa, Homo sapiens
MPLCTPNSMVVEHPEFLKAGKEPGLQIWRVEKFDLVPVPTNLYGDFFTGDAYVILKTVQLRNGNLQYDLHYWLGNECSQDESGAAAIFTVQLDDYLNGRAVQHREVQGFESATFLGYFKSGLKYKKGGVASGFKHVVPNEVVVQRLFQVKGRRVVRATEVPVSWESFNNGDCFILDLGNNIHQWCGSNSNRYERLKATQVSKGIRDNERSGRARVHVSEEGTEPEAMLQVLGPKPALPAGTEDTAKEDAANRKLAKLYKVSNGAGTMSVSLVADENPFAQGALKSEDCFILDHGKDGKIFVWKGKQANTEERKAALKTASDFITKMDYPKQTQVSVLPEGGETPLFKQFFKNWRDPDQTDGLGLSYLSSHIANVERVPFDAATLHTSTAMAAQHGMDDDGTGQKQIWRIEGSNKVPVDPATYGQFYGGDSYIILYNYRHGGRQGQIIYNWQGAQSTQDEVAASAILTAQLDEELGGTPVQSRVVQGKEPAHLMSLFGGKPMIIYKGGTSREGGQTAPASTRLFQVRANSAGATRAVEVLPKAGALNSNDAFVLKTPSAAYLWVGTGASEAEKTGAQELLRVLRAQPVQVAEGSEPDGFWEALGGKAAYRTSPRLKDKKMDAHPPRLFACSNKIGRFVIEEVPGELMQEDLATDDVMLLDTWDQVFVWVGKDSQEEEKTEALTSAKRYIETDPANRDRRTPITVVKQGFEPPSFVGWFLGWDDDYWSVDPLDRAMAELAA

SEQ ID NO: 6295 - protein, 731 aa, Homo sapiens
MVVEHPEFLKAGKEPGLQIWRVEKFDLVPVPTNLYGDFFTGDAYVILKTVQLRNGNLQYDLHYWLGNECSQDESGAAAIFTVQLDDYLNGRAVQHREVQGFESATFLGYFKSGLKYKKGGVASGFKHVVPNEVVVQRLFQVKGRRVVRATEVPVSWESFNNGDCFILDLGNNIHQWCGSNSNRYERLKATQVSKGIRDNERSGRARVHVSEEGTEPEAMLQVLGPKPALPAGTEDTAKEDAANRKLAKLYKVSNGAGTMSVSLVADENPFAQGALKSEDCFILDHGKDGKIFVWKGKQANTEERKAALKTASDFITKMDYPKQTQVSVLPEGGETPLFKQFFKNWRDPDQTDGLGLSYLSSHIANVERVPFDAATLHTSTAMAAQHGMDDDGTGQKQIWRIEGSNKVPVDPATYGQFYGGDSYIILYNYRHGGRQGQIIYNWQGAQSTQDEVAASAILTAQLDEELGGTPVQSRVVQGKEPAHLMSLFGGKPMIIYKGGTSREGGQTAPASTRLFQVRANSAGATRAVEVLPKAGALNSNDAFVLKTPSAAYLWVGTGASEAEKTGAQELLRVLRAQPVQVAEGSEPDGFWEALGGKAAYRTSPRLKDKKMDAHPPRLFACSNKIGRFVIEEVPGELMQEDLATDDVMLLDTWDQVFVWVGKDSQEEEKTEALTSAKRYIETDPANRDRRTPITVVKQGFEPPSFVGWFLGWDDDYWSVDPLDRAMAELAA

SEQ ID NO: 6296 - protein, 260 aa, Homo sapiens
MVVEHPEFLKAGKEPGLQIWRVEKFDLVPVPTNLYGDFFTGDAYVILKTVQLRNGNLQYDLHYWLGNECSQDESGAAAIFTVQLDDYLNGRAVQHREVQGFESATFLGYFKSGLKYKKGGVASGFKHVVPNEVVVQRLFQVKGRRVVRATEVPVSWESFNNGDCFILDLGNNIHQWCGSNSNRYERLKATQVSKGIRDNERSGRARVHVSEEGTEPEAMLQVLGPKPALPAGTEDTAKEDAANRKLAKLYKVSNGAGTMS

SEQ ID NO: 6297 - protein, 67 aa, Homo sapiens
  SITE 1: note = misc_feature - Xaa can be any naturally occurring amino acid
XKGGTSREGGQTAPASTRLFQVRANSAGATRAVEVISRSWNTEGIGLPETSQLNDQISRHRNGGRGW

SEQ ID NO: 6298 - protein, 329 aa, Homo sapiens
MESFLTSMGKFMKLIPDHRPKDLESIIRPKCQVIYFPIRFPDVSRFMPKHKTTHLKKMLGLKGNGGAVLSMALPFQPEQRDSEDLLKNFNSECDTHCGLDTARQEYLGNSLRQESDLKKSTSSDNSSSHHGENKQNLTVDPCDILGGVDNQQRLLHIVWPHRWEHDKDPESFFKVLMHLKDLGLNFHVSVLGETFTDVPDIFSEAKKALGSSVLHWGYLPSKDDYFQVLCMADVVISTAKHEFFGVAMLEAVYCGCYPLCPKDLVYPEIFPAEYLYSTPEQLSKRLQNFCKRPDIIRKHLYKGEIAPFSWAALHGKFRSLLTTEPREDL

SEQ ID NO: 6299 - protein, 426 aa, Homo sapiens
MLTLHVWIWFGFMPCPNLMQNYNHQCCRTLFASSVLNLTELAALRPDLGKLKKILYFHENQLIYPVKKCQERDFQYGYNQILSCLVADVVVFNSVFNMESFLTSMGKFMKLIPDHRPKDLESIIRPKCQVIYFPIRFPDVSRFMPKHKTTHLKKMLGLKGNGGAVLSMALPFQPEQRDSEDLLKNFNSECDTHCGLDTARQEYLGNSLRQESDLKKSTSSDNSSSHHGENKQNLTVDPCDILGGVDNQQRLLHIVWPHRWEHDKDPESFFKVLMHLKDLGLNFHVSVLGETFTDVPDIFSEAKKALGSSVLHWGYLPSKDDYFQVLCMADVVISTAKHEFFGVAMLEAVYCGCYPLCPKDLVYPEIFPAEYLYSTPEQLSKRLQNFCKRPDIIRKHLYKGEIAPFSWAALHGKFRSLLTTEPREDL

SEQ ID NO: 6300 - protein, 66 aa, Homo sapiens
MSILIIEAFYGGSHKQLVDLLQEELGDCVVYTLPAKKWHWRARTSALYFSQTIPISEHYRQSEITN

SEQ ID NO: 6301 - protein, 66 aa, Homo sapiens; identical to SEQ ID NO: 6300

SEQ ID NO: 6302 - protein, 99 aa, Homo sapiens
MSILIIEAFYGGSHKQLVDLLQEELGDCVVYTLPAKKWHWRARTSALYFSQTIPISEHYRTLFASSVLNLTELAALRPDLGKLKKILYFHENQLIYPVK

SEQ ID NO: 6303 - protein, 173 aa, Homo sapiens
MSILIIEAFYGGSHKQLVDLLQEELGDCVVYTLPAKKWHWRARTSALYFSQTIPISEHYRTLFASSVLNLTELAALRPDLGKLKKILYFHENQLIYPVKKCQERDFQYGYNQILSCLVADVVVFNSVFNMESFLTSMGKFMKLIPDHRPKDLESIIRPKCQVIYFPIRFPDVS

SEQ ID NO: 6304 - protein, 340 aa, Homo sapiens
MSILIIEAFYGGSHKQLVDLLQEELGDCVVYTLPAKKWHWRARTSALYFSQTIPISEHYRTLFASSVLNLTELAALRPDLGKLKKILYFHENQLIYPVKKCQERDFQYGYNQILSCLVADVVVFNSVFNMESFLTSMGKFMKLIPDHRPKDLESIIRPKCQVIYFPIRFPDVSREHDKDPESFFKVLMHLKDLGLNFHVSVLGETFTDVPDIFSEAKKALGSSVLHWGYLPSKDDYFQVLCMADVVISTAKHEFFGVAMLEAVYCGCYPLCPKDLVYPEIFPAEYLYSTPEQLSKRLQNFCKRPDIIRKHLYKGEIAPFSWAALHGKFRSLLTTEPREDL

SEQ ID NO: 6305 - protein, 376 aa, Homo sapiens
MSILIIEAFYGGSHKQLVDLLQEELGDCVVYTLPAKKWHWRARTSALYFSQTIPISEHYRTLFASSVLNLTELAALRPDLGKLKKILYFHENQLIYPVKKCQERDFQYGYNQILSCLVADVVVFNSVFNMESFLTSMGKFMKLIPDHRPKDLESIIRPKCQVIYFPIRFPDVSRFMPKHKTTHLKKMLGLKGNGGAVLSMALPFQPEQRDSEDLLKNFNSECDTHCGLDTARQEYLGNSLRQESDLKKSTSSDNSSSHHGENKQNLTVDPCDILGGVDNQQRLLHIVWPHRWEHDKDPESFFKVLMHLKDLGLNFHVSVLGETFTDVPGWKLCTVGVTHFVLKIWFIPKYFQLNICILHLNSFQKGSRISARDQIL

SEQ ID NO: 6306 - protein, 458 aa, Homo sapiens
MSILIIEAFYGGSHKQLVDLLQEELGDCVVYTLPAKKWHWRARTSALYFSQTIPISEHYRTLFASSVLNLTELAALRPDLGKLKKILYFHENQLIYPVKKCQERDFQYGYNQILSCLVADVVVFNSVFNMESFLTSMGKFMKLIPDHRPKDLESIIRPKCQVIYFPIRFPDVSRFMPKHKTTHLKKMLGLKGNGGAVLSMALPFQPEQRDSEDLLKNFNSECDTHCGLDTARQEYLGNSLRQESDLKKSTSSDNSSSHHGENKQNLTVDPCDILGGVDNQQRLLHIVWPHRWEHDKDPESFFKVLMHLKDLGLNFHVSVLGETFTDVPDIFSEAKKALGSSVLHWGYLPSKDDYFQVLCMADVVISTAKHEFFGVAMLEAVYCGCYPLCPKDLVYPEIFPAEYLYSTPEQLSKRLQNFCKRPDIIRKHLYKGEIAPFSWAALHGKFRSLLTTEPREDL

SEQ ID NO: 6307 - protein, 373 aa, Homo sapiens
MSILIIEAFYGGSHKQLVDLLQEELGDCVVYTLPAKKWHWRARTSALYFSQTIPISEHYRTLFASSVLNLTELAALRPDLGKLKKILYFHENQLIYPVKKCQERDFQYGYNQILSCLVADVVVFNSVFNMESFLTSMGKFMKLIPDHRPKDLESIIRPKCQVIYFPIRFPDVSRFMPKHKTTHLKKMLGLKGNGGAVLSMALPFQPEQRDSEDLLKNFNSECDTHCGLDTARQEYLGNSLRQESDLKKSTSSDNSSSHHGENKQNLTVDPCDILGGVDNQQRLLHIVWPHRWLEAVYCGCYPLCPKDLVYPEIFPAEYLYSTPEQLSKRLQNFCKRPDIIRKHLYKGEIAPFSWAALHGKFRSLLTTEPREDL

SEQ ID NO: 6308 - protein, 376 aa, Homo sapiens; identical to SEQ ID NO: 6305

SEQ ID NO: 6309 - protein, 458 aa, Homo sapiens; identical to SEQ ID NO: 6306

SEQ ID NO: 6310 - protein, 458 aa, Homo sapiens; identical to SEQ ID NO: 6306

SEQ ID NO: 6311 - protein, 458 aa, Homo sapiens; identical to SEQ ID NO: 6306

SEQ ID NO: 6312 - protein, 236 aa, Homo sapiens
MRTVSLCHPDWSALASSWLTAASTSWAQYGNFIDKLRLFTRGGSGGMGYPRLGGEGGKGGDVWVVAQNRMTLKQLKDRYPRKRFVAGVGANSKISALKGSKGKDCEIPVPVGISVTDENGKIIGELNKENDRILVAQGGLGGKLLTNFLPLKGQKRIIHLDLKLIADVGLVGFPNAGKSSLLSCVSHAKPAIADYAFTTLKPELGKIMYSDFKQISVADLPGLIEGAHMNKGMGHK

SEQ ID NO: 6313 - protein, 107 aa, Homo sapiens
MRYGNFIDKLRLFTRGGSGGMGYPRLGGEGGKGGDVWVVAQNRMTLKQLKDRYPRKRFVAGVGANSKISALKGSKGKDCEIPVPVGISVTDENGKIIDSQMLENPLC

SEQ ID NO: 6314 - protein, 210 aa, Homo sapiens
MRYGNFIDKLRLFTRGGSGGMGYPRLGGEGGKGGDVWVVAQNRMTLKQLKDRYPRKRFVAGVGANSKISALKGSKGKDCEIPVPVGISVTDENGKIIGELNKENDRILVAQGGLGGKLLTNFLPLKGQKRIIHLDLKLIADVGLVGFPNAGKSSLLSCVSHAKPAIADYAFTTLKPELGKIMYSDFKQISVADLPGLIEGAHMNKGMGHK

SEQ ID NO: 6315 - protein, 70 aa, Homo sapiens
MRYGNFIDKLRLFTRGGSGGMGYPRLGGEGGKGGDVWVVAQNRMTLKQLKDRYPRKRFVAGVGANSKRTQ

SEQ ID NO: 6316 - protein, 308 aa, Homo sapiens
MVHCSCVLFRKYGNFIDKLRLFTRGGSGGMGYPRLGGEGGKGGDVWVVAQNRMTLKQLKDRYPRKRFVAGVGANSKFPNAGKSSLLSCVSHAKPAIADYAFTTLKPELGKIMYSDFKQISVADLPGLIEGAHMNKGMGHKFLKHIERTRQLLFVVDISGFQLSSHTQYRTAFETIILLTKELELYKEELQTKPALLAVNKMDLPDAQDKFHELMSQLQNPKDFLHLFEKNMIPERTVEFQHIIPISAVTGEGIEELKNCIRKSLDEQANQENDALHKKQLLNLWISDTMSSTEPPSKHAVTTSKMDII

SEQ ID NO: 6317 - protein, 116 aa, Homo sapiens
MVHCSCVLFRKYGNFIDKLRLFTRGGSGGMGYPRLGGEGGKGGDVWVVAQNRMTLKQLKDRYPRKRFVAGVGANSKISALKGSKGKDCEIPVPVGISVTDENGKIIDSQMLENPLC

SEQ ID NO: 6318 - protein, 387 aa, Homo sapiens
MVHCSCVLFRKYGNFIDKLRLFTRGGSGGMGYPRLGGEGGKGGDVWVVAQNRMTLKQLKDRYPRKRFVAGVGANSKISALKGSKGKDCEIPVPVGISVTDENGKIIGELNKENDRILVAQGGLGGKLLTNFLPLKGQKRIIHLDLKLIADVGLVGFPNAGKSSLLSCVSHAKPAIADYAFTTLKPELGKIMYSDFKQISVADLPGLIEGAHMNKGMGHKFLKHIERTRQLLFVVDISGFQLSSHTQYRTAFETIILLTKELELYKEELQTKPALLAVNKMDLPDAQDKFHELMSQLQNPKDFLHLFEKNMIPERTVEFQHIIPISAVTGEGIEELKNCIRKSLDEQANQENDALHKKQLLNLWISDTMSSTEPPSKHAVTTSKMDII

SEQ ID NO: 6319 - protein, 243 aa, Homo sapiens
MVHCSCVLFRKYGNFIDKLRLFTRGGSGGMGYPRLGGEGGKGGDVWVVAQNRMTLKQLKDRYPRKRFVAGVGANSKISALKGSKGKDCEIPVPVGISVTDENGKIIVTTLKPELGKIMYSDFKQISVADLPGLIEGAHMNKGMGHKFLKHIERTRQLLFVVDISGFQLSSHTQYRTAFETIILLTKELELYKEELQTKPALLAVNKMDLPDAQDKFHELMSQLQNPKDFLHLFEKNMIPERTV

SEQ ID NO: 6320 - protein, 79 aa, Homo sapiens
MVHCSCVLFRKYGNFIDKLRLFTRGGSGGMGYPRLGGEGGKGGDVWVVAQNRMTLKQLKDRYPRKRFVAGVGANSKRTQ

SEQ ID NO: 6321 - protein, 115 aa, Homo sapiens
MNAFLLSALCLLGAWAALAGGVTVQDGNFSFSLESVKKLKDLQEPQEPRVGKLRNFAPIPGEPVVPILCSNPNFPEELKPLCKEPNAQEILQRLEEIAEDPGTCEICAYAACTGC

SEQ ID NO: 6322 - protein, 112 aa, Homo sapiens
MGCRAASGLLPGVAVVLLLLLQSTQSVYIQYQGFRVQLESMKKLSDLEAQWAPSPRLQAQSLLPAVCHHPALPQDLQPVCASQEASSIFKTLRTIANDDCELCVNVACTGCL

SEQ ID NO: 6323 - protein, 134 aa, Homo sapiens
MARGSAVAWAALGPLLWGCALGLQGGMLYPQESPSRECKELDGLWSFRADFSDNRRRGFEEQWYRRPLWESGPTVDMPVPSSFNDISQDWRLRHFVGWVWYEREVILPERWTQDLRTRVVLRIGSAHSYAIVGW

SEQ ID NO: 6324 - protein, 144 aa, Homo sapiens
MARGSAVAWAALGPLLWGCALGLQGGMLYPQESPSRECKELDGLWSFRADFSDNRRRGFEEQWYRRPLWESGPTVDMPVPSSFNDISQDWRLRHFVGWVWYEREVILPERWTQDLRTRVVLRIGSAHSYAIVVSQGLLCPEHIF

SEQ ID NO: 6325 - protein, 144 aa, Homo sapiens; identical to SEQ ID NO: 6324

SEQ ID NO: 6326 - protein, 651 aa, Homo sapiens
MARGSAVAWAALGPLLWGCALGLQGGMLYPQESPSRECKELDGLWSFRADFSDNRRRGFEEQWYRRPLWESGPTVDMPVPSSFNDISQDWRLRHFVGWVWYEREVILPERWTQDLRTRVVLRIGSAHSYAIVWVNGVDTLEHEGGYLPFEADISNLVQVGPLPSRLRITIAINNTLTPTTLPPGTIQYLTDTSKYPKGYFVQNTYFDFFNYAGLQRSVLLYTTPTTYIDDITVTTSVEQDSGLVNYQISVKGSNLFKLEVRLLDAENKVVANGTGTQGQLKVPGVSLWWPYLMHERPAYLYSLEVQLTAQTSLGPVSDFYTLPVGIRTVAVTKSQFLINGKPFYFHGVNKHEDADIRGKGFDWPLLVKDFNLLRWLGANAFRTSHYPYAEEVMQMCDRYGIVVIDECPGVGLALPQFFNNVSLHHHMQVMEEVVRRDKNHPAVVMWSVANEPASHLESAGYYLKMVIAHTKSLDPSRPVTFVSNSNYAADKGAPYVDVICLNSYYSWYHDYGHLELIQLQLATQFENWYKKYQKPIIQSEYGAETIAGFHQDPPLMFTEEYQKSLLEQYHLGLDQKRRKYVVGELIWNFADFMTEQSPTRVLGNKKGIFTRQRQPKSAAFLLRERYWKIANETRYPHSVAKSQCLENSLFT

SEQ ID NO: 6327 - protein, 505 aa, Homo sapiens
MARGSAVAWAALGPLLWGCALGLQGGMLYPQESPSRECKELDGLWSFRADFSDNRRRGFEEQWYRRPLWESGPTVDMPVPSSFNDISQDWRLRHFVGWVWYEREVILPERWTQDLRTRVVLRIGSAHSYAIVWVNGVDTLEHEGGYLPFEADISNLVQVQLTAQTSLGPVSDFYTLPVGIRTVAVTKSQFLINGKPFYFHGVNKHEDADIRGKGFDWPLLVKDFNLLRWLGANAFRTSHYPYAEEVMQMCDRYGIVVIDECPGVGLALPQFFNNVSLHHHMQVMEEVVRRDKNHPAVVMWSVANEPASHLESAGYYLKMVIAHTKSLDPSRPVTFVSNSNYAADKGAPYVDVICLNSYYSWYHDYGHLELIQLQLATQFENWYKKYQKPIIQSEYGAETIAGFHQDPPLMFTEEYQKSLLEQYHLGLDQKRRKYVVGELIWNFADFMTEQSPTRVLGNKKGIFTRQRQPKSAAFLLRERYWKIANETRYPHSVAKSQCLENSLFT

SEQ ID NO: 6328 - protein, 195 aa, Homo sapiens; identical to SEQ ID NO: 73

SEQ ID NO: 6329 - protein, 440 aa, Homo sapiens
MRRYLRVVVLCVACGFCSLLYAFSQLAVSLEEGTGGGGGKPQAAVASWLAGGGRGAVRGAGVAGPAAHPGVSDRCKDFSLCYWNPYWMLPSDVCGMNCFWEAAFRYSLKIQPVEKMHLAVVACGERLEETMTMLKSAIIFSIKPLQFHIFAEDQLHHSFKGRLDNWSFLQTFNYTLYPITFPSENAAEWKKLFKPCASQRLFLPLILKEVDSLLYVDTDILFLRPVDDIWSLLKKFNSTQIAAMAPEHEEPRIGWYNRFARHPYYGKTGVNSGVMLMNMTRMRRKYFKNDMTTVRLQWGDILMPLLKKYKLNITWGDQDLLNIVFFHNPESLFVFPCQWNYRPDHCIYGSNCQEAEEGGIFILHGNRGVYHDDKQPAFRAVYEALRNCSFEDDNIRSLLKPLELELQKTVHTYCGKIYKIFIKQLAKSVRDRYARSPKEK

SEQ ID NO: 6330 - protein, 409 aa, Homo sapiens
MRRYLRVVVLCVACGFCSLLYAFSQLAVSLEEGTGGGGGKPQAAVASWLAGGGRGAVRGAGVAGPAAHPGVSDRYSLKIQPVEKMHLAVVACGERLEETMTMLKSAIIFSIKPLQFHIFAEDQLHHSFKGRLDNWSFLQTFNYTLYPITFPSENAAEWKKLFKPCASQRLFLPLILKEVDSLLYVDTDILFLRPVDDIWSLLKKFNSTQIAAMAPEHEEPRIGWYNRFARHPYYGKTGVNSGVMLMNMTRMRRKYFKNDMTTVRLQWGDILMPLLKKYKLNITWGDQDLLNIVFFHNPESLFVFPCQWNYRPDHCIYGSNCQEAEEGGIFILHGNRGVYHDDKQPAFRAVYEALRNCSFEDDNIRSLLKPLELELQKTVHTYCGKIYKIFIKQLAKSVRDRYARSPKEK

SEQ ID NO: 6331 - protein, 164 aa, Homo sapiens
MAPEHEIPKIGWYSRFARHPFYGSAGVNSGVMLMNLTRIRSTQFKNSMIPTGLAWEDMLYPLYQKYKNAITWGDQDLLNIIFYFNPECLYVFPCQWNYRPDHCMYGSNCREAEHEGVSVLHGNRGVYHDDKQPTFRALYEAIRDILRRGGKRKFVLSWISFFVM

SEQ ID NO: 6332 - protein, 443 aa, Homo sapiens
MKLRSKAAALLLLALAALLLALLSLRAGRAEPPALPARPASAPQRHPAPVPARWPGPGALPGASPGVRRRRPPRPRPRAGRRGAARLEKLARRPGEPRSFQAVLPPELWIHLAVVACGNRLEETLVMLKSAVLFSHRKIQFHIFTEDSLKPEFDKQLRQWPDSYTKKFEHRIYPITFSVGNPQEWKKLFKPCAAQRLFLPVILKDVDSLLYVDTDVLFLRPVDDIWKLLRLFNSTQLAAMAPEHEIPKIGWYSRFARHPFYGSAGVNSGVMLMNLTRIRSTQFKNSMIPTGLAWEDMLYPLYQKYKNAITWGDQDLLNIIFYFNPECLYVFPCQWNYRPDHCMYGSNCREAEHEGVSVLHGNRGVYHDDKQPTFRALYEAIRDFPFQDNLFQSMYYPLQLKFLETVHTLCGRIPQVFLKQIEKTMKRAYEKHVIIHVGPNQMH

SEQ ID NO: 6333 - protein, 102 aa, Homo sapiens
MLKSAVLFSHRKIQFHIFTEDSLKPEFDKQLRQWPDSYTKKFEHRIYPITFSVGNPQEWKKLFKPCAAQRLFLPVILKDVDSLLYVDTDVLFLRPVDDIWKL

SEQ ID NO: 6334 - protein, 65 aa, Homo sapiens
MHTSTSSSVTKSYISSQTNGETGQLVHRFTVPAPVVIILIILCVMAGIIGTILLISYSIRRLIKA

SEQ ID NO: 6335 - protein, 121 aa, Homo sapiens
MYGKIIFVLLLSEIVSISALSTTEVAMHTSTSSSVTKSYISSQTNDKHKRDTCPAHTANEVSEISVTTVSPPEKKNGETGQLVHRFTVPAPVVIILIILCVMAGIIGTILLISYSIRRLIK

SEQ ID NO: 6336 - protein, 91 aa, Homo sapiens
MYGKIIFVLLLSEIVSISALSTTEVAMHTSTSSSVTKSYISSQTNGETGQLVHRFTVPAPVVIILIILCVMAGIIGTILLISYSIRRLIKA

SEQ ID NO: 6337 - protein, 62 aa, Homo sapiens
MYGKIIFVLLLSEIVSISALSTTEVAMHTSTSSSVTKSYISSQTNGETGQLVHRFTVPVFAD

SEQ ID NO: 6338 - protein, 42 aa, Homo sapiens
MYGKIIFVLLLSGDGANPENSGRRGQKAEGRARAKILKQEKL

SEQ ID NO: 6339 - protein, 58 aa, Homo sapiens
MYGKIIFVLLLSGETGQLVHRFTVPAPVVIILIILCVMAGIIGTILLISYSIRRLIKA

SEQ ID NO: 6340 - protein, 45 aa, Homo sapiens
MYGKIIFVLLLSGNFEHSAEGPSWLPLRRSPSTSTPLHLGAIPLI

SEQ ID NO: 6341 - protein, 45 aa, Homo sapiens; identical to SEQ ID NO: 6340

SEQ ID NO: 6342 - protein, 45 aa, Homo sapiens; identical to SEQ ID NO: 6340

SEQ ID NO: 6343 - protein, 262 aa, Homo sapiens
MRNSYRFLASSLSVVVSLLLIPEDVCEKIIGGNEVTPHSRPYMVLLSLDRKTICAGALIAKDWVLTAAHCNLNKRSQVILGAHSITREEPTKQIMLVKKEFPYPCYDPATREGDLKLLQLMEKAKINKYVTILHLPKKGDDVKPGTMCQVAGWGRTHNSASWSDTLREVNITIIDRKVCNDRNHYNFNPVIGMNMVCAGSLRGGRDSCNGDSGSPLLCEGVFRGVTSFGLENKCGDPRGPGVYILLSKKHLNWIIMTIKGAV

SEQ ID NO: 6344 - protein, 44 aa, Homo sapiens
MQECSELQLPFYQDPPSVMLDKLSAGMAEQQAILKKSQGDHRGT

SEQ ID NO: 6345 - protein, 35 aa, Homo sapiens
MQPILLLLAFLLLPRADAAGEKGQADQSCAAPQAT

SEQ ID NO: 6346 - protein, 202 aa, Homo sapiens
MQPILLLLAFLLLPRADAGEIIGGHEAKPHSRPYMAYLMIWDQKSLKRCGGFLIRDDFVLTAAHCWGRLERKAKRTRAVQPLRLPSNKAQVKPGQTCSVAGWGQTAPLGKHSHTLQEVKMTVQEDRKCESDLRHYYDSTIELCVGDPEIKKTSFKGDSGGPLVCNKVAQGIVSYGRNNGMPPRACTKVSSFVHWIKKTMKRY

SEQ ID NO: 6347 - protein, 202 aa, Homo sapiens; identical to SEQ ID NO: 6346

SEQ ID NO: 6348 - protein, 247 aa, Homo sapiens
MQPILLLLAFLLLPRADAGEIIGGHEAKPHSRPYMAYLMIWDQKSLKRCGGFLIRDDFVLTAAHCWGSSINVTLGAHNIKEQEPTQQFIPVKRPIPHPAYNPKNFSNDIMLLQLERKAKRTRAVQPLRLPSNKAQVKPGQTCSVAGWGQTAPLGKHSHTLQEVKMTVQEDRKCESDLRHYYDSTIELCVGDPEIKKTSFKGDSGGPLVCNKVAQGIVSYGRNNGMPPRACTKVSSFVHWIKKTMKRY

SEQ ID NO: 6349 - protein, 90 aa, Homo sapiens
MQPILLLLAFLLLPRADAGEIIGGHEAKPHSRPYMAYLMIWDQKSLKRCGGFLIRDDFVLTAAHCWGSWRERPSGPELCSPSGYLATRPR

SEQ ID NO: 6350 - protein, 90 aa, Homo sapiens; identical to SEQ ID NO: 6349

SEQ ID NO: 6351 - protein, 152 aa, Homo sapiens
MQPILLLLAFLLLPRADQLERKAKRTRAVQPLRLPSNKAQVKPGQTCSVAGWGQTAPLGKHSHTLQEVKMTVQEDRKCESDLRHYYDSTIELCVGDPEIKKTSFKGDSGGPLVCNKVAQGIVSYGRNNGMPPRACTKVSSFVHWIKKTMKRY

SEQ ID NO: 6352 - protein, 235 aa, Homo sapiens
MQTFPSGEIIGGHEAKPHSRPYMAYLMIWDQKSLKRCGGFLIRDDFVLTAAHCWGSSINVTLGAHNIKEQEPTQQFIPVKRPIPHPAYNPKNFSNDIMLLQLERKAKRTRAVQPLRLPSNKAQVKPGQTCSVAGWGQTAPLGKHSHTLQEVKMTVQEDRKCESDLRHYYDSTIELCVGDPEIKKTSFKGDSGGPLVCNKVAQGIVSYGRNNGMPPRACTKVSSFVHWIKKTMKRY

SEQ ID NO: 6353 - protein, 115 aa, Homo sapiens
MQPFLLLLAFLLTPGAGTEEIIGGHEAKPHSRPYMAFVQFLQEKSRKRCGGILVRKDFVLTAAHCQGRGDSGGPLVCKDVAQGILSYGNKKGTPPGVYIKVSHFLPWIKRTMKRL

SEQ ID NO: 6354 - protein, 160 aa, Homo sapiens
MQPFLLLLAFLLTPGAGTEEIIGGHEAKPHSRPYMAFVQFLQEKSRKRCGGILVRKDFVLTAAHCQGSSINVTLGAHNIKEQERTQQFIPVKRPIPHPAYNPKNFSNDIMLLQGDSGGPLVCKDVAQGILSYGNKKGTPPGVYIKVSHFLPWIKRTMKRL

SEQ ID NO: 6355 - protein, 246 aa, Homo sapiens
MQPFLLLLAFLLTPGAGTEEIIGGHEAKPHSRPYMAFVQFLQEKSRKRCGGILVRKDFVLTAAHCQGSSINVTLGAHNIKEQERTQQFIPVKRPIPHPAYNPKNFSNDIMLLQLERKAKWTTAVRPLRLPSSKAQVKPGQLCSVAGWGYVSMSTLATTLQEVLLTVQKDCQCERLFHGNYSRATEICVGDPKKTQTGFKGDSGGPLVCKDVAQGILSYGNKKGTPPGVYIKVSHFLPWIKRTMKRL

SEQ ID NO: 6356 - protein, 264 aa, Homo sapiens
MTKFSSFSLFFLIVGAYMTHVCFNMEIIGGKEVSPHSRPFMASIQYGGHHVCGGVLIDPQWVLTAAHCQYRFTKGQSPTVVLGAHSLSKNEASKQTLEIKKFIPFSRVTSDPQSNDIMLVKLQTAAKLNKHVKMLHIRSKTSLRSGTKCKVTGWGATDPDSLRPSDTLREVTVTVLSRKLCNSQSYYNGDPFITKDMVCAGDAKGQKDSCKGDSGGPLICKGVFHAIVSGGHECGVATKPGIYTLLTKKYQTWIKSNLVPPHTN

SEQ ID NO: 6357 - protein, 218 aa, Homo sapiens
MASLQRNGSHLCGGVLVHPKWVLTAAHCLAQRMAQLRLVLGLHTLDSPGLTFHIKAAIQHPRYKPVPALENDLALLQLDGKVKPSRTIRPLALPSKRQVVAAGTRCSMAGWGLTHQGGRLSRVLRELDLQVLDTRMCNNSRFWNGSLSPSMVCLAADSKDQAPCKGDSGGPLVCGKGRVLARVLSFSSRVCTDIFKPPVATAVAPYVSWIRKVTGRSA

SEQ ID NO: 6358 - protein, 257 aa, Homo sapiens
MEACVSSLLVLALGALSVGSSFGTQIIGGREVIPHSRPYMASLQRNGSHLCGGVLVHPKWVLTAAHCLAQRMAQLRLVLGLHTLDSPGLTFHIKAAIQHPRYKPVPALENDLALLQLDGKVKPSRTIRPLALPSKRQVVAAGTRCSMAGWGLTHQGGRLSRVLRELDLQVLDTRMCNNSRFWNGSLSPSMVCLAADSKDQAPCKGDSGGPLVCGKGRVLARVLSFSSRVCTDIFKPPVATAVAPYVSWIRKVTGRSA

SEQ ID NO: 6359 - protein, 802 aa, Homo sapiens
MLAEPFNWHPGMWNMLIVAMCLALLGCLQAQELQGHVSIILLGATGDLAKKYLWQGLFQLYLDEAGRGHSFSFHGAALTAPKQGQELMAKALESLSCPKDMAPSHCAEHKDQFLQLSQYRQLKTAEDYQALNKDIEAQLQHAGLREAGRIFYFSVPPFAYEDIARNINSSCRPGPGAWLRVVLEKPFGHDHFSAQQLATELGTFFQEEEMYRVDHYLGKQAVAQILPFRDQNRKALDGLWNRHHVERVEIIMKETVDAEGRTSFYEEYGVIRDVLQNHLTEVLTLVAMELPHNVSSAEAVLRHKLQVFQALRGLQRGSAVVGQYQSYSEQVRRELQKPDSFHSLTPTFAAVLVHIDNLRWEGVPFILMSGKALDERVGYARILFKNQACCVQSEKHWAAAQSQCLPRQLVFHIGHGDLGSPAVLVSRNLFRPSLPSSWKEMEGPPGLRLFGSPLSDYYAYSPVRERDAHSVLLSHIFHGRKNFFITTENLLASWNFWTPLLESLAHKAPRLYPGGAENGRLLDFEFSSGRLFFSQQQPEQLVPGPGPAPMPSDFQVLRAKYRESPLVSAWSEELISKLANDIEATAVRAVRRFGQFHLALSGGSSPVALFQQLATAHYGFPWAHTHLWLVDERCVPLSDPESNFQGLQAHLLQHVRIPYYNIHPMPVHLQQRLCAEEDQGAQIYAREISALVANSSFDLVLLGMGADGHTASLFPQSPTGLDGEQLVVLTTSPSQPHRRMSLSLPLINRAKKVAVLVMGRMKREITTLVSRVGHEPKKWPISGVLPHSGQLVWYMDYDAFLG

SEQ ID NO: 6360 - protein, 791 aa, Homo sapiens
MWNMLIVAMCLALLGCLQAQELQGHVSIILLGATGDLAKKYLWQGLFQLYLDEAGRGHSFSFHGAALTAPKQGQELMAKALESLSCPKDMAPSHCAEHKDQFLQLSQYRQLKTAEDYQALNKDIEAQLQHAGLREAGRIFYFSVPPFAYEDIARNINSSCRPGPGAWLRVVLEKPFGHDHFSAQQLATELGTFFQEEEMYRVDHYLGKQAVAQILPFRDQNRKALDGLWNRHHVERVEIIMKETVDAEGRTSFYEEYGVIRDVLQNHLTEVLTLVAMELPHNVSSAEAVLRHKLQVFQALRGLQRGSAVVGQYQSYSEQVRRELQKPDSFHSLTPTFAAVLVHIDNLRWEGVPFILMSGKALDERVGYARILFKNQACCVQSEKHWAAAQSQCLPRQLVFHIGHGDLGSPAVLVSRNLFRPSLPSSWKEMEGPPGLRLFGSPLSDYYAYSPVRERDAHSVLLSHIFHGRKNFFITTENLLASWNFWTPLLESLAHKAPRLYPGGAENGRLLDFEFSSGRLFFSQQQPEQLVPGPGPAPMPSDFQVLRAKYRESPLVSAWSEELISKLANDIEATAVRAVRRFGQFHLALSGGSSPVALFQQLATAHYGFPWAHTHLWLVDERCVPLSDPESNFQGLQAHLLQHVRIPYYNIHPMPVHLQQRLCAEEDQGAQIYAREISALVANSSFDLVLLGMGADGHTASLFPQSPTGLDGEQLVVLTTSPSQPHRRMSLSLPLINRAKKVAVLVMGRMKREITTLVSRVGHEPKKWPISGVLPHSGQLVWYMDYDAFLG

SEQ ID NO: 6361 - protein, 560 aa, Homo sapiens
MFARMSDLHVLLLMALVGKTACGFSLMSLLESLDPDWTPDQYDYSYEDYNQEENTSSTLTHAENPDWYYTEDQADPCQPNPCEHGGDCLVHGSTFTCSCLAPFSGNKCQKVQNTCKDNPCGRGQCLITQSPPYYRCVCKHPYTGPSCSQVVPVCRPNPCQNGATCSRHKRRSKFTCACPDQFKGKFCEIGSDDCYVGDGYSYRGKMNRTVNQHACLYWNSHLLLQENYNMFMEDAETHGIGEHNFCRNPDADEKPWCFIKVTNDKVKWEYCDVSACSAQDVAYPEESPTEPSTKLPGFDSCGKTEIAERKIKRIYGGFKSTAGKHPWQASLQSSLPLTISMPQGHFCGGALIHPCWVLTAAHCTDIKTRHLKVVLGDQDLKKEEFHEQSFRVEKIFKYSHYNERDEIPHNDIALLKLKPVDGHCALESKYVKTVCLPDGSFPSGSECHISGWGVTETGKGSRQLLDAKVKLIANTLCNSRQLYDHMIDDSMICAGNLQKPGQDTCQGDSGGPLTCEKDGTYYVYGIVSWGLECGKRPGVYTQVTKFLNWIKATIKSESGF

SEQ ID NO: 6362 - protein, 534 aa, Homo sapiens
MSLLESLDPDWTPDQYDYSYEDYNQEENTSSTLTHAENPDWYYTEDQADPCQPNPCEHGGDCLVHGSTFTCSCLAPFSGNKCQKVQNTCKDNPCGRGQCLITQSPPYYRCVCKHPYTGPSCSQVVPVCRPNPCQNGATCSRHKRRSKFTCACPDQFKGKFCEIGSDDCYVGDGYSYRGKMNRTVNQHACLYWNSHLLLQENYNMFMEDAETHGIGEHNFCRNPDADEKPWCFIKVTNDKVKWEYCDVSACSAQDVAYPEESPTEPSTKLPGFDSCGKTEIAERKIKRIYGGFKSTAGKHPWQASLQSSLPLTISMPQGHFCGGALIHPCWVLTAAHCTDIKTRHLKVVLGDQDLKKEEFHEQSFRVEKIFKYSHYNERDEIPHNDIALLKLKPVDGHCALESKYVKTVCLPDGSFPSGSECHISGWGVTETGKGSRQLLDAKVKLIANTLCNSRQLYDHMIDDSMICAGNLQKPGQDTCQGDSGGPLTCEKDGTYYVYGIVSWGLECGKRPGVYTQVTKFLNWIKATIKSESGF

SEQ ID NO: 6363 - protein, 459 aa, Homo sapiens
MTILTYPFKNLPTASKWALRFSIRPLSCSSQLRAAPAVQTKTKKTLAKPNIRNVVVVDGVRTPFLLSGTSGLLHRTSVPKEVVDYIIFGTVIQEVKTSNVAREAALGAGFSDKTPAHTVTMACISANQAMTTGVGLIASGQCDVIVAGGVELMSDVPIRHSRKMRKLMLDLNKAKSMGQRLSLISKFRFNFLAPELPAVSEFSTSETMGHSADRLAAAFAVSRLEQDEYALRSHSLAKKAQDEGLLSDVVPFKVPGKDTVTKDNGIRPSSLEQMAKLKPAFIKPYGTVTAANSSFLTDGASAMLIMAEEKALAMGYKPKAYLRDFMYVSQDPKDQLLLGPTYATPKVLEKAGLTMNDIDAFEFHEAFSGQILANFKAMDSDWFAENYMGRKTKVGLPPLEKFNNWGGSLSLGHPFGATGCRLVMAAANRLRKEGGQYGLVAACAAGGQGHAMIVEAYPK

SEQ ID NO: 6364 - protein, 85 aa, Homo sapiens
MTILTYPFKNLPTASKWALRFSIRPLSCSSQLRAAPAVQTKTKKTLAKPNIRNVVVVDGVRTPFLLSGTSYKDLMPHDLARAALT

SEQ ID NO: 6365 - protein, 351 aa, Homo sapiens
MTILTYPFKNLPTASKWALRFSIRPLSCSSQLRAAPAVQTKTKKTLAKPNIRNVVVVDGVRTPFLLSGTSYKDLMPHDLARAALTGLLHRTSVPKEVVDYIIFGTVIQEVKTSNVAREAALGAGFSDKTPAHTVTMACISANQAMTTGKDTVTKDNGIRPSSLEQMAKLKPAFIKPYGTVTAANSSFLTDGASAMLIMAEEKALAMGYKPKAYLRDFMYVSQDPKDQLLLGPTYATPKVLEKAGLTMNDIDAFEFHEAFSGQILANFKAMDSDWFAENYMGRKTKVGLPPLEKFNNWGGSLSLGHPFGATGCRLVMAAANRLRKEGGQYGLVAACAAGGQGHAMIVEAYPK

SEQ ID NO: 6366 - protein, 150 aa, Homo sapiens
MTILTYPFKNLPTASKWALRFSIRPLSCSSQLRAAPAVQTKTKKTLAKPNIRNVVVVDGVRTPFLLSGTSYKDLMPHDLARAALTGLLHRTSVPKEVVDYIIFGTVIQEVKTSNVAREAALGAGFSDKTPAHTVTMACISANQAMTTGVG

SEQ ID NO: 6367 - protein, 176 aa, Homo sapiens
MTILTYPFKNLPTASKWALRFSIRPLSCSSQLRAAPAVQTKTKKTLAKPNIRNVVVVDGVRTPFLLSGTSYKDLMPHDLARAALTGLLHRTSVPKEVVDYIIFGTVIQEVKTSNVAREAALGAGFSDKTPAHTVTMACISANQAMTTGVGLIASGQCDVIVAGGVELMSDVPIRHS

SEQ ID NO: 6368 - protein, 474 aa, Homo sapiens
MTILTYPFKNLPTASKWALRFSIRPLSCSSQLRAAPAVQTKTKKTLAKPNIRNVVVVDGVRTPFLLSGTSYKDLMPHDLARAALTGLLHRTSVPKEVVDYIIFGTVIQEVKTSNVAREAALGAGFSDKTPAHTVTMACISANQAMTTGVGLIASGQCDVIVAGGVELMSDVPIRHSRKMRKLMLDLNKAKSMGQRLSLISKFRFNFLAPELPAVSEFSTSETMGHSADRLAAAFAVSRLEQDEYALRSHSLAKKAQDEGLLSDVVPFKVPGKDTVTKDNGIRPSSLEQMAKLKPAFIKPYGTVTAANSSFLTDGASAMLIMAEEKALAMGYKPKAYLRDFMYVSQDPKDQLLLGPTYATPKVLEKAGLTMNDIDAFEFHEAFSGQILANFKAMDSDWFAENYMGRKTKVGLPPLEKFNNWGGSLSLGHPFGATGCRLVMAAANRLRKEGGQYGLVAACAAGGQGHAMIVEAYPK

SEQ ID NO: 6369 - protein, 452 aa, Homo sapiens
MTLVSGWLLYGWIIAVQTKTKKTLAKPNIRNVVVVDGVRTPFLLSGTSYKDLMPHDLARAALTGLLHRTSVPKEVVDYIIFGTVIQEVKTSNVAREAALGAGFSDKTPAHTVTMACISANQAMTTGVGLIASGQCDVIVAGGVELMSDVPIRHSRKMRKLMLDLNKAKSMGQRLSLISKFRFNFLAPELPAVSEFSTSETMGHSADRLAAAFAVSRLEQDEYALRSHSLAKKAQDEGLLSDVVPFKVPGKDTVTKDNGIRPSSLEQMAKLKPAFIKPYGTVTAANSSFLTDGASAMLIMAEEKALAMGYKPKAYLRDFMYVSQDPKDQLLLGPTYATPKVLEKAGLTMNDIDAFEFHEAFSGQILANFKAMDSDWFAENYMGRKTKVGLPPLEKFNNWGGSLSLGHPFGATGCRLVMAAANRLRKEGGQYGLVAACAAGGQGHAMIVEAYPK

SEQ ID NO: 6370 - protein, 84 aa, Homo sapiens
MALSSQIWAACLLLLLLLASLTSGSVFPQQTGQLAELQPQDRAGARASWMPMFQRRRRRDTHFPICIFCCGCCHRSKCGMCCKT

SEQ ID NO: 6371 - protein, 84 aa, Homo sapiens; identical to SEQ ID NO: 6370

SEQ ID NO: 6372 - protein, 153 aa, Homo sapiens
MKSLLLLVLISICWADHLSDNYTLDHDRAIHIQAENGPHLLVEAEQAKVFSHRGGNVTLPCKFYRDPTAFGSGIHKIRIKWTKLTSDYLKEVDVFVSMGYHKKTYGGYQGRVFLKGGSDSDASLVITDLTLEDYGRYKCEVIEGLEDDTVVVA

SEQ ID NO: 6373 - protein, 161 aa, Homo sapiens
MKSLLLLVLISICWADHLSDNYTLDHDRAIHIQAENGPHLLVEAEQAKVFSHRGGNVTLPCKFYRDPTAFGSGIHKIRIKWTKLTSDYLKEVDVFVSMGYHKKTYGGYQGRVFLKGGSDSDASLVITDLTLEDYGRYKCEVIEGLEDDTVVVALDLQGMYL

SEQ ID NO: 6374 - protein, 169 aa, Homo sapiens
MKSLLLLVLISICWADHLSDNYTLDHDRAIHIQAENGPHLLVEAEQAKVFSHRGGNVTLPCKFYRDPTAFGSGIHKIRIKWTKLTSDYLKEVDVFVSMGYHKKTYGGYQGRVFLKGGSDSDASLVITDLTLEDYGRYKCEVIEGLEDDTVVVALDLQGVVFPYFPRLGR

SEQ ID NO: 6375 - protein, 199 aa, Homo sapiens
MKSLLLLVLISICWADHLSDNYTLDHDRAIHIQAENGPHLLVEAEQAKVFSHRGGNVTLPCKFYRDPTAFGSGIHKIRIKWTKLTSDYLKEVDVFVSMGYHKKTYGGYQGRVFLKGGSDSDASLVITDLTLEDYGRYKCEVIEGLEDDTVVVALDLQGVVFPYFPRLGRYNLNFHEAQQACLDQDAVIASFDQLYDAWR

SEQ ID NO: 6376 - protein, 354 aa, Homo sapiens
MKSLLLLVLISICWADHLSDNYTLDHDRAIHIQAENGPHLLVEAEQAKVFSHRGGNVTLPCKFYRDPTAFGSGIHKIRIKWTKLTSDYLKEVDVFVSMGYHKKTYGGYQGRVFLKGGSDSDASLVITDLTLEDYGRYKCEVIEGLEDDTVVVALDLQGVVFPYFPRLGRYNLNFHEAQQACLDQDAVIASFDQLYDAWRGGLDWCNAGWLSDGSVQYPITKPREPCGGQNTVPGVRNYGFWDKDKSRYDVFCFTSNFNGRFYYLIHPTKLTYDEAVQACLNDGAQIAKVGQIFAAWKILGYDRCDAGWLADGSVRYPISRPRRRCSPTEAAVRFVGFPDKKHKLYGVYCFRAYN

SEQ ID NO: 6377 - protein, 258 aa, Homo sapiens
MKSLLLLVLISICWADHLSDNYTLDHDRAIHIQAENGPHLLVEAEQAKVFSHRGGNVTLPCKFYRDPTAFGSGIHKIRIKWTKLTSDYLKEVDVFVSMGYHKKTYGGYQGRVFLKGGSDSDASLVITDLTLEDYGRYKCEVIEGLEDDTVVVALDLQGVVFPYFPRLGRYNLNFHEAQQACLDQDAVIASFDQLYDAWRGGLDWCNAGWLSDGSVQYPITKPREPCGGQNTVPGVRNYGFWDKDKSRYDVFCFTSNFN

SEQ ID NO: 6378 - protein, 182 aa, Homo sapiens
MKSLLLLVLISICWADHLSDNYTLDHDRAIHIQENGPHLLVEAEQAKVFSHRGGNVTLPCKFYRDPTAFGSGIHKIRIKWTKLTSDYLKEVDVFVSMGYHKKTYGGYQGRVFLKGGSDSDASLVITDLTLEDYGRYKCEVIEGLEDDTVVVALDLQGVVFPYFPRLGRYNLNFHEAQQACLD

SEQ ID NO: 6379 - protein, 185 aa, Homo sapiens
MPGWLTLPTLCRFLLWAFTIFHKAQGDPASHPGPHYLLPPIHEVIHSHRGATATLPCVLGTTPPSYKVRWSKVEPGELRETLILITNGLHARGYGPLGGRARMRRGHRLDASLVIAGVRLEDEGRYRCELINGIEDESVALTLSLEGVVFPYQPSRGRYQFNYYEAKQACEEQDGRLATYSQLYQ

SEQ ID NO: 6380 - protein, 340 aa, Homo sapiens
MPGWLTLPTLCRFLLWAFTIFHKAQGDPASHPGPHYLLPPIHEVIHSHRGATATLPCVLGTTPPSYKVRWSKVEPGELRETLILITNGLHARGYGPLGGRARMRRGHRLDASLVIAGVRLEDEGRYRCELINGIEDESVALTLSLEGVVFPYQPSRGRYQFNYYEAKQACEEQDGRLATYSQLYQAWTEGLDWCNAGWLLEGSVRYPVLTARAPCGGRGRPGIRSYGPRDRMRDRYDAFCFTSALAGQVFFVPGRLTLSEAHAACRRRGAVVAKVGHLYAAWKFSGLDQCDGGWLADGSVRFPITTPRPRCGGLPDPGVRSFGFPRPQQAAYGTYCYAEN

SEQ ID NO: 6381 - protein, 226 aa, Homo sapiens
MGLLLLVPLLLLPGSYGLPFYNGFYYSNSANDQNLGNGHGKDLLNGVKLVVETPEETLFTYQGASVILPCRYRYEPALVSPRRVRVKWWKLSENGAPEKDVLVAIGLRHRSFGDYQGRVHLRQDKEHDVSLEIQDLRLEDYGRYRCEVIDGLEDESGLVELELRAESQERGGNGQEVWSFLTSPPTGATSSTSTRASRSVQSRLRWWPPLSSSSGPGRRAWTGATR

SEQ ID NO: 6382 - protein, 360 aa, Homo sapiens
MGLLLLVPLLLLPGSYGLPFYNGFYYSNSANDQNLGNGHGKDLLNGVKLVVETPEETLFTYQGASVILPCRYRYEPALVSPRRVRVKWWKLSENGAPEKDVLVAIGLRHRSFGDYQGRVHLRQDKEHDVSLEIQDLRLEDYGRYRCEVIDGLEDESGLVELELRGVVFPYQSPNGRYQFNFHEGQQVCAEQAAVVASFEQLFRAWEEGLDWCNAGWLQDATVQYPIMLPRQPCGGPGLAPGVRSYGPRHRRLHRYDVFCFATALKGRVYYLEHPEKLTLTEAREACQEDDATIAKVGQLFAAWKFHGLDRCDAGWLADGSVRYPVVHPHPNCGPPEPGVRSFGFPDPQSRLYGVYCYRQH

SEQ ID NO: 6383 - protein, 186 aa, Homo sapiens
MGLLLLVPLLLLPGSYGLPFYNGFYYSNSANDQNLGNGHGKDLLNGVKLVVETPEETLFTYQGASVILPCRYRYEPALVSPRRVRVKWWKLSENGAPEKDVLVAIGLRHRSFGDYQGRVHLRQDKEHDVSLEIQDLRLEDYGRYRCEVIDGLEDESGLVELELRGWGCVSSHLSHMLGRQFGDRGR

SEQ ID NO: 6384 - protein, 422 aa, Homo sapiens
MRKWRHREVNLPEVTQQDAVCPAPIPSPGLSAQTGLQKIWGTIHCQVCPGAPAWPGSPWHEEMGLLLLVPLLLLPGSYGLPFYNGFYYSNSANDQNLGNGHGKDLLNGVKLVVETPEETLFTYQGASVILPCRYRYEPALVSPRRVRVKWWKLSENGAPEKDVLVAIGLRHRSFGDYQGRVHLRQDKEHDVSLEIQDLRLEDYGRYRCEVIDGLEDESGLVELELRGVVFPYQSPNGRYQFNFHEGQQVCAEQAAVVASFEQLFRAWEEGLDWCNAGWLQDATVQYPIMLPRQPCGGPGLAPGVRSYGPRHRRLHRYDVFCFATALKGRVYYLEHPEKLTLTEAREACQEDDATIAKVGQLFAAWKFHGLDRCDAGWLADGSVRYPVVHPHPNCGPPEPGVRSFGFPDPQSRLYGVYCYRQH

SEQ ID NO: 6385 - protein, 402 aa, Homo sapiens
MVCARAALGPGALWAAAWGVLLLTAPAGAQRGRKKVVHVLEGESGSVVVQTAPGQVVSHRGGTIVLPCRYHYEAAAHGHDGVRLKWTKVVDPLAFTDVFVALGPQHRAFGSYRGRAELQGDGPGDASLVLRNVTLQDYGRYECEVTNELEDDAGMVKLDLEGVVFPYHPRGGRYKLTFAEAQRACAEQDGILASAEQLHAAWRDGLDWCNAGWLRDGSVQYPVNRPREPCGGLGGTGSAGGGGDANGGLRNYGYRHNAEERYDAFCFTSNLPGRVFFLKPLRPVPFSGAARACAARGAAVAKVGQLFAAWKLQLLDRCTAGWLADGSARYPIVNPRARCGGRRPGVRSLGFPDATRRLFGVYCYRAPGAPDPAPGGWGWGWAGGGGWAGGARDPAAWTPLHV

SEQ ID NO: 6386 - protein, 334 aa, Homo sapiens
MPLLGLLPRRAWASLLSQLLRPPCASCTGAVRCQSQDFDIAGQFDPMIPDAECLKIMCEILSGLQLGDFLIKMAWKDVRHEMVVKKGLAPEVADRIGDYVQCHGGVSLVEQMFQDPRLSQNKQALEGLGDLKLLFEYLTLFGIADKISFDLSLARGLDYYTGVIYEAVLLQTPTQAGEEPLNVGSVAAGGRYDGLVGMFDPKGHKVPCVGLSIGVERIFYIVEQRMKTKGEKVRTTETQVFVATPQKNFLQERLKLIAELWDSGIKAEMLYKNNPKLLTQLHYCESTGIPLVVIIGEQELKEGVIKIRSVASREEVAIKRENFVAEIQKRLSES

SEQ ID NO: 6387 - protein, 512 aa, Homo sapiens
MPLLGLLPRRAWASLLSQLLRPPCASCTGAVRCQSQGEESLQVAEAVLTSQLKAHQEKPNFIIKTPKGTRDLSPQHMVVREKILDLVISCFKRHGAKGMDTPAFELKETLTEKYGEDSGLMYDLKDQGGELLSLRYDLTVPFARYLAMNKVKKMKRYHVGKVWRRESPTIVQGRYREFCQCDFDIAGQFDPMIPDAECLKIMCEILSGLQLGDFLIKVNDRRIVDGMFAVCGVPESKFRAICSSIDKLDKMAWKDVRHEMVVKKGLAPEVADRIGDYVQCHGGVSLVEQMFQDPRLSQNKQALEGLGDLKLLFEYLTLFGIADKISFDLSLARGLDYYTGVIYEAVLLQTPTQAGEEPLNVGSVAAGGRYDGLVGMFDPKGHKVPCVGLSIGVERIFYIVEQRMKTKGEKVRTTETQVFVATPQKNFLQERLKLIAELWDSGIKAEMLYKNNPKLLTQLHYCESTGIPLVVIIGEQELKEGVIKIRSVASREEVAIKRENFVAEIQKRLSES

SEQ ID NO: 6388 - protein, 512 aa, Homo sapiens; identical to SEQ ID NO: 6387

SEQ ID NO: 6389 - protein, 99 aa, Homo sapiens
MPLLGLLPRRAWASLLSQLLRPPCASCTGAVRCQSQGEESLQVGGQQGQRCHRSGQCPEKPHLTFILLPGCRGSVNIPTESTSRETKFYYQDPKGYQGS

SEQ ID NO: 6390 - protein, 99 aa, Homo sapiens; identical to SEQ ID NO: 6389

SEQ ID NO: 6391 - protein, 481 aa, Homo sapiens
MPLLGLLPRRAWASLLSQLLRPPCASCTGAVRCQSQGTRDLSPQHMVVREKILDLVISCFKRHGAKGMDTPAFELKETLTEKYGEDSGLMYDLKDQGGELLSLRYDLTVPFARYLAMNKVKKMKRYHVGKVWRRESPTIVQGRYREFCQCDFDIAGQFDPMIPDAECLKIMCEILSGLQLGDFLIKVNDRRIVDGMFAVCGVPESKFRAICSSIDKLDKMAWKDVRHEMVVKKGLAPEVADRIGDYVQCHGGVSLVEQMFQDPRLSQNKQALEGLGDLKLLFEYLTLFGIADKISFDLSLARGLDYYTGVIYEAVLLQTPTQAGEEPLNVGSVAAGGRYDGLVGMFDPKGHKVPCVGLSIGVERIFYIVEQRMKTKGEKVRTTETQVFVATPQKNFLQERLKLIAELWDSGIKAEMLYKNNPKLLTQLHYCESTGIPLVVIIGEQELKEGVIKIRSVASREEVAIKRENFVAEIQKRLSES

SEQ ID NO: 6392 - protein, 399 aa, Homo sapiens
MPLLGLLPRRAWASLLSQLLRPPCASCTGAVRCQSQVAEAVLTSQLKAHQEKPNFIIKTPKGTRDLSPQHMVVREKILDLVISCFKRHGAKGMDTPAFELKDFDIAGQFDPMIPDAECLKIMCEILSGLQLGDFLIKMAWKDVRHEMVVKKGLAPEVADRIGDYVQCHGGVSLVEQMFQDPRLSQNKQALEGLGDLKLLFEYLTLFGIADKISFDLSLARGLDYYTGVIYEAVLLQTPTQAGEEPLNVGSVAAGGRYDGLVGMFDPKGHKVPCVGLSIGVERIFYIVEQRMKTKGEKVRTTETQVFVATPQKNFLQERLKLIAELWDSGIKAEMLYKNNPKLLTQLHYCESTGIPLVVIIGEQELKEGVIKIRSVASREEVAIKRENFVAEIQKRLSES

SEQ ID NO: 6393 - protein, 473 aa, Homo sapiens
MPLLGLLPRRAWASLLSQLLRPPCASCTGAVRCQSQVAEAVLTSQLKAHQEKPNFIIKTPKGTRDLSPQHMVVREKILDLVISCFKRHGAKGMDTPAFELKETLTEKYGEDSGLMYDLKDQGGELLSLRYDLTVPFARYLAMNKVKKMKRYHVGKVWRRESPTIVQGRYREFCQCDFDIAGQFDPMIPDAECLKIMCEILSGLQLGDFLIKMAWKDVRHEMVVKKGLAPEVADRIGDYVQCHGGVSLVEQMFQDPRLSQNKQALEGLGDLKLLFEYLTLFGIADKISFDLSLARGLDYYTGVIYEAVLLQTPTQAGEEPLNVGSVAAGGRYDGLVGMFDPKGHKVPCVGLSIGVERIFYIVEQRMKTKGEKVRTTETQVFVATPQKNFLQERLKLIAELWDSGIKAEMLYKNNPKLLTQLHYCESTGIPLVVIIGEQELKEGVIKIRSVASREEVAIKRENFVAEIQKRLSES

SEQ ID NO: 6394 - protein, 506 aa, Homo sapiens
MPLLGLLPRRAWASLLSQLLRPPCASCTGAVRCQSQVAEAVLTSQLKAHQEKPNFIIKTPKGTRDLSPQHMVVREKILDLVISCFKRHGAKGMDTPAFELKETLTEKYGEDSGLMYDLKDQGGELLSLRYDLTVPFARYLAMNKVKKMKRYHVGKVWRRESPTIVQGRYREFCQCDFDIAGQFDPMIPDAECLKIMCEILSGLQLGDFLIKVNDRRIVDGMFAVCGVPESKFRAICSSIDKLDKMAWKDVRHEMVVKKGLAPEVADRIGDYVQCHGGVSLVEQMFQDPRLSQNKQALEGLGDLKLLFEYLTLFGIADKISFDLSLARGLDYYTGVIYEAVLLQTPTQAGEEPLNVGSVAAGGRYDGLVGMFDPKGHKVPCVGLSIGVERIFYIVEQRMKTKGEKVRTTETQVFVATPQKNFLQERLKLIAELWDSGIKAEMLYKNNPKLLTQLHYCESTGIPLVVIIGEQELKEGVIKIRSVASREEVAIKRENFVAEIQKRLSES

SEQ ID NO: 6395 - protein, 506 aa, Homo sapiens; identical to SEQ ID NO: 6394

SEQ ID NO: 6396 - protein, 506 aa, Homo sapiens; identical to SEQ ID NO: 6394

SEQ ID NO: 6397 - protein, 160 aa, Homo sapiens
MVVREKILDLVISCFKRHGAKGMDTPAFELKETLTEKYGEDSGLMYDLKDQGGELLSLRYDLTVPFARYLAMNKVKKMKRYHVGKVWRRESPTIVQGRYREFCQCDFDIAGQFDPMIPDAECLKIMCEILSGLQLGDFLIKESRYCHCFEWKGIDKHLGH

SEQ ID NO: 6398 - protein, 436 aa, Homo sapiens
MVVREKILDLVISCFKRHGAKGMDTPAFELKETLTEKYGEDSGLMYDLKDQGGELLSLRYDLTVPFARYLAMNKVKKMKRYHVGKVWRRESPTIVQGRYREFCQCDFDIAGQFDPMIPDAECLKIMCEILSGLQLGDFLIKVNDRRIVDGMFAVCGVPESKFRAICSSIDKLDKMAWKDVRHEMVVKKGLAPEVADRIGDYVQCHGGVSLVEQMFQDPRLSQNKQALEGLGDLKLLFEYLTLFGIADKISFDLSLARGLDYYTGVIYEAVLLQTPTQAGEEPLNVGSVAAGGRYDGLVGMFDPKGHKVPCVGLSIGVERIFYIVEQRMKTKGEKVRTTETQVFVATPQKNFLQERLKLIAELWDSGIKAEMLYKNNPKLLTQLHYCESTGIPLVVIIGEQELKEGVIKIRSVASREEVAIKRENFVAEIQKRLSES

SEQ ID NO: 6399 - protein, 293 aa, Homo sapiens
MVVREKILDLVISCFKRHGAKGMDTPAFELKETLTEKYGEDSGLMYDLKDQGGELLSLRYDLTVPFARYLAMNKVKKMKRYHVGKVWRRESPTIVQGRYREFCQCDFDIAGQFDPMIPDAECLKIMCEILSGLQLGDFLIKVNDRRIVDGMFAVCGVPESKFRAICSSIDKLDKMAWKDVRHEMVVKKGLAPEVADRIGDYVQCHGGVSLVEQMFQDPRLSQNKQALEGLGDLKLLFEYLTLFGIADKISFDLSLARGLDYYTGVIYEAVLLQTPTQAGEEPLNVGSVAAGGR

SEQ ID NO: 6400 - protein, 436 aa, Homo sapiens; identical to SEQ ID NO: 6398

SEQ ID NO: 6401 - protein, 219 aa, Homo sapiens
  SITE 1: note = misc_feature - Xaa can be any naturally occurring amino acid
XASLLSQLLRPPCASCTGAVRCQSQVAEAVLTSQLKAHQEKPNFIIKTPKGTRDLSPQHMVVREKILDLVISCFKRHGAKGMDTPAFELKETLTEKYGEDSGLMYDLKDQGGELLSLRYDLTVPFARYLAMNKVKKMKRYHVGKVWRRESPTIVQGRYREFCQCDFDIAGQFDPMIPDAECLKIMCEILSGLQLGDFLIKESRYCHCFEWKGIDKHLGH

SEQ ID NO: 6402 - protein, 223 aa, Homo sapiens
MHPQVVILSLILHLADSVAGSVKVGGEAGPSVTLPCHYSGAVTSMCWNRGSCSLFTCQNGIVWTNGTHVTYRKDTRYKLLGDLSRRDVSLTIENTAVSDSGVYCCRVEHRGWFNDMKITVSLEIVPPKVTTTPIVTTVPTVTTVRTSTTVPTTTTVPMTTVPTTTVPTTMSIPTTTTVLTTMTVSTTTSVPTTTSIPTTTSVPVTTTVSTFVPPMPLPRQNHE

SEQ ID NO: 6403 - protein, 364 aa, Homo sapiens
MHPQVVILSLILHLADSVAGSVKVGGEAGPSVTLPCHYSGAVTSMCWNRGSCSLFTCQNGIVWTNGTHVTYRKDTRYKLLGDLSRRDVSLTIENTAVSDSGVYCCRVEHRGWFNDMKITVSLEIVPPKVTTTPIVTTVPTVTTVRTSTTVPTTTTVPMTTVPTTTVPTTMSIPTTTTVLTTMTVSTTTSVPTTTSIPTTTSVPVTTTVSTFVPPMPLPRQNHEPVATSPSSPQPAETHPTTLQGAIRREPTSSPLYSYTTDGNDTVTESSDGLWNNNQTQLFLEHSLLTANTTKGIYAGVCISVLVLLALLGVIIAKKYFFKKEVQQLSVSFSSLQIKALQNAVEKEVQAEDNIYIENSLYATD

SEQ ID NO: 6404 - protein, 401 aa, Homo sapiens
MHPQVVILSLILHLADSVAGSVKVGGEAGPSVTLPCHYSGAVTSMCWNRGSCSLFTCQNGIVWTNGTHVTYRKDTRYKLLGDLSRRDVSLTIENTAVSDSGVYCCRVEHRGWFNDMKITVSLEIVPPKVTTTPIVTTVPTVTTVRTSTTVPTTTTVPMTTVPTTTVPTTMSIPTTTTVLTTMTVSTTTSVPTTTSIPTTTSVPVTTTVSTFVPPMPLPRQNHEPVATSPSSPQPAETHPTTLQGAIRREPTSSPLYSYTTDGNDTVTESSDGLWNNNQTQLFLEHSLLTANTTKGIYAGVCISVLVLLALLGVIIAKMFHLAAFKLKLCKMQLKRKSKQKTISTLRIVFMPRTKTQWCSLRVYAHECRRLNRHQHIRRLLDPKTIFLFQFHLAFQHVSDTG

SEQ ID NO: 6405 - protein, 364 aa, Homo sapiens; identical to SEQ ID NO: 6403

SEQ ID NO: 6406 - protein, 401 aa, Homo sapiens; identical to SEQ ID NO: 6404

SEQ ID NO: 6407 - protein, 268 aa, Homo sapiens
MGLSPSAPAVAVQASNASASPPSGCPMHEGKMKGCPVNTEPSGPTCEKKTYSVPAHQERAYEYVECPIRGTAAENKENLDPSNLMPPPNQTPAPDQPFALSTVREESSIPRADSEKKWVYPSEQMFWNAMLKKGWKWKDEDISQKDMYNIIRIHNQNNEQAWKEILKWEALHAAECPCGPSLIRFGGKAKEYSPRARIRSWMGYELPFDRHDWIINRCGTEVRYVIDYYDGGEVNKDYQFTILDVRPALDSLSAVWDRMKVAWWRWTS

SEQ ID NO: 6408 - protein, 268 aa, Homo sapiens; identical to SEQ ID NO: 6407

SEQ ID NO: 6409 - protein, 268 aa, Homo sapiens; identical to SEQ ID NO: 6407

SEQ ID NO: 6410 - protein, 131 aa, Homo sapiens
MNLPSTKVSWAAVTLLLLLLLLPPALLSSGAAAQPLPDCCRQKTCSCRLYELLHGAGNHAAGILTLGKRRSGPPGLQGRLQRLLQASGNHAAGILTMGRRAGAEPAPRPCLGRRCSAPAAASVAPGGQSGI

SEQ ID NO: 6411 - protein, 223 aa, Homo sapiens
MAAWGCVAALGAARGLCWRAARAAAGLQGRPARRCYAVGPAQPLPRNDFPRIEGVLLLGEPVRWETSLQLIMDVLLSNGSPGAGLATPPYPHLPVLASNMDLLWMAEAKMPSDNPMSDVYGANLFHQYLQKATHDGAPELGAGGTRQQQPSASQSCISILVCTGVYNPRNPQSTEPVLGGGEPPFHGHRDLCFSPGLMEASHVVNDVNEAVQLVFRKEGWALE

SEQ ID NO: 6412 - protein, 423 aa, Homo sapiens
MAAWGCVAALGAARGLCWRAARAAAGLQGRPARRCYAVGPAQSPPTFGFLLDIDGVLVRGHRVIPAALKAFRRLVNSQGQLRVPVVFVTNAGNILQHSKAQELSALLGCEVDADQVILSHSPMKLFSEYHEKRMLVSGQGPVMENAQGLGFRNVVTVDELRMAFPLLDMVDLERRLKTTPLPRNDFPRIEGVLLLGEPVRWETSLQLIMDVLLSNGSPGAGLATPPYPHLPVLASNMDLLWMAEAKMPRFGHGTFLLCLETIYQKVTGKELRYEGLMGKPSILTYQYAEDLIRRQAERRGWAAPIRKLYAVGDNPMSDVYGANLFHQYLQKATHDGAPELGAGGTRQQQPSASQSCISILVCTGVYNPRNPQSTEPVLGGGEPPFHGHRDLCFSPGLMEASHVVNDVNEAVQLVFRKEGWALE

SEQ ID NO: 6413 - protein, 393 aa, Homo sapiens
MYAWFFLPSFSQSPPTFGFLLDIDGVLVRGHRVIPAALKAFRRLVNSQGQLRVPVVFVTNAGNILQHSKAQELSALLGCEVDADQVILSHSPMKLFSEYHEKRMLVSGQGPVMENAQGLGFRNVVTVDELRMAFPLLDMVDLERRLKTTPLPRNDFPRIEGVLLLGEPVRWETSLQLIMDVLLSNGSPGAGLATPPYPHLPVLASNMDLLWMAEAKMPRFGHGTFLLCLETIYQKVTGKELRYEGLMGKPSILTYQYAEDLIRRQAERRGWAAPIRKLYAVGDNPMSDVYGANLFHQYLQKATHDGAPELGAGGTRQQQPSASQSCISILVCTGVYNPRNPQSTEPVLGGGEPPFHGHRDLCFSPGLMEASHVVNDVNEAVQLVFRKEGWALE

SEQ ID NO: 6414 - protein, 87 aa, Homo sapiens
MELAHSLLLNEEAYNQLGEVQKAEFIFEWLRYLEKLLLATSRNDVREKQKTLVEQLLSLLNSSPGPPTRKLLAKNLAILYSIGDTFS

SEQ ID NO: 6415 - protein, 113 aa, Homo sapiens
MELAHSLLLNEEAYNQLGEVQKAEFIFEWLRYLEKLLLATSRNDVREKQKTLVEQLLSLLNSSPGPPTRKLLAKNLAILYSIGDTFSVHEAIDKCNDLIRSKDDSPSYLPTKL

SEQ ID NO: 6416 - protein, 2046 aa, Homo sapiens
MELAHSLLLNEEAYNQLGEVQKAEFIFEWLRYLEKLLLATSRNDVREKQKTLVEQLLSLLNSSPGPPTRKLLAKNLAILYSIGDTFSVHEAIDKCNDLIRSKDDSPSYLPTKLAAVVCLGSLYKKLGRILGNTFTDTVGNILKAMKSAESQGRYEIMLSLQNILNGLGAAAAPCHRDVYKAARSCLTDRSMAVRCAAAKCLLELQNEAIFMWSTDLDSVATLCFKSFEGSNYDVRISVSKLLGIILAKAVISKHPGTAASRQSIRRVSLEEVLELLGTGFLRGSSGFLRASGDMLKGTSSVSRDVRVGVTQAYVVFVSTLGGAWLEKNFAAFFSHILSLASPSHPKATQTQIDAVCCRRCVSFILRTTIGGLLGEKAQLAAVKDICQAIWKLKKVMDAVMSDGNLETRLGSTDVAASQHMLVCALQELGNLIHNLGTTAAPLLQDSSTGLLDSILSVILHPSISVRLAAAWCLHCIAVALPSYLTPLLDRCLERLTGHKSSPEAVTGFSFAVAALLGAVKHCPLGIPHGKGKIIMTLAEDLLCSAAQNSRLSAQRTQAGWLLISALMTLGPAVVSHHLARVLLLWKCVFPASPKDLETEKSRGDSFTWQVTLEGRAGALCAIKSFVSHCGDLLTEEVTQRLLPPLPCAVDLLTQLSSILKMYGSPLKTPSVVYRQRLYELLILLPPETYEGNLCAILRELAADLTAPDIQVAASTFLLPPLCHQDDLLILSPFLQETDHRFIEEQLLLGNGVACGSLEYDPYSIYEKDVEGDSVPKPLPPALSVISSASKLFGVVCAHVGETQRLLILEQLLDSIKHTKGARQQVVQLHVVSSVSSFLKYVAGSKGCLGPEEMKRFALTLVMGALESPNPLLRCAAAESWARLAQVVDDGAFTAGLAQVSFDKLKSARDVVTRTGHSLALGSLHRYLGGISSSQHLNSCIGILYTLAQDSTSPDVQTWALHSLSLIIDSAGPLYYVHVEPTLSLIIMLLLNVPPTHAEVHQSLGRCLNALITTLGPELQGNSTSISTLRTSCLLGCAVMQDNPDCLVQAQAISCLQQLHMFAPRHVNLSSLVSCLCVNLCSPYLLLRRAVLACLRQLVQREAAEVSEHAVMLAKDSREELTPDANIREVGLEGALLILLDKETDERLCHDIKETLNYMLTSMAVEKLSLWLKLCKDVLAASADFTAVTCVDTMQEEEGDKGDDASVLTTRRDEKSHPFTNPRWATRVFAAECVCRIINQCENANSAHFDIALAQEMKKRDSRNDFLVLHLADLIRMAFMAATDHSDQLRLSGLEMLLVVIRRFATVPEPEFPGHVILEQYQANVGAALRPAFTSETPPDVTAKACQVCSAWIASGVVSDLNDLRRVHQLLVSSLTKIQAGKEALSHLYNESASTMEILAVLKAWAEVYIIAVQRHKNHRQPLKTTTCLEDGIRNGSCSSDGLLDLVYADLGTLSRLWLAALQDFALLTLPSEFASQLPAEGGAFYTAETSENAKLHYYNSWALILHATALWLTSTGFVVADPDEGASNLSRPVTPTSMCQGSSSGATIKSPEDVYTDRFHLILGISVEFLCSLRSDATMESITACLHALQALLDVPWPRSKIGSDQDLGIELLNVLHRVILTRESPSIQLASLEVVRQIICAAQEHVKEKRRSAEVDDGAAEKETLPEFGEGKDTGGLVPGKSLVFATLELCVCILVRQLPELNPKLTGSPGVKATKPQILLEDGSRLVSAALVILSELPAVCSPEGSISILPTILYLTIGVLRETAVKLPGGQLSSTVAASLQALKGILSSPMARAEKSRTAWTDLLRSALTTILDCWDPVDETHQELDEVSLLTAITVFILSTSPEVTTIPCLQKRCIDKFKATLEIKDPVVQIKTYQLLHSIFQYPNPAVSYPYIYSLASCIMEKLQEIDKRKPENTAELEIFQEGIKVLETLVTVAEEHHRAQLVACLLPILISFLLDENSLGSATSIMRNLHDFALQNLMQIGPQYSSVFKSLVASSPALKARLEAAIKGNQESVKVKIPTSKYTKSPGKNSSIQLKTSFL

SEQ ID NO: 6417 - protein, 1599 aa, Homo sapiens
  SITE 1: note = misc_feature - Xaa can be any naturally occurring amino acid
XGEKAQLAAVKDICQAIWKLKKVMDAVMSDGNLETRLGSTDVAASQHMLVCALQELGNLIHNLGTTAAPLLQDSSTGLLDSILSVILHPSISVRLAAAWCLHCIAVALPSYLTPLLDRCLERLTGHKSSPEAVTGFSFAVAALLGAVKHCPLGIPHGKGKIIMTLAEDLLCSAAQNSRLSAQRTQAGWLLISALMTLGPAVVSHHLARVLLLWKCVFPASPKDLETEKSRGDSFTWQVTLEGRAGALCAIKSFVSHCGDLLTEEVTQRLLPPLPCAVDLLTQLSSILKMYGSPLKTPSVVYRQRLYELLILLPPETYEGNLCAILRELAADLTAPDIQVAASTFLLPPLCHQDDLLILSPFLQETDHRFIEEQLLLGNGVACGSLEYDPYSIYEKDVEGDSVPKPLPPALSVISSASKLFGVVCAHVGETQRLLILEQLLDSIKHTKGARQQVVQLHVVSSVSSFLKYVAGSKGCLGPEEMKRFALTLVMGALESPNPLLRCAAAESWARLAQVVDDGAFTAGLAQVSFDKLKSARDVVTRTGHSLALGSLHRYLGGISSSQHLNSCIGILYTLAQDSTSPDVQTWALHSLSLIIDSAGPLYYVHVEPTLSLIIMLLLNVPPTHAEVHQSLGRCLNALITTLGPELQGNSTSISTLRTSCLLGCAVMQDNPDCLVQAQAISCLQQLHMFAPRHVNLSSLVSCLCVNLCSPYLLLRRAVLACLRQLVQREAAEVSEHAVMLAKDSREELTPDANIREVGLEGALLILLDKETDERLCHDIKETLNYMLTSMAVEKLSLWLKLCKDVLAASADFTAVTCVDTMQEEEGDKGDDASVLTTRRDEKSHPFTNPRWATRVFAAECVCRIINQCENANSAHFDIALAQEMKKRDSRNDFLVLHLADLIRMAFMAATDHSDQLRLSGLEMLLVVIRRFATVPEPEFPGHVILEQYQANVGAALRPAFTSETPPDVTAKACQVCSAWIASGVVSDLNDLRRVHQLLVSSLTKIQAGKEALSHLYNESASTMEILAVLKAWAEVYIIAVQRHKNHRQPLKTTTCLEDGIRNGSCSSDGLLDLVYADLGTLSRLWLAALQDFALLTLPSEFASQLPAEGGAFYTAETSENAKLHYYNSWALILHATALWLTSTGFVVADPDEGASNLSRPVTPTSMCQGSSSGATIKSPEDVYTDRFHLILGISVEFLCSLRSDATMESITACLHALQALLDVPWPRSKIGSDQDLGIELLNVLHRVILTRESPSIQLASLEVVRQIICAAQEHVKEKRRSAEVDDGAAEKETLPEFGEGKDTGGLVPGKSLVFATLELCVCILVRQLPELNPKLTGSPGVKATKPQILLEDGSRLVSAALVILSELPAVCSPEVDETHQELDEVSLLTAITVFILSTSPEVTTIPCLQKRCIDKFKATLEIKDPVVQIKTYQLLHSIFQYPNPAVSYPYIYSLASCIMEKLQEIDKRKPENTAELEIFQEGIKVLETLVTVAEEHHRAQLVACLLPILISFLLDENSLGSATSIMRNLHDFALQNLMQIGPQYSSVFKSLVASSPALKARLEAAIKGNQESVKVKIPTSKYTKSPGKNSSIQLKTSFL

SEQ ID NO: 6418 - protein, 124 aa, Homo sapiens
  SITE 1: note = misc_feature - Xaa can be any naturally occurring amino acid
XLLLRRAVLACLRQLVQREAAEVSEHAVMLAKDSREELTPDANIREVGLEGALLILLDKETDERLCHDIKETLNYMLTSMAVEKLSLWLKLCKDVLAASAGKYWTLSVKIIKLKFETLHKIVYH

SEQ ID NO: 6419 - protein, 896 aa, Homo sapiens
  SITE 1: note = misc_feature - Xaa can be any naturally occurring amino acid
XSHPKATQTQIDAVCCRRCVSFILRTTIGGLLGEKAQLAAVKDICQAIWKLKKVMDVAASQHMLVCALQELGNLIHNLGTTAAPLLQDSSTGLLDSILSVILHPSISVRLAAAWCLHCIAVALPSYLTPLLDRCLERLTGHKSSPEAVTGFSFAVAALLGAVKHCPLGIPHGKGKIIMTLAEDLLCSAAQNSRLSAQRTQAGWLLISALMTLGPAVVSHHLARVLLLWKCVFPASPKDLETEKSRGDSFTWQVTLEGRAGALCAIKSFVSHCGDLLTEEVTQRLLPPLPCAVDLLTQLSSILKMYGSPLKTPSVVYRQRLYELLILLPPETYEGNLCAILRELAADLTAPDIQVAASTFLLPPLCHQDDLLILSPFLQETDHRFIEEQLLLGNGVACGSLEYDPYSIYEKDVEGDSVPKPLPPALSVISSASKLFGVVCAHVGETQRLLILEQLLDSIKHTKGARQQVVQLHVVSSVSSFLKYVAGSKGCLGPEEMKRFALTLVMGALESPNPLLRCAAAESWARLAQVVDDGAFTAGLAQVSFDKLKSARDVVTRTGHSLALGSLHRYLGGISSSQHLNSCIGILYTLAQDSTSPDVQTWALHSLSLIIDSAGPLYYVHVEPTLSLIIMLLLNVPPTHAEVHQSLGRCLNALITTLGPELQGNSTSISTLRTSCLLGCAVMQDNPDCLVQAQAISCLQQLHMFAPRHVNLSSLVSCLCVNLCSPYLLLRRAVLACLRQLVQREAAEVSEHAVMLAKDSREELTPDANIREVGLEGALLILLDKETDERLCHDIKETLNYMLTSMAVEKLSLWLKLCKDVLAASADFTAVTCVDTMQEEEGDKGDDASVLTTRRDEKSHPFTNPRWATRVFAAECVCRIINQCENANSAHFDIALA

SEQ ID NO: 6420 - protein, 199 aa, Homo sapiens
  SITE 1: note = misc_feature - Xaa can be any naturally occurring amino acid
XSLIIMLLLNVPPTHAEVHQSLGRCLNALITTLGPELQGNSTSISTLRTSCLLGCAVMQDNPDCLVQAQAISCLQQLHMFAPRHVNLSSLVSCLCEILLDNSVLVNLCSPYLLLRRAVLACLRQLVQREAAEVSEHAVMLAKDSREELTPDANIREVGLEGALLILLDKETDERLCHDIKETLNYMLTSMAVEKLSLWL

SEQ ID NO: 6421 - protein, 208 aa, Homo sapiens
MESGHLLWALLFMQSLWPQLTDGATRVYYLGIRDVQWNYAPKGRNVITNQPLDSDIVASSFLKSDKNRIGGTYKKTIYKEYKDDSYTDEVAQPAWLGFLGPVLQAEVGDVILIHLKNFATRPYTIHPHGVFYEKDSEGSLYPDGSSGPLKADDSVPPGGSHIYNWTIPEGHAPTDADPACLTWIYHSHVDAPRDIATGLIGPLITCKR

SEQ ID NO: 6422 - protein, 1158 aa, Homo sapiens
MESGHLLWALLFMQSLWPQLTDGATRVYYLGIRDVQWNYAPKGRNVITNQPLDSDIVASSFLKSDKNRIGGTYKKTIYKEYKDDSYTDEVAQPAWLGFLGPVLQAEVGDVILIHLKNFATRPYTIHPHGVFYEKDSEGSLYPDGSSGPLKADDSVPPGGSHIYNWTIPEGHAPTDADPACLTWIYHSHVDAPRDIATGLIGPLITCKRGALDGNSPPQRQDVDHDFFLLFSVVDENLSWHLNENIATYCSDPASVDKEDETFQESNRMHAINGFVFGNLPELNMCAQKRVAWHLFGMGNEIDVHTAFFHGQMLTTRGHHTDVANIFPATFVTAEMVPWEPGTWLISCQVNSHFRDGMQALYKVKSCSMAPPVDLLTGKVRQYFIEAHEIQWDYGPMGHDGSTGKNLREPGSISDKFFQKSSSRIGGTYWKVRYEAFQDETFQEKMHLEEDRHLGILGPVIRAEVGDTIQVVFYNRASQPFSMQPHGVFYEKDYEGTVYNDGSSYPGLVAKPFEKVTYRWTVPPHAGPTAQDPACLTWMYFSAADPIRDTNSGLVGPLLVCRAGALGADGKQKGVDKEFFLLFTVLDENKSWYSNANQAAAMLDFRLLSEDIEGFQDSNRMHAINGFLFSNLPRLDMCKGDTVAWHLLGLGTETDVHGVMFQGNTVQLQGMRKGAAMLFPHTFVMAIMQPDNLGTFEIYCQAGSHREAGMRAIYNVSQCPGHQATPRQRYQAARIYYIMAEEVEWDYCPDRSWEREWHNQSEKDSYGYIFLSNKDGLLGSRYKKAVFREYTDGTFRIPRPRTGPEEHLGILGPLIKGEVGDILTVVFKNNASRPYSVHAHGVLESTTVWPLAAEPGEVVTYQWNIPERSGPGPNDSACVSWIYYSAVDPIKDMYSGLVGPLAICQKGILEPHGGRSDMDREFALLFLIFDENKSWYLEENVATHGSQDPGSINLQDETFLESNKMHAINGKLYANLRGLTMYQGERVAWYMLAMGQDVDLHTIHFHAESFLYRNGENYRADVVDLFPGTFEVVEMVASNPGTWLMHCHVTDHVHAGMETLFTVFSRTEHLSPLTVITKETEKAVPPRDIEEGNVKMLGMQIPIKNVEMLASVLVAISVTLLLVVLALGGVVWYQHRQRKLRRNRRSILDDSFKLLSFKQ

SEQ ID NO: 6423 - protein, 811 aa, Homo sapiens
MESGHLLWALLFMQSLWPQLTDGATRVYYLGIRDVQWNYAPKGRNVITNQPLDSDIVASSFLKSDKNRIGGTYKKTIYKEYKDDSYTDEVAQPAWLGFLGPVLQAEVGDVILIHLKNFATRPYTIHPHGVFYEKDSEGSLYPDGSSGPLKADDSVPPGGSHIYNWTIPEGHAPTDADPACLTWIYHSHVDAPRDIATGLIGPLITCKRGALDGNSPPQRQDVDHDFFLLFSVVDENLSWHLNENIATYCSDPASVDKEDETFQESNRMHAINGFVFGNLPELNMCAQKRVAWHLFGMGNEIDVHTAFFHGQMLTTRGHHTDVANIFPATFVTAEMVPWEPGTWLISCQVNSHFRDGMQALYKVKSCSMAPPVDLLTGKVRQYFIEAHEIQWDYGPMGHDGSTGKNLREPGSISDKFFQKSSSRIGGTYWKVRYEAFQDETFQEKMHLEEDRHLGILGPVIRAEVGDTIQVVFYNRASQPFSMQPHGVFYEKDYEGTVYNDDPIRDTNSGLVGPLLVCRAGALGADGKQKGVDKEFFLLFTVLDENKSWYSNANQAAAMLDFRLLSEDIEGFQDSNRMHAINGFLFSNLPRLDMCKGDTVAWHLLGLGTETDVHGVMFQGNTVQLQGMRKGAAMLFPHTFVMAIMQPDNLGTFEIYCQAGSHREAGMRAIYNVSQCPGHQATPRQRYQAARIYYIMAEEVEWDYCPDRSWEREWHNQSEKDSYGYIFLSNKDGLLGSRYKKAVFREYTDGTFRIPRPRTGPEEHLGILGPLIKGEVGDILTVVFKNNASRPYSVHAHGVLESTTVWPLAAEP

SEQ ID NO: 6424 - protein, 891 aa, Homo sapiens
MHAINGFVFGNLPELNMCAQKRVAWHLFGMGNEIDVHTAFFHGQMLTTRGHHTDVANIFPATFVTAEMVPWEPGTWLISCQVNSHFRDGMQALYKVKSCSMAPPVDLLTGKVRQYFIEAHEIQWDYGPMGHDGSTGKNLREPGSISDKFFQKSSSRIGGTYWKVRYEAFQDETFQEKMHLEEDRHLGILGPVIRAEVGDTIQVVFYNRASQPFSMQPHGVFYEKDYEGTVYNDGSSYPGLVAKPFEKVTYRWTVPPHAGPTAQDPACLTWMYFSAADPIRDTNSGLVGPLLVCRAGALGADGKQKGVDKEFFLLFTVLDENKSWYSNANQAAAMLDFRLLSEDIEGFQDSNRMHAINGFLFSNLPRLDMCKGDTVAWHLLGLGTETDVHGVMFQGNTVQLQGMRKGAAMLFPHTFVMAIMQPDNLGTFEIYCQAGSHREAGMRAIYNVSQCPGHQATPRQRYQAARIYYIMAEEVEWDYCPDRSWEREWHNQSEKDSYGYIFLSNKDGLLGSRYKKAVFREYTDGTFRIPRPRTGPEEHLGILGPLIKGEVGDILTVVFKNNASRPYSVHAHGVLESTTVWPLAAEPGEVVTYQWNIPERSGPGPNDSACVSWIYYSAVDPIKDMYSGLVGPLAICQKGILEPHGGRSDMDREFALLFLIFDENKSWYLEENVATHGSQDPGSINLQDETFLESNKMHAINGKLYANLRGLTMYQGERVAWYMLAMGQDVDLHTIHFHAESFLYRNGENYRADVVDLFPGTFEVVEMVASNPGTWLMHCHVTDHVHAGMETLFTVFSRTEHLSPLTVITKETEKAVPPRDIEEGNVKMLGMQIPIKNVEMLASVLVAISVTLLLVVLALGGVVWYQHRQRKLRRNRRSILDDSFKLLSFKQ

SEQ ID NO: 6425 - protein, 1212 aa, Homo sapiens
MTQTLPYHLSLLNVLFPGPCSRHFKFRRGKCAQPAWRKVSAPSQDLLITKVMWAMESGHLLWALLFMQSLWPQLTDGATRVYYLGIRDVQWNYAPKGRNVITNQPLDSDIVASSFLKSDKNRIGGTYKKTIYKEYKDDSYTDEVAQPAWLGFLGPVLQAEVGDVILIHLKNFATRPYTIHPHGVFYEKDSEGSLYPDGSSGPLKADDSVPPGGSHIYNWTIPEGHAPTDADPACLTWIYHSHVDAPRDIATGLIGPLITCKRGALDGNSPPQRQDVDHDFFLLFSVVDENLSWHLNENIATYCSDPASVDKEDETFQESNRMHAINGFVFGNLPELNMCAQKRVAWHLFGMGNEIDVHTAFFHGQMLTTRGHHTDVANIFPATFVTAEMVPWEPGTWLISCQVNSHFRDGMQALYKVKSCSMAPPVDLLTGKVRQYFIEAHEIQWDYGPMGHDGSTGKNLREPGSISDKFFQKSSSRIGGTYWKVRYEAFQDETFQEKMHLEEDRHLGILGPVIRAEVGDTIQVVFYNRASQPFSMQPHGVFYEKDYEGTVYNDGSSYPGLVAKPFEKVTYRWTVPPHAGPTAQDPACLTWMYFSAADPIRDTNSGLVGPLLVCRAGALGADGKQKGVDKEFFLLFTVLDENKSWYSNANQAAAMLDFRLLSEDIEGFQDSNRMHAINGFLFSNLPRLDMCKGDTVAWHLLGLGTETDVHGVMFQGNTVQLQGMRKGAAMLFPHTFVMAIMQPDNLGTFEIYCQAGSHREAGMRAIYNVSQCPGHQATPRQRYQAARIYYIMAEEVEWDYCPDRSWEREWHNQSEKDSYGYIFLSNKDGLLGSRYKKAVFREYTDGTFRIPRPRTGPEEHLGILGPLIKGEVGDILTVVFKNNASRPYSVHAHGVLESTTVWPLAAEPGEVVTYQWNIPERSGPGPNDSACVSWIYYSAVDPIKDMYSGLVGPLAICQKGILEPHGGRSDMDREFALLFLIFDENKSWYLEENVATHGSQDPGSINLQDETFLESNKMHAINGKLYANLRGLTMYQGERVAWYMLAMGQDVDLHTIHFHAESFLYRNGENYRADVVDLFPGTFEVVEMVASNPGTWLMHCHVTDHVHAGMETLFTVFSRTEHLSPLTVITKETEKAVPPRDIEEGNVKMLGMQIPIKNVEMLASVLVAISVTLLLVVLALGGVVWYQHRQRKLRRNRRSILDDSFKLLSFKQ

SEQ ID NO: 6426 - protein, 1160 aa, Homo sapiens
MWAMESGHLLWALLFMQSLWPQLTDGATRVYYLGIRDVQWNYAPKGRNVITNQPLDSDIVASSFLKSDKNRIGGTYKKTIYKEYKDDSYTDEVAQPAWLGFLGPVLQAEVGDVILIHLKNFATRPYTIHPHGVFYEKDSEGSLYPDGSSGPLKADDSVPPGGSHIYNWTIPEGHAPTDADPACLTWIYHSHVDAPRDIATGLIGPLITCKRGALDGNSPPQRQDVDHDFFLLFSVVDENLSWHLNENIATYCSDPASVDKEDETFQESNRMHAINGFVFGNLPELNMCAQKRVAWHLFGMGNEIDVHTAFFHGQMLTTRGHHTDVANIFPATFVTAEMVPWEPGTWLISCQVNSHFRDGMQALYKVKSCSMAPPVDLLTGKVRQYFIEAHEIQWDYGPMGHDGSTGKNLREPGSISDKFFQKSSSRIGGTYWKVRYEAFQDETFQEKMHLEEDRHLGILGPVIRAEVGDTIQVVFYNRASQPFSMQPHGVFYEKDYEGTVYNDGSSYPGLVAKPFEKVTYRWTVPPHAGPTAQDPACLTWMYFSAADPIRDTNSGLVGPLLVCRAGALGADGKQKGVDKEFFLLFTVLDENKSWYSNANQAAAMLDFRLLSEDIEGFQDSNRMHAINGFLFSNLPRLDMCKGDTVAWHLLGLGTETDVHGVMFQGNTVQLQGMRKGAAMLFPHTFVMAIMQPDNLGTFEIYCQAGSHREAGMRAIYNVSQCPGHQATPRQRYQAARIYYIMAEEVEWDYCPDRSWEREWHNQSEKDSYGYIFLSNKDGLLGSRYKKAVFREYTDGTFRIPRPRTGPEEHLGILGPLIKGEVGDILTVVFKNNASRPYSVHAHGVLESTTVWPLAAEPGEVVTYQWNIPERSGPGPNDSACVSWIYYSAVDPIKDMYSGLVGPLAICQKGILEPHGGRSDMDREFALLFLIFDENKSWYLEENVATHGSQDPGSINLQDETFLESNKMHAINGKLYANLRGLTMYQGERVAWYMLAMGQDVDLHTIHFHAESFLYRNGENYRADVVDLFPGTFEVVEMVASNPGTWLMHCHVTDHVHAGMETLFTVFSRTEHLSPLTVITKETEKVPPRDIEEGNVKMLGMQIPIKNVEMLASVLVAISVTLLLVVLALGGVVWYQHRQRKLRRNRRSILDDSFKLLSFKQ

SEQ ID NO: 6427 - protein, 969 aa, Homo sapiens
MWAMESGHLLWALLFMQSLWPQLTDGATRVYYLGIRDVQWNYAPKGRNVITNQPLDSDIVASSFLKSDKNRIGGTYKKTIYKEYKDDSYTDEVAQPAWLGFLGPVLQAEVGDVILIHLKNFATRPYTIHPHGVFYEKDSEGSLYPDGSSGPLKADDSVPPGGSHIYNWTIPEGHAPTDADPACLTWIYHSHVDAPRDIATGLIGPLITCKRGALDGNSPPQRQDVDHDFFLLFSVVDENLSWHLNENIATYCSDPASVDKEDETFQESNRMHAINGFVFGNLPELNMCAQKRVAWHLFGMGNEIDVHTAFFHGQMLTTRGHHTDVANIFPATFVTAEMVPWEPGTWLISCQVNSHFRDGMQALYKVKSCSMAPPVDLLTGKVRQYFIEAHEIQWDYGPMGHDGSTGKNLREPGSISDKFFQKSSSRIGGTYWKVRYEAFQDETFQEKMHLEEDRHLGILGPVIRAEVGDTIQVVFYNRASQPFSMQPHGVFYEKDYEGTVYNDGTFEIYCQAGSHREAGMRAIYNVSQCPGHQATPRQRYQAARIYYIMAEEVEWDYCPDRSWEREWHNQSEKDSYGYIFLSNKDGLLGSRYKKAVFREYTDGTFRIPRPRTGPEEHLGILGPLIKGEVGDILTVVFKNNASRPYSVHAHGVLESTTVWPLAAEPGEVVTYQWNIPERSGPGPNDSACVSWIYYSAVDPIKDMYSGLVGPLAICQKGILEPHGGRSDMDREFALLFLIFDENKSWYLEENVATHGSQDPGSINLQDETFLESNKMHAINGKLYANLRGLTMYQGERVAWYMLAMGQDVDLHTIHFHAESFLYRNGENYRADVVDLFPGTFEVVEMVASNPGTWLMHCHVTDHVHAGMETLFTVFSRTEHLSPLTVITKETEKAVPPRDIEEGNVKMLGMQIPIKNVEMLASVLVAISVTLLLVVLALGGVVWYQHRQRKLRRNRRSILDDSFKLLSFKQ

SEQ ID NO: 6428 - protein, 63 aa, Homo sapiens
MWAMESGHLLWALLFMQSLWPQLTDGATRVYYLGIRDVQWNYAPKGRNVITNQPLDSDIYVKM

SEQ ID NO: 6429 - protein, 88 aa, Homo sapiens
MTSSRLWFSLLLAAAFAGRATALWPWPQNFQTSDQRYVLYPNNFQFQYDVSSAAQPGCSVLDEAFQRYRDLLFGSGSWPRPYLTANMY

SEQ ID NO: 6430 - protein, 143 aa, Homo sapiens
MTSSRLWFSLLLAAAFAGRATALWPWPQNFQTSDQRYVLYPNNFQFQYDVSSAAQPGCSVLDEAFQRYRDLLFGSGSWPRPYLTGKRHTLEKNVLVVSVVTPGCNQLPTLESVENYTLTINDDQCLLLSETVWGALRGCHGVQ

SEQ ID NO: 6431 - protein, 529 aa, Homo sapiens
MTSSRLWFSLLLAAAFAGRATALWPWPQNFQTSDQRYVLYPNNFQFQYDVSSAAQPGCSVLDEAFQRYRDLLFGSGSWPRPYLTGKRHTLEKNVLVVSVVTPGCNQLPTLESVENYTLTINDDQCLLLSETVWGALRGLETFSQLVWKSAEGTFFINKTEIEDFPRFPHRGLLLDTSRHYLPLSSILDTLDVMAYNKLNVFHWHLVDDPSFPYESFTFPELMRKGSYNPVTHIYTAQDVKEVIEYARLRGIRVLAEFDTPGHTLSWGPGIPGLLTPCYSGSEPSGTFGPVNPSLNNTYEFMSTFFLEVSSVFPDFYLHLGGDEVDFTCWKSNPEIQDFMRKKGFGEDFKQLESFYIQTLLDIVSSYGKGYVVWQEVFDNKVKIQPDTIIQVWREDIPVNYMKELELVTKAGFRALLSAPWYLNRISYGPDWKDFYIVEPLAFEGTPEQKALVIGGEACMWGEYVDNTNLVPRLWPRAGAVAERLWSNKLTSDLTFAYERLSHFRCELLRRGVQAQPLNVGFCEQEFEQT

SEQ ID NO: 6432 - protein, 509 aa, Homo sapiens
MTSSRLWFSLLLAAAFAGRATALWPWPQNFQTSDQRYVLYPNNFQFQYDVSSAAQPGCSVLDEAFQRYRDLLFGSGSWPRPYLTGKRHTLEKNVLVVSVVTPGCNQLPTLESVENYTLTINDDQCLLLSETVWGALRGLETFSQLVWKSAEGTFFINKTEIEDFPRFPHRGLLLDTSRHYLPLSSILDTLDVMAYNKLNVFHWHLVDDPSFPYESFTFPELMRKGSYNPVTHIYTAQDVKEVIEYARLRGIRVLAEFDTPGHTLSWGPGIPGLLTPCYSGSEPSGTFGPVNPSLNNTYEFMSTFFLEVSSVFPDFYLHLGGDEVDFTCWKSNPEIQDFMRKKGFGEDFKQLESFYIQTLLDIVSSYGKGYVVWQEVFDNKVKIQPDTIIQVWREDIPVNYMKELELVTKAGFRALLSAPWYLNRISYGPDWKDFYIVEPLAFEGTPEQKALVIGGEACMWGEYVDNTNLVPRLWPRAGAVAERLWSNKLTSDLTFAYERLSHFRCELLR

SEQ ID NO: 6433 - protein, 373 aa, Homo sapiens
MTSSRLWFSLLLAAAFAGRATALWPWPQNFQTSDQRYVLYPNNFQFQYDVSSAAQPGCSVLDEAFQRYRDLLFGSGSWPRPYLTGKRHTLEKNVLVVSVVTPGCNQLPTLESVENYTLTINDDQCLLLSETVWGALRGLETFSQLVWKSAEGTFFINKTEIEDFPRFPHRGLLLDTSRHYLPLSSILDTLDVMAYNKLNVFHWHLVDDPSFPYESFTFPELMRKGSYNPVTHIYTAQDVKEVIEYARLRGIRVLAEFDTPGHTLSWGPGIPGLLTPCYSGSEPSGTFGPVNPSLNNTYEFMSTFFLEVSSVFPDFYLHLGGDEVDFTCWKSNPEIQDFMRKKGFGEDFKQLESFYIQTFSQTQSYRCGERIFQ

SEQ ID NO: 6434 - protein, 143 aa, Homo sapiens
MTSSRLWFSLLLAAAFAGRATALWPWPQNFQTSDQRYVLYPNNFQFQYDVSSAAQPGCSVLDEAFQRYRDLLFGSGSWPRPYLTGKRHTLEKNVLVVSVVTPGCNQLPTLESVENYTLTINDDQCLLLSETVWGALRVLYQQD

SEQ ID NO: 6435 - protein, 119 aa, Homo sapiens
MTSSRLWFSLLLAAAFAGRATALWPWPQNFQTSDQRYVLYPNNFQFQYDVSSAAQPGCSVLDEAFQRYRDLLFGSGSWPRPYLTGLSLSFRLECSGVITAYSNLELQDSSSLPASLMSS

SEQ ID NO: 6436 - protein, 540 aa, Homo sapiens
MTSSRLWFSLLLAAAFAGRATALWPWPQNFQTSDQRYVLYPNNFQFQYDVSSAAQPGCSVLDEAFQRYRDLLFGSGSWPRPYLTGWPHQAYPVFLGKRHTLEKNVLVVSVVTPGCNQLPTLESVENYTLTINDDQCLLLSETVWGALRGLETFSQLVWKSAEGTFFINKTEIEDFPRFPHRGLLLDTSRHYLPLSSILDTLDVMAYNKLNVFHWHLVDDPSFPYESFTFPELMRKGSYNPVTHIYTAQDVKEVIEYARLRGIRVLAEFDTPGHTLSWGPGIPGLLTPCYSGSEPSGTFGPVNPSLNNTYEFMSTFFLEVSSVFPDFYLHLGGDEVDFTCWKSNPEIQDFMRKKGFGEDFKQLESFYIQTLLDIVSSYGKGYVVWQEVFDNKVKIQPDTIIQVWREDIPVNYMKELELVTKAGFRALLSAPWYLNRISYGPDWKDFYIVEPLAFEGTPEQKALVIGGEACMWGEYVDNTNLVPRLWPRAGAVAERLWSNKLTSDLTFAYERLSHFRCELLRRGVQAQPLNVGFCEQEFEQT

SEQ ID NO: 6437 - protein, 318 aa, Homo sapiens
  SITE 1: note = misc_feature - Xaa can be any naturally occurring amino acid
XFQFQYDVSSAAQPGCSVLDEAFQRYRDLLFGSGSWPRPYLTGKRHTLEKNVLVVSVVTPGCNQLPTLESVENYTLTINDDQCLLLSETVWGALRGLETFSQLVWKSAEGTFFINKTEIEDFPRFPHRGLLLDTSRHYLPLSSILDTLDVMAYNKLNVFHWHLVDDPSFPYESFTFPELMRKGSYNPVTHIYTAQDVKEVIEYARLRGIRVLAEFDTPGHTLSWGPGIPGLLTPCYSGSEPSGTFGPVNPSLNNTYEFMSTFFLEVSSVFPDFYLHLGGDEVDFTCWKSNPEIQDFMRKKGFGEDFKQLESFYIQTYP

SEQ ID NO: 6438 - protein, 128 aa, Homo sapiens
  SITE 1: note = misc_feature - Xaa can be any naturally occurring amino acid
XFSLLLAAAFAGRATALWPWPQNFQTSDQRYVLYPNNFQFQYDVSSAAQPGCSVLDEAFQRYRDLLFGSGSWPRPYLTGKRHTLEKNVLVVSVVTPGCNQLPTLESVENCIPVPFARRRLLSSFCCGN

SEQ ID NO: 6439 - protein, 331 aa, Homo sapiens
MAFNKFNVLHWHIVDDQSFPYQSITFPELSNKGSYSLSHVYTPNDVRMVIEYARLRGIRVLPEFDTPGHTLSWGKGQKDLLTPCYSRQNKLDSFGPINPTLNTTYSFLTTFFKEISEVFPDQFIHLGGDEVEFKCWESNPKIQDFMRQKGFGTDFKKLESFYIQKVLDIIATINKGSIVWQEVFDDKAKLAPGTIVEVWKDSAYPEELSRVTASGFPVILSAPWYLDLISYGQDWRKYYKVEPLDFGGTQKQKQLFIGGEACLWGEYVDATNLTPRLWPRASAVGERLWSSKDVRDMDDAYDRLTRHRCRMVERGIAAQPLYAGYCNHENM

SEQ ID NO: 6440 - protein, 35 aa, Homo sapiens
MDDAYDRLTRHRCRMVERGIAAQPLYAGYCNHENM

SEQ ID NO: 6441 - protein, 556 aa, Homo sapiens
MELCGLGLPRPPMLLALLLATLLAAMLALLTQVALVVQVAEAARAPSVSAKPGPALWPLPLLVKMTPNLLHLAPENFYISHSPNSTAGPSCTLLEEAFRRYHGYIFGFYKWHHEPAEFQAKTQVQQLLVSITLQSECDAFPNISSDESYTLLVKEPVAVLKANRVWGALRGLETFSQLVYQDSYGTFTINESTIIDSPRFSHRGILIDTSRHYLPVKIILKTLDAMAFNKFNVLHWHIVDDQSFPYQSITFPELSNKGSYSLSHVYTPNDVRMVIEYARLRGIRVLPEFDTPGHTLSWGKGQKDLLTPCYSRQNKLDSFGPINPTLNTTYSFLTTFFKEISEVFPDQFIHLGGDEVEFKCWESNPKIQDFMRQKGFGTDFKKLESFYIQKVLDIIATINKGSIVWQEVFDDKAKLAPGTIVEVWKDSAYPEELSRVTASGFPVILSAPWYLDLISYGQDWRKYYKVEPLDFGGTQKQKQLFIGGEACLWGEYVDATNLTPRLWPRASAVGERLWSSKDVRDMDDAYDRLTRHRCRMVERGIAAQPLYAGYCNHENM

SEQ ID NO: 6442 - protein, 52 aa, Homo sapiens
  SITE 1: note = misc_feature - Xaa can be any naturally occurring amino acid
XDATNLTPRLWPRASAVGERLWSSKDVRDMDDAYDRLTRHRCRMVEGLASFL

SEQ ID NO: 6443 - protein, 170 aa, Homo sapiens
  SITE 1: note = misc_feature - Xaa can be any naturally occurring amino acid
XFGTDFKKLESFYIQKVLDIIATINKGSIVWQEVFDDKAKLAPGTIVEVWKDSAYPEELSRVTASGFPVILSAPWYLDLISYGQDWRKYYKVEPLDFGGTQKQKQLFIGGEACLWGEYVDATNLTPRLWPRASAVGERLWSSKDVRDMDDAYDRLTRHRCRMVEGLASFL

SEQ ID NO: 6444 - protein, 202 aa, Homo sapiens
  SITE 1: note = misc_feature - Xaa can be any naturally occurring amino acid
XNTTYSFLTTFFKEISEVFPDQFIHLGGDEVEFKCWVLDIIATINKGSIVWQEVFDDKAKLAPGTIVEVWKDSAYPEELSRVTASGFPVILSAPWYLDLISYGQDWRKYYKVEPLDFGGTQKQKQLFIGGEACLWGEYVDATNLTPRLWPRASAVGERLWSSKDVRDMDDAYDRLTRHRCRMVERGIAAQPLYAGYCNHENM

SEQ ID NO: 6445 - protein, 70 aa, Homo sapiens
MGEPGQSPSPRSSHGSPPTLSTLTLLLLLCGHAHSQCKILRCNADSPSYLRTCRNALIRRCIRLRWIIFL

SEQ ID NO: 6446 - protein, 93 aa, Homo sapiens
MGEPGQSPSPRSSHGSPPTLSTLTLLLLLCGHAHSQCKILRCNAEYVSSTLSLRGGGSSGALRGGGGGGRGGGVGSGGLCRALRSYALCTRRT

SEQ ID NO: 6447 - protein, 426 aa, Homo sapiens
MGEPGQSPSPRSSHGSPPTLSTLTLLLLLCGHAHSQCKILRCNAEYVSSTLSLRGGGSSGALRGGGGGGRGGGVGSGGLCRALRSYALCTRRTARTCRGDLAFHSAVHGIEDLMIQHNCSRQGPTAPPPPRGPALPGAGSGLPAPDPCDYEGRFSRLHGRPPGFLHCASFGDPHVRSFHHHFHTCRVQGAWPLLDNDFLFVQATSSPMALGANATATRKLTIIFKNMQECIDQKVYQAEVDNLPVAFEDGSINGGDRPGGSSLSIQTANPGNHVEIQAAYIGTTIIIRQTAGQLSFSIKVAEDVAMAFSAEQDLQLCVGGCPPSQRLSRSERNRRGAITIDTARRLCKEGLPVEDAYFHSCVFDVLISGDPNFTVAAQAALEDARAFLPDLEKLHLFPSDAGVPLSSATLLAPLLSGLFVLWLCIQ

SEQ ID NO: 6448 - protein, 313 aa, Homo sapiens
MIQHNCSRQGPTAPPPPRGPALPGAGSGLPAPDPCDYEGRFSRLHGRPPGFLHCASFGDPHVRSFHHHFHTCRVQGAWPLLDNDFLFVQATSSPMALGANATATRKLTIIFKNMQECIDQKVYQAEVDNLPVAFEDGSINGGDRPGGSSLSIQTANPGNHVEIQAAYIGTTIIIRQTAGQLSFSIKVAEDVAMAFSAEQDLQLCVGGCPPSQRLSRSERNRRGAITIDTARRLCKEGLPVEDAYFHSCVFDVLISGDPNFTVAAQAALEDARAFLPDLEKLHLFPSDAGVPLSSATLLAPLLSGLFVLWLCIQ

SEQ ID NO: 6449 - protein, 200 aa, Homo sapiens
MQECIDQKVYQAEVDNLPVAFEDGSINGGDRPGGSSLSIQTANPGNHVEIQAAYIGTTIIIRQTAGQLSFSIKVAEDVAMAFSAEQDLQLCVGGCPPSQRLSRSERNRRGAITIDTARRLCKEGLPVEDAYFHSCVFDVLISGDPNFTVAAQAALEDARAFLPDLEKLHLFPSDAGVPLSSATLLAPLLSGLFVLWLCIQ

SEQ ID NO: 6450 - protein, 200 aa, Homo sapiens; identical to SEQ ID NO: 6449

SEQ ID NO: 6451 - protein, 200 aa, Homo sapiens; identical to SEQ ID NO: 6449

SEQ ID NO: 6452 - protein, 118 aa, Homo sapiens
MWVTKLLPALLLQHVLLHLLLLPIAIPYAEGQRKRRNTIHEFKKSAKTTLIKIDPALKIKTKKVNTADQCANRCTRNKGLPFTCKAFVFDKARKQCLWFPFNSMSSGVKKEFGHEFDL

SEQ ID NO: 6453 - protein, 141 aa, Homo sapiens
MWVTKLLPALLLQHVLLHLLLLPIAIPYAEGQRKRRNTIHEFKKSAKTTLIKIDPALKIKTKKVNTADQCANRCTRNKGLPFTCKAFVFDKARKQCLWFPFNSMSSGVKKEFGHEFDLYENKDYIRNCIIGKGRSYKGTVS

SEQ ID NO: 6454 - protein, 161 aa, Homo sapiens
MWVTKLLPALLLQHVLLHLLLLPIAIPYAEGQRKRRNTIHEFKKSAKTTLIKIDPALKIKTKKVNTADQCANRCTRNKGLPFTCKAFVFDKARKQCLWFPFNSMSSGVKKEFGHEFDLYENKDYIRNCIIGKGRSYKGTVSITKSGIKCQPWSSMIPHEHR

SEQ ID NO: 6455 - protein, 210 aa, Homo sapiens
MWVTKLLPALLLQHVLLHLLLLPIAIPYAEGQRKRRNTIHEFKKSAKTTLIKIDPALKIKTKKVNTADQCANRCTRNKGLPFTCKAFVFDKARKQCLWFPFNSMSSGVKKEFGHEFDLYENKDYIRNCIIGKGRSYKGTVSITKSGIKCQPWSSMIPHEHSFLPSSYRGKDLQENYCRNPRGEEGGPWCFTSNPEVRYEVCDIPQCSEGK

SEQ ID NO: 6456 - protein, 728 aa, Homo sapiens
MWVTKLLPALLLQHVLLHLLLLPIAIPYAEGQRKRRNTIHEFKKSAKTTLIKIDPALKIKTKKVNTADQCANRCTRNKGLPFTCKAFVFDKARKQCLWFPFNSMSSGVKKEFGHEFDLYENKDYIRNCIIGKGRSYKGTVSITKSGIKCQPWSSMIPHEHSFLPSSYRGKDLQENYCRNPRGEEGGPWCFTSNPEVRYEVCDIPQCSEVECMTCNGESYRGLMDHTESGKICQRWDHQTPHRHKFLPERYPDKGFDDNYCRNPDGQPRPWCYTLDPHTRWEYCAIKTCADNTMNDTDVPLETTECIQGQGEGYRGTVNTIWNGIPCQRWDSQYPHEHDMTPENFKCKDLRENYCRNPDGSESPWCFTTDPNIRVGYCSQIPNCDMSHGQDCYRGNGKNYMGNLSQTRSGLTCSMWDKNMEDLHRHIFWEPDASKLNENYCRNPDDDAHGPWCYTGNPLIPWDYCPISRCEGDTTPTIVNLDHPVISCAKTKQLRVVNGIPTRTNIGWMVSLRYRNKHICGGSLIKESWVLTARQCFPSRDLKDYEAWLGIHDVHGRGDEKCKQVLNVSQLVYGPEGSDLVLMKLARPAVLDDFVSTIDLPNYGCTIPEKTSCSVYGWGYTGLINYDGLLRVAHLYIMGNEKCSQHHRGKVTLNESEICAGAEKIGSGPCEGDYGGPLVCEQHKMRMVLGVIVPGRGCAIPNRPGIFVRVAYYAKWIHKIILTYKVPQS

SEQ ID NO: 6457 - protein, 290 aa, Homo sapiens
MWVTKLLPALLLQHVLLHLLLLPIAIPYAEGQRKRRNTIHEFKKSAKTTLIKIDPALKIKTKKVNTADQCANRCTRNKGLPFTCKAFVFDKARKQCLWFPFNSMSSGVKKEFGHEFDLYENKDYIRNCIIGKGRSYKGTVSITKSGIKCQPWSSMIPHEHSFLPSSYRGKDLQENYCRNPRGEEGGPWCFTSNPEVRYEVCDIPQCSEVECMTCNGESYRGLMDHTESGKICQRWDHQTPHRHKFLPERYPDKGFDDNYCRNPDGQPRPWCYTLDPHTRWEYCAIKTCET

SEQ ID NO: 6458 - protein, 728 aa, Homo sapiens; identical to SEQ ID NO: 6456

SEQ ID NO: 6459 - protein, 184 aa, Homo sapiens
MWVTKLLPALLLQHVLLHLLLLPIAIPYAEGQRKRRNTIHEFKKSAKTTLIKIDPALKIKTKKVNTADQCANRCTRNKGLPFTCKAFVFDKARKQCLWFPFNSMSSGVKKEFGHEFDLYENKDYIRNCIIGKGRSYKGTVSITKSGIKCQPWSSMIPHEHSGGDDCLVESTFYSIPFWGHNSAR

SEQ ID NO: 6460 - protein, 205 aa, Homo sapiens
MWVTKLLPALLLQHVLLHLLLLPIAIPYAEGQRKRRNTIHEFKKSAKTTLIKIDPALKIKTKKVNTADQCANRCTRNKGLPFTCKAFVFDKARKQCLWFPFNSMSSGVKKEFGHEFDLYENKDYIRNCIIGKGRSYKGTVSITKSGIKCQPWSSMIPHEHSYRGKDLQENYCRNPRGEEGGPWCFTSNPEVRYEVCDIPQCSEGK

SEQ ID NO: 6461 - protein, 285 aa, Homo sapiens
MWVTKLLPALLLQHVLLHLLLLPIAIPYAEGQRKRRNTIHEFKKSAKTTLIKIDPALKIKTKKVNTADQCANRCTRNKGLPFTCKAFVFDKARKQCLWFPFNSMSSGVKKEFGHEFDLYENKDYIRNCIIGKGRSYKGTVSITKSGIKCQPWSSMIPHEHSYRGKDLQENYCRNPRGEEGGPWCFTSNPEVRYEVCDIPQCSEVECMTCNGESYRGLMDHTESGKICQRWDHQTPHRHKFLPERYPDKGFDDNYCRNPDGQPRPWCYTLDPHTRWEYCAIKTCET

SEQ ID NO: 6462 - protein, 723 aa, Homo sapiens
MWVTKLLPALLLQHVLLHLLLLPIAIPYAEGQRKRRNTIHEFKKSAKTTLIKIDPALKIKTKKVNTADQCANRCTRNKGLPFTCKAFVFDKARKQCLWFPFNSMSSGVKKEFGHEFDLYENKDYIRNCIIGKGRSYKGTVSITKSGIKCQPWSSMIPHEHSYRGKDLQENYCRNPRGEEGGPWCFTSNPEVRYEVCDIPQCSEVECMTCNGESYRGLMDHTESGKICQRWDHQTPHRHKFLPERYPDKGFDDNYCRNPDGQPRPWCYTLDPHTRWEYCAIKTCADNTMNDTDVPLETTECIQGQGEGYRGTVNTIWNGIPCQRWDSQYPHEHDMTPENFKCKDLRENYCRNPDGSESPWCFTTDPNIRVGYCSQIPNCDMSHGQDCYRGNGKNYMGNLSQTRSGLTCSMWDKNMEDLHRHIFWEPDASKLNENYCRNPDDDAHGPWCYTGNPLIPWDYCPISRCEGDTTPTIVNLDHPVISCAKTKQLRVVNGIPTRTNIGWMVSLRYRNKHICGGSLIKESWVLTARQCFPSRDLKDYEAWLGIHDVHGRGDEKCKQVLNVSQLVYGPEGSDLVLMKLARPAVLDDFVSTIDLPNYGCTIPEKTSCSVYGWGYTGLINYDGLLRVAHLYIMGNEKCSQHHRGKVTLNESEICAGAEKIGSGPCEGDYGGPLVCEQHKMRMVLGVIVPGRGCAIPNRPGIFVRVAYYAKWIHKIILTYKVPQS

SEQ ID NO: 6463 - protein, 655 aa, Homo sapiens
MGRWAWVPSPWPPPGLGPFLLLLLLLLLLPRGFQPQPGGNRTESPEPNATATPAIPTILVTSVTSETPATSAPEAEGPQSGGLPPPPRAVPSSSSPQAQALTEDGRPCRFPFRYGGRMLHACTSEGSAHRKWCATTHNYDRDRAWGYCVEATPPPGGPAALDPCASGPCLNGGSCSNTQDPQSYHCSCPRAFTGKDCGTEKCFDETRYEYLEGGDRWARVRQGHVEQCECFGGRTWCEGTRHTACLSSPCLNGGTCHLIVATGTTVCACPPGFAGRLCNIEPDERCFLGNGTGYRGVASTSASGLSCLAWNSDLLYQELHVDSVGAAALLGLGPHAYCRNPDNDERPWCYVVKDSALSWEYCRLEACESLTRVQLSPDLLATLPEPASPGRQACGRRHKKRTFLRPRIIGGSSSLPGSHPWLAAIYIGDSFCAGSLVHTCWVVSAAHCFSHSPPRDSVSVVLGQHFFNRTTDVTQTFGIEKYIPYTLYSVFNPSDHDLVLIRLKKKGDRCATRSQFVQPICLPEPGSTFPAGHKCQIAGWGHLDENVSGYSSSLREALVPLVADHKCSSPEVYGADISPNMLCAGYFDCKSDACQGDSGGPLACEKNGVAYLYGIISWGDGCGRLHKPGVYTRVANYVDWINDRIRPPRRLVAPS

SEQ ID NO: 6464 - protein, 662 aa, Homo sapiens
MGRWAWVPSPWPPPGLGPFLLLLLLLLLLPRGFQPQPGGNRTESPEPNATATPAIPTILVTSVTSETPATSAPEAEGPQSGGLPPPPRAVPSSSSPQAQALTEDGRPCRFPFRYGGRMLHACTSEGSAHRKWCATTHNYDRDRAWGYCVEATPPPGGPAALDPCASGPCLNGGSCSNTQDPQSYHCSCPRAFTGKDCGTEKCFDETRYEYLEGGDRWARVRQGHVEQCECFGGRTWCEGTRHTACLSSPCLNGGTCHLIVATGTTVCACPPGFAGRLCNIEPDERCFLGNGTGYRGVASTSASGLSCLAWNSDLLYQELHVDSVGAAALLGLGPHAYCRNPDNDERPWCYVVKDSALSWEYCRLEACDLETEGRESLTRVQLSPDLLATLPEPASPGRQACGRRHKKRTFLRPRIIGGSSSLPGSHPWLAAIYIGDSFCAGSLVHTCWVVSAAHCFSHSPPRDSVSVVLGQHFFNRTTDVTQTFGIEKYIPYTLYSVFNPSDHDLVLIRLKKKGDRCATRSQFVQPICLPEPGSTFPAGHKCQIAGWGHLDENVSGYSSSLREALVPLVADHKCSSPEVYGADISPNMLCAGYFDCKSDACQGDSGGPLACEKNGVAYLYGIISWGDGCGRLHKPGVYTRVANYVDWINDRIRPPRRLVAPS

SEQ ID NO: 6465 - protein, 700 aa, Homo sapiens
MLKMLSFKLLLLAVALGFFEGDAKFGERNEGSGARRRRCLNGNPPKRLKRRDRRMMSQLELLSGGEMLCGGFYPRLSCCLRSDSPGLGRLENKIFSVTNNTECGKLLEEIKCALCSPHSQSLFHSPEREVLERDLVLPLLCKDYCKEFFYTCRGHIPGFLQTTADEFCFYYARKDGGLCFPDFPRKQVRGPASNYLDQMEEYDKVEEISRKHKHNCFCIQEVVSGLRQPVGALHSGDGSQRLFILEKEGYVKILTPEGEIFKEPYLDIHKLVQSGIKGGDERGLLSLAFHPNYKKNGKLYVSYTTNQERWAIGPHDHILRVVEYTVSRKNPHQVDLRTARVFLEVAELHRKHLGGQLLFGPDGFLYIILGDGMITLDDMEEMDGLSDFTGSVLRLDVDTDMCNVPYSIPRSNPHFNSTNQPPEVFAHGLHDPGRCAVDRHPTDININLTILCSDSNGKNRSSARILQIIKGKDYESEPSLLEFKPFSNGPLVGGFVYRGCQSERLYGSYVFGDRNGNFLTLQQSPVTKQWQEKPLCLGTSGSCRGYFSGHILGFGEDELGEVYILSSSKSMTQTHNGKLYKIVDPKRPLMPEECRATVQPAQTLTSECSRLCRNGYCTPTGKCCCSPGWEGDFCRTAKCEPACRHGGVCVRPNKCLCKKGYLGPQCEQVDRNIRRVTRAGILDQIIDMTSYLLDLTSYIV

SEQ ID NO: 6466 - protein, 320 aa, Homo sapiens
MLKMLSFKLLLLAVALGFFEGDAKFGERNEGSGARRRRCLNGNPPKRLKRRDRRMMSQLELLSGGEMLCGGFYPRLSCCLRSDSPGLGRLENKIFSVTNNTECGKLLEEIKCALCSPHSQSLFHSPEREVLERDLVLPLLCKDYCKEFFYTCRGHIPGFLQTTADEFCFYYARKDGGLCFPDFPRKQVRGPASNYLDQMEEYDKVEEISRKHKHNCFCIQEVVSGLRQPVGALHSGDGSQRLFILEKEGYVKILTPEGEIFKEPYLDIHKLVQSGIKVGFLNFIYFCAGYVNFILVLPSSLKVFLCNKRKNLAGENKGAT

SEQ ID NO: 6467 - protein, 782 aa, Homo sapiens
MARARAGALLALWVLGAAAHPQCLDFRPPFRPTQPLRLCAQYSDFGCCDEGRDAELTRRFWALASRVDAAEWAACAGYARDLLCQECSPYAAHLYDAEDPFTPLRTVPGLCQDYCLDMWHKCRGLFRHLSTDQELWALEGNLARFCRYLSLDDTDYCFPYLLVNKNLNSNLGHVVADAKGCLQLCLEEVANGLRNPVAMVHARDGTHRFFVAEQVGLVWAYLPDRSRLGKPFLNISRVVLTSPWEGDERGFLGIAFHPSFQHNRRLYVYYSVGIRSSEWIRISEFRVSEDDENAVDHSSERIILEVKEPASNHNGGQLLFGDDGYLYIFTGDGGMAGDPFGTFGNAQNKSALLGKVLRIDVDRKERGLPYGIPPDNPFVGDPAAQPEVYALGVRNMWRCSFDRGDPSSGTGRGRLFCGDVGQNKFEEVDVVERGGNYGWRAREGFECYDRSLCANTSLNDLLPIFAYPHTVGKSVTGGYVYRGCEYPNLNGLYIFGDFMSGRLMSLQENPGTGQWQYSEICMGHGQTCEFPGLINNYYPYIISFGEDEAGELYFMSTGEPSATAPRGVVYKIIDASRRAPPGKCQIQPAQVKIRSRLIPFVPKEKFIPKTRSTPRPTARAPTRAPRRGRPTAAPPAPTPRPARPTQQPGSRRGGGRRRGRLNSASRAFRDGEVRLVRPAGLSSGSGRVEVFVGGRWGTVCDDSWNISGAAVVCRQLGFAYAVRAVKRAEFGQGGSLPILLDDVRCAGWERNLLECQHNGVGTHNCEHDEDAGVVCSHQNPDL

SEQ ID NO: 6468 - protein, 608 aa, Homo sapiens
MARARAGALLALWVLGAAAHPQCLDFRPPFRPTQPLRLCAQYSDFGCCDEGRDAELTRRFWALASRVDAAEWAACAGYARDLLCQECSPYAAHLYDAEDPFTPLRTVPGLCQDYCLDMWHKCRGLFRHLSTDQELWALEGNLARFCRYLSLDDTDYCFPYLLVNKNLNSNLGHVVADAKGCLQLCLEEVANGLRNPVAMVHARDGTHRFFVAEQVGLVWAYLPDRSRLGKPFLNISRVVLTSPWEGDERGFLGIAFHPSFQHNRRLYVYYSVGIRSSEWIRISEFRVSEDDENAVDHSSERIILEVKEPASNHNGGQLLFGDDGYLYIFTGDGGMAGDPFGTFGNAQNKSALLGKVLRIDVDRKERGLPYGIPPDNPFVGDPAAQPEVYALGVRNMWRCSFDRGDPSSGTGRGRLFCGDVGQNKFEEVDVVERGGNYGWRAREGFECYDRSLCANTSLNDLLPIFAYPHTVGKSVTGGYVYRGCEYPNLNGLYIFGDFMSGRLMSLQENPGTGQWQYSEICMGHGQTCEFPGLINNYYPYIISFGEDEAGELYFMSTGEPSATAPRGVVYKIIDASSCKARSAMPGYVPAPSVCSSLTSQPFILQWWK

SEQ ID NO: 6469 - protein, 724 aa, Homo sapiens
MLRTSTPNLCGGLHCRAPWLSSGILCLCLIFLLGQVGLLQGHPQCLDYGPPFQPPLHLEFCSDYESFGCCDQHKDRRIAARYWDIMEYFDLKRHELCGDYIKDILCQECSPYAAHLYDAENTQTPLRNLPGLCSDYCSAFHSNCHSAISLLTNDRGLQESHGRDGTRFCHLLDLPDKDYCFPNVLRNDYLNRHLGMVAQDPQGCLQLCLSEVANGLRNPVSMVHAGDGTHRFFVAEQVGVVWVYLPDGSRLEQPFLDLKNIVLTTPWIGDERGFLGLAFHPKFRHNRKFYIYYSCLDKKKVEKIRISEMKVSRADPNKADLKSERVILEIEEPASNHNGGQLLFGLDGYMYIFTGDGGQAGDPFGLFGNAQNKSSLLGKVLRIDVNRAGSHGKRYRVPSDNPFVSEPGAHPAIYAYGIRNMWRCAVDRGDPITRQGRGRIFCGDVGQNRFEEVDLILKGGNYGWRAKEGFACYDKKLCHNASLDDVLPIYAYGHAVGKSVTGGYVYRGCESPNLNGLYIFGDFMSGRLMALQEDRKNKKWKKQDLCLGSTTSCAFPGLISTHSKFIISFAEDEAGELYFLATSYPSAYAPRGSIYKFVDPSRRAPPGKCKYKPVPVRTKSKRIPFRPLAKTVLDLLKEQSEKAARKSSSATLASGPAQGLSEKGSSKKLASPTSSKNTLRGPGTKKKARVGPHVRQGKRRKSLKSHSGRMRPSAEQKRAGRSLP

SEQ ID NO: 6470 - protein, 543 aa, Homo sapiens
MLGFLSRGPSMKLCMGLACVLSLWNTVSGIKGEAKKEKGMTFLPTTGKWVIRAPFQLTCLEIKMLRRKKMGHSRAALNPDLLLSGLREEERKEKGVAFLATTELPARSIDLSALNLTELVNGMLSRALKDSKKFFSLLSVTSYSSFAFHKFSVAVYNISNLKTVDPAKFPTRYCYCLNNRTNDLSDFTALLVDIIGNSTSYLTEIFKSTSILSVNQSNESDCIFICVMTGKSGRNLSDFWEIEEKYPIINYTFTSGLSGVLGAATRGTARTSKPTTKSQKTLPSTSPGHWTQSTPWASALRSSPWTETAAPSETEETLNTGRPPELPARATATWFSASHTLPALATRRVARTQWLTADRQTWASISSVPWAQTISEKKPGGSLWETRSSPPTTAGTEEAMNTTSLLAPAAEIMATPGSPSQASPTLGAFTHGTQTPSPTKATAPRYPQTGDLSAEWPFTAGEEPVLVPRPHQVSRCPQPLFKVGAMAAAPLTLAIQRLNPCLMELCQFFQQCLCMSQRSPRTEDMSSFINPYQSSTSKISWKT

SEQ ID NO: 6471 - protein, 531 aa, Homo sapiens
MLGFLSRGPSMKLCMGLACVLSLWNTVSGIKGEAKKEKGMTFLPTTVSGLREEERKEKGVAFLATTELPARSIDLSALNLTELVNGMLSRALKDSKKFFSLLSVTSYSSFAFHKFSVAVYNISNLKTVDPAKFPTRYCYCLNNRTNDLSDFTALLVDIIGNSTSYLTEIFKSTSILSVNQSNESDCIFICVMTGKSGRNLSDFWEIEEKYPIINYTFTSGLSGVLGAATRGTARTSKPTTKSQKTLPSTSPGHWTQSTPWASALRSSPWTETAAPSETEETLNTGRPPELPARATATWFSASHTLPALATRRVARTQWLTADRQTWASISSVPWAQTISEKKPGGSLWETRSSPPTTAGTEEAMNTTSLLAPAAEIMATPGSPSQASPTLGAFTHGTQTPSPTKATAPRYPQTGDLSAEWPFTAGEEPVLVPRPHQVSRCPQPLFKVGAMAAAPLTLAIQRLNPCLMELCQFFQQCLCMSQRSPRTEDMRYCLEYYSWFLKNATYICQRVKRVSHSHTLKQKCLENICKSV

SEQ ID NO: 6472 - protein, 97 aa, Homo sapiens
MKAQTALSFFLILITSLSGSQGIFPLAFFIYVPMNEQIVIGRLDEDIILPSSFERGSEVVIHWKYQDSYKVHSYYKGSDHLESQDPRYANRTSLFYN

SEQ ID NO: 6473 - protein, 136 aa, Homo sapiens
MKAQTALSFFLILITSLSGSQGIFPLAFFIYVPMNEQIVIGRLDEDIILPSSFERGSEVVIHWKYQDSYKVHSYYKGSDHLESQDPRYANRTSLFYNEIQNGNASLFFRRVSLLDEGIYTCYVGTAIQVITNKVVL

SEQ ID NO: 6474 - protein, 145 aa, Homo sapiens
MKAQTALSFFLILITSLSGSQGIFPLAFFIYVPMNEQIVIGRLDEDIILPSSFERGSEVVIHWKYQDSYKVHSYYKGSDHLESQDPRYANRTSLFYNEIQNGNASLFFRRVSLLDEGIYTCYVGTAIQVITNKVVLKVGVFLTPV

SEQ ID NO: 6475 - protein, 414 aa, Homo sapiens
MKAQTALSFFLILITSLSGSQGIFPLAFFIYVPMNEQIVIGRLDEDIILPSSFERGSEVVIHWKYQDSYKVHSYYKGSDHLESQDPRYANRTSLFYNEIQNGNASLFFRRVSLLDEGIYTCYVGTAIQVITNKVVLKVGVFLTPVMKYEKRNTNSFLICSVLSVYPRPIITWKMDNTPISENNMEETGSLDSFSINSPLNITGSNSSYECTIENSLLKQTWTGRWTMKDGLHKMQSEHVSLSCQPVNDYFSPNQDFKVTWSRMKSGTFSVLAYYLSSSQNTIINESRFSWNKELINQSDFSMNLMDLNLSDSGEYLCNISSDEYTLLTIHTVHVEPSQETASHNKGLWILVPSAILAAFLLIWSVKCCRAQLEARRSRHPADGAQQERCCVPPGERCPSAPDNGEENVPLSGKV

SEQ ID NO: 6476 - protein, 414 aa, Homo sapiens; identical to SEQ ID NO: 6475

SEQ ID NO: 6477 - protein, 397 aa, Homo sapiens
MKAQTALSFFLILITSLSGSQGIFPLAFFIYVPMNEQIVIGRLDEDIILPSSFERGSEVVIHWKYQDSYKVHSYYKGSDHLESQDPRYANRTSLFYNEIQNGNASLFFRRVSLLDEGIYTCYVGTAIQVITNKVVLKVGVFLTPVMKYEKRNTNSFLICSVLSVYPRPIITWKMDNTPISENNMEETGSLDSFSINSPLNITGSNSSYECTIENSLLKQTWTGRWTMKDGLHKMQSEHVSLSCQPVNDYFSPNQDFKVTWSRMKSGTFSVLAYYLSSSQNTIINESRFSWNKELINQSDFSMNLMDLNLSDSGEYLCNISSDEYTLLTIHTVHVEPSQETASHNKGLWILVPSAILAAFLLIWSVKCCRERCCVPPGERCPSAPDNGEENVPLSGKV

SEQ ID NO: 6478 - protein, 414 aa, Homo sapiens; identical to SEQ ID NO: 6475

SEQ ID NO: 6479 - protein, 414 aa, Homo sapiens; identical to SEQ ID NO: 6475

SEQ ID NO: 6480 - protein, 128 aa, Homo sapiens
MNEQIVIGRLDEDIILPSSFERGSEVVIHWKYQDSYKVHSYYKGSDHLESQDPRYANRTSLFYNEIQNGNASLFFRRVSLLDEGIYTCYVGTAIQVITNKVVLKVGVFLTPVMKYEKRNTNSFLICSV

SEQ ID NO: 6481 - protein, 350 aa, Homo sapiens
MVMWNILKPRTHLLCMTNMFCTRHEGTDSTVFLPHSHNISEWISRRVSLLDEGIYTCYVGTAIQVITNKVVLKVGVFLTPVMKYEKRNTNSFLICSVLSVYPRPIITWKMDNTPISENNMEETGSLDSFSINSPLNITGSNSSYECTIENSLLKQTWTGRWTMKDGLHKMQSEHVSLSCQPVNDYFSPNQDFKVTWSRMKSGTFSVLAYYLSSSQNTIINESRFSWNKELINQSDFSMNLMDLNLSDSGEYLCNISSDEYTLLTIHTVHVEPSQETASHNKGLWILVPSAILAAFLLIWSVKCCRAQLEARRSRHPADGAQQERCCVPPGERCPSAPDNGEENVPLSGKV

SEQ ID NO: 6482 - protein, 328 aa, Homo sapiens
  SITE 1: note = misc_feature - Xaa can be any naturally occurring amino acid
XIQNGNASLFFRRVSLLDEGIYTCYVGTAIQVITNKVVLKVGVFLTPVMKYEKRNTNSFLICSVLSVYPRPIITWKMDNTPISENNMEETGSLDSFSINSPLNITGSNSSYECTIENSLLKQTWTGRWTMKDGLHKMQSEHVSLSCQPVNDYFSPNQDFKVTWSRMKSGTFSVLAYYLSSSQNTIINESRFSWNKELINQSDFSMNLMDLNLSDSGEYLCNISSDEYTLLTIHTVHVEPSQETASHNKGLWILVPSAILAAFLLIWSVKCCRAQLEARRSRHPADGAQQERCCVPPGERCPSAPDNGEENVVRHYFLYQTIYSIKMLL

SEQ ID NO: 6483 - protein, 39 aa, Homo sapiens
MAASLRLLGAASGLRYWSRRLRPAAGSFAAGSIFPSRCC

SEQ ID NO: 6484 - protein, 336 aa, Homo sapiens
MAASLRLLGAASGLRYWSRRLRPAAGSFAAVCSRSVASKTPVGFIGLGNMGNPMAKNLMKHGYPLIIYDVFPDACKEFQDAGEQVVSSPADVAEKADRIITMLPTSINAIEAYSGANGILKKVKKGSLLIDSSTIDPAVSKELAKEVEKMGAVFMDAPVSGGVGAARSGNLTFMVGGVEDEFAAAQELLGCMGSNVVYCGAVGTGQAAKICNNMLLAISMIGTAEAMNLGIRLGLDPKLLAKILNMSSGRCWSSDTYNPVPGVMDGVPSANNYQGGFGTTLMAKDLGLAQDSATSTKSPILLGSLAHQIYRMMCAKGYSKKDFSSVFQFLREEETF

SEQ ID NO: 6485 - protein, 206 aa, Homo sapiens
  SITE 1: note = misc_feature - Xaa can be any naturally occurring amino acid
XELPHTLKLPGLPLFPNKFLISLVLLILVSSPADVAEKADRIITMLPTSINAIEAYSGANGILKKVKKGSLLIDSSTIDPAVSKELAKEVEKMGAVFMDAPVSGGVGAARSGNLTFMVGGVEDEFAAAQELLGCMGSNVVYCGAVGTGQAAKICNNMLLAISMIGTAEAMNLGIRLGLDPKLLAKILNMSSGRCWSSDTYNPVPGV

SEQ ID NO: 6486 - protein, 163 aa, Homo sapiens
MAAAVVLAAGLRAARRAVAATGVRGGQVRGAAGVTDGNEVAKAQQATPGGAAPTIFSRILDKSLPADILYEDQQCLVFRDVAPQAPVHFLVIPKKPIPRISQAEEEDQQLLGHLLLVAKQTAKAEGLGDGYRLVINDGKLGAQSVYHLHIHVLGGRQLQWPPG

SEQ ID NO: 6487 - protein, 365 aa, Homo sapiens
MAVMAPRTLLLLLSGALALTQTWAGSHSMRYFFTSVSRPGRGEPRFIAVGYVDDTQFVRFDSDAASQRMEPRAPWIEQEGPEYWDQETRNVKAQSQTDRVDLGTLRGYYNQSEAGSHTIQIMYGCDVGSDGRFLRGYRQDAYDGKDYIALNEDLRSWTAADMAAQITKRKWEAAHEAEQLRAYLDGTCVEWLRRYLENGKETLQRTDPPKTHMTHHPISDHEATLRCWALGFYPAEITLTWQRDGEDQTQDTELVETRPAGDGTFQKWAAVVVPSGEEQRYTCHVQHEGLPKPLTLRWELSSQPTIPIVGIIAGLVLLGAVITGAVVAAVMWRRKSSDRKGGSYTQAASSDSAQGSDVSLTACKV

SEQ ID NO: 6488 - protein, 299 aa, Homo sapiens
MAVMAPRTLLLLLSGALALTQTWAGSHSMRYFFTSVSRPGRGEPRFIAVGYVDDTQFVRFDSDAASQRMEPRAPWIEQEGPEYWDQETRNVKAQSQTDRVDLGTLRGYYNQSEAGSHTIQIMYGCDVGSDGRFLRGYRQDAYDGKDYIALNEDLRSWTAADMAAQITKRKWEAAHEAEQLRAYLDGTCVEWLRRYLENGKETLQRTDPPKTHMTHHPISDHEATLRCWALGFYPAEITLTWQRDGEDQTQDTELVETRPAGDGTFQKWAAVVVPSGEEQRYTCHVQHEGLPKPLTLRWV

SEQ ID NO: 6489 - protein, 365 aa, Homo sapiens; identical to SEQ ID NO: 6487

SEQ ID NO: 6490 - protein, 371 aa, Homo sapiens
MAVMAPRTLLLLLSGALALTQTWAGSHSMRYFFTSVSRPGRGEPRFIAVGYVDDTQFVRFDSDAASQRMEPRAPWIEQEGPEYWDQETRNVKAQSQTDRVDLGTLRGYYNQSEAGSHTIQIMYGCDVGSDGRFLRGYRQDAYDGKDYIALNEDLRSWTAADMAAQITKRKWEAAHEAEQLRAYLDGTCVEWLRRYLENGKETLQRTDPPKTHMTHHPISDHEATLRCWALGFYPAEITLTWQRDGEDQTQDTELVETRPAGDGTFQKWAAVVVPSGEEQRYTCHVQHEGLPKPLTLRWELSSQPTIPIVGIIAGLVLLGAVITGAVVAAVMWRRKSSGGEGVKDRKGGSYTQAASSDSAQGSDVSLTACKV

SEQ ID NO: 6491 - protein, 325 aa, Homo sapiens
MAVMAPRTLLLLLSGALALTQTWAGSHSMRYFFTSVSRPGRGEPRFIAVGYVDDTQFVRFDSDAASQRMEPRAPWIEQEGPEYWDQETRNVKAQSQTDRVDLGTLRGYYNQSEAGSHTIQIMYGCDVGSDGRFLRGYRQDAYDGKDYIALNEDLRSWTAADMAAQITKRKWEAAHEAEQLRAYLDGTCVEWLRRYLENGKETLQRTDPPKTHMTHHPISDHEATLRCWALGFYPAEITLTWQRDGEDQTQDTELVETRPAGDGTFQKWAAVVVPSGEEQRYTCHVQHEGLPKPLTLRWDRKGGSYTQAASSDSAQGSDVSLTACK

SEQ ID NO: 6492 - protein, 131 aa, Homo sapiens
MRVMAPRALLLLLSGGLALTETWACSHSMRYFDTAVSRPGRGEPRFISVGYVDDTQFVRFDSDAASPRGEPRAPWVEQEGPEYWDRETQKYKRQAQADRVSLRNLRGYYNQSEDEDVWLRPGARRAPPPRV

SEQ ID NO: 6493 - protein, 366 aa, Homo sapiens
MRVMAPRALLLLLSGGLALTETWACSHSMRYFDTAVSRPGRGEPRFISVGYVDDTQFVRFDSDAASPRGEPRAPWVEQEGPEYWDRETQKYKRQAQADRVSLRNLRGYYNQSEDGSHTLQRMSGCDLGPDGRLLRGYDQSAYDGKDYIALNEDLRSWTAADTAAQITQRKLEAARAAEQLRAYLEGTCVEWLRRYLENGKETLQRAEPPKTHVTHHPLSDHEATLRCWALGFYPAEITLTWQRDGEDQTQDTELVETRPAGDGTFQKWAAVVVPSGQEQRYTCHMQHEGLQEPLTLSWEPSSQPTIPIMGIVAGLAVLVVLAVLGAVVTAMMCRRKSSGGKGGSCSQAACSNSAQGSDESLITCKA

SEQ ID NO: 6494 - protein, 372 aa, Homo sapiens
MRVMAPRALLLLLSGGLALTETWACSHSMRYFDTAVSRPGRGEPRFISVGYVDDTQFVRFDSDAASPRGEPRAPWVEQEGPEYWDRETQKYKRQAQADRVSLRNLRGYYNQSEDGSHTLQRMSGCDLGPDGRLLRGYDQSAYDGKDYIALNEDLRSWTAADTAAQITQRKLEAARAAEQLRAYLEGTCVEWLRRYLENGKETLQRAEPPKTHVTHHPLSDHEATLRCWALGFYPAEITLTWQRDGEDQTQDTELVETRPAGDGTFQKWAAVVVPSGQEQRYTCHMQHEGLQEPLTLSWEPSSQPTIPIMGIVAGLAVLVVLAVLGAVVTAMMCRRKSSGHFLPTGGKGGSCSQAACSNSAQGSDESLITCKA

SEQ ID NO: 6495 - protein, 244 aa, Homo sapiens
MSGCDLGPDGRLLRGYDQSAYDGKDYIALNEDLRSWTAADTAAQITQRKLEAARAAEQLRAYLEGTCVEWLRRYLENGKETLQRAEPPKTHVTHHPLSDHEATLRCWALGFYPAEITLTWQRDGEDQTQDTELVETRPAGDGTFQKWAAVVVPSGQEQRYTCHMQHEGLQEPLTLSWEPSSQPTIPIMGIVAGLAVLVVLAVLGAVVTAMMCRRKSSGGKGGSCSQAACSNSAQGSDESLITCK

SEQ ID NO: 6496 - protein, 261 aa, Homo sapiens
  SITE 1: note = misc_feature - Xaa can be any naturally occurring amino acid
XRVMAPRALLLLLSGGLALTETWACSHSMRYFDTAVSRPGRGEPRFISVGYVDDTQFVRFDSDAASPRGEPRAPWVEQEGPEYWDRETQKYKRQAQADRVSLRNLRGYYNQSEDGSHTLQRMSGCDLGPDGRLLRGYDQSAYDGKDYIALNEDLRSWTAADTAAQITQRKLEAARAAEQLRAYLEGTCVEWLRRYLENGKETLQRAEPPKTHVTHHPLSDHEASRRWNLPEVGSCGGAFWTRAEIHVPYAARGAARAPHPE

SEQ ID NO: 6497 - protein, 250 aa, Homo sapiens
MALRAGLVLGFHTLMTLLSPQEAGATKADHMGSYGPAFYQSYGASGQFTHEFDEEQLFSVDLKKSEAVWRLPEFGDFARFDPQGGLAGIAAIKAHLDILVERSNRSRAINVPPRVTVLPKSRVELGQPNILICIVDNIFPPVINITWLRNGQTVTEGVAQTSFYSQPDHLFRKFHYLPFVPSAEDVYDCQVEHWGLDAPLLRHWELQVPIPPPDAMETLVCALGLAIGLVGFLVGTVLIIMGTYVSSVPR

SEQ ID NO: 6498 - protein, 86 aa, Homo sapiens
MALRAGLVLGFHTLMTLLSPQEAGATKGRAGRHRRNQSPSGHPGGALQPQQSHQRASTGDRAPQVSGGAGPAQHPHLHRGQHLPPC

SEQ ID NO: 6499 - protein, 23 aa, Homo sapiens
MRPEDRMFHIRAVILRALSLAFL

SEQ ID NO: 6500 - protein, 209 aa, Homo sapiens
MRPEDRMFHIRAVILRALSLAFLLSLRGAGAIKADHVSTYAAFVQTHRPTGEFMFEFDEDEMFYVDLDKKETVWHLEEFGQAFSFEAQGGLANIAILNNNLNTLIQRSNHTQATNDPPEVTVFPKEPVELGQPNTLICHIDKFFPPVLNVTWLCNGELVTEGVAESLFLPRTDYSFHKFHYLTFVPSAEDFYDCRVEHWGLDQPLLKHW

SEQ ID NO: 6501 - protein, 260 aa, Homo sapiens
MRPEDRMFHIRAVILRALSLAFLLSLRGAGAIKADHVSTYAAFVQTHRPTGEFMFEFDEDEMFYVDLDKKETVWHLEEFGQAFSFEAQGGLANIAILNNNLNTLIQRSNHTQATNDPPEVTVFPKEPVELGQPNTLICHIDKFFPPVLNVTWLCNGELVTEGVAESLFLPRTDYSFHKFHYLTFVPSAEDFYDCRVEHWGLDQPLLKHWEAQEPIQMPETTETVLCALGLVLGLVGIIVGTVLIIKSLRSGHDPRAQGTL

SEQ ID NO: 6502 - protein, 128 aa, Homo sapiens
  SITE 1: note = misc_feature - Xaa can be any naturally occurring amino acid
XNTLICHIDKFFPPVLNVTWLCNGELVTEGVAESLFLPRTDYSFHKFHYLTFVPSAEDFYDCRVEHWGLDQPLLKHWEAQEPIQMPETTETVLCALGLVLGLVGIIVGTVLIIKSLRSGHDPRAQGTL

SEQ ID NO: 6503 - protein, 24 aa, Homo sapiens
MILNKALLLGALALTTVMSPCGGE

SEQ ID NO: 6504 - protein, 255 aa, Homo sapiens
MILNKALLLGALALTTVMSPCGGEDIVADHVASCGVNLYQFYGPSGQYTHEFDGDEQFYVDLERKETAWRWPEFSKFGGFDPQGALRNMAVAKHNLNIMIKRYNSTAATNEVPEVTVFSKSPVTLGQPNTLICLVDNIFPPVVNITWLSNGQSVTEGVSETSFLSKSDHSFFKISYLTFLPSADEIYDCKVEHWGLDQPLLKHWEPEIPAPMSELTETVVCALGLSVGLMGIVVGTVFIIQGLRSVGASRHQGPL

SEQ ID NO: 6505 - protein, 255 aa, Homo sapiens; identical to SEQ ID NO: 6504

SEQ ID NO: 6506 - protein, 255 aa, Homo sapiens; identical to SEQ ID NO: 6504

SEQ ID NO: 6507 - protein, 214 aa, Homo sapiens
MILNKALLLGALALTTVMSPCGGEDIVADHVASCGVNLYQFYGPSGQYTHEFDGDEQFYVDLERKETAWRWPEFSKFGGFDPQGALRNMAVAKHNLNIMIKRYNSTAATNEVPEVTVFSKSPVTLGQPNTLICLVDNIFPPVVNITWLSNGQSVTEGVSETSFLSKSDHSFFKISYLTFLPSADEIYDCKVEHWGLDQPLLKHWGASPSTGAEE

SEQ ID NO: 6508 - protein, 53 aa, Homo sapiens
MILNKALLLGALALTTVMSPCGGEDIVGSISDSLLLYRDGQWVCKTKVEKSDS

SEQ ID NO: 6509 - protein, 136 aa, Homo sapiens
MSWKKALRIPGDLRVATVTLMLAMLSSLLAEGRDSPEDFVFQFKGMCYFTNGTERVRLVTRYIYNREEYARFDSDVGVYRAVTPQGRPDAEYWNSQKEVLEGTRAELDTVCRHNYEVAFRGILQRRGMVTGLSRSW

SEQ ID NO: 6510 - protein, 269 aa, Homo sapiens
MSWKKALRIPGDLRVATVTLMLAMLSSLLAEGRDSPEDFVFQFKGMCYFTNGTERVRLVTRYIYNREEYARFDSDVGVYRAVTPQGRPDAEYWNSQKEVLEGTRAELDTVCRHNYEVAFRGILQRRVEPTVTISPSRTEALNHHNLLVCSVTDFYPGQIKVRWFRNDQEETAGVVSTPLIRNGDWTFQILVMLEMTPQRGDVYTCHVEHPSLQSPITVEWRAQSESAQSKMLSGVGGFVLGLIFLGLGLIIRQRSQKGPQGPPPAGLLH

SEQ ID NO: 6511 - protein, 261 aa, Homo sapiens
MSWKKALRIPGDLRVATVTLMLAMLSSLLAEGRDSPEDFVFQFKGMCYFTNGTERVRLVTRYIYNREEYARFDSDVGVYRAVTPQGRPDAEYWNSQKEVLEGTRAELDTVCRHNYEVAFRGILQRRVEPTVTISPSRTEALNHHNLLVCSVTDFYPGQIKVRWFRNDQEETAGVVSTPLIRNGDWTFQILVMLEMTPQRGDVYTCHVEHPSLQSPITVEWRAQSESAQSKMLSGVGGFVLGLIFLGLGLIIRQRSQKGLLH

SEQ ID NO: 6512 - protein, 261 aa, Homo sapiens; identical to SEQ ID NO: 6511

SEQ ID NO: 6513 - protein, 224 aa, Homo sapiens
MSWKKALRIPGDLRVATVTLMLAMLSSLLAEGRDSPEDFVFQFKGMCYFTNGTERVRLVTRYIYNREEYARFDSDVGVYRAVTPQGRPDAEYWNSQKEVLEGTRAELDTVCRHNYEVAFRGILQRRVEPTVTISPSRTEALNHHNLLVCSVTDFYPGQIKVRWFRNDQEETAGVVSTPLIRNGDWTFQILVMLEMTPQRGDVYTCHVEHPSLQSPITVEWRLLH

SEQ ID NO: 6514 - protein, 134 aa, Homo sapiens
MSWKKALRIPGDLRVATVTLMLAMLSSLLAEGRDSPVEPTVTISPSRTEALNHHNLLVCSVTDFYPGQIKVRWFRNDQEETAGVVSTPLIRNGDWTFQILVMLEMTPQRGDVYTCHVEHPSLQSPITVEWRLLH

SEQ ID NO: 6515 - protein, 275 aa, Homo sapiens
MALQIPGGFWAAAVTVMLVMLSTPVAEARDFPKDFLVQFKGMCYFTNGTERVRGVARYIYNREEYGRFDSDVGEFQAVTELGRSIEDWNNYKDFLEQERAAVDKVCRHNYEAELRTTLQRQVEPTVTISPSRTEALNHHNLLVCSVTDFYPAQIKVRWFRNDQEETAGVVSTSLIRNGDWTFQILVMLEITPQRGDIYTCQVEHPSLQSPITVEWRAQSESAQSKMLSGIGGFVLGLIFLGLGLIIRHRGQKGPRGPPPAGNISAMIQSGERAQA

SEQ ID NO: 6516 - protein, 264 aa, Homo sapiens
MALQIPGGFWAAAVTVMLVMLSTPVAEARDFPKDFLVQFKGMCYFTNGTERVRGVARYIYNREEYGRFDSDVGEFQAVTELGRSIEDWNNYKDFLEQERAAVDKVCRHNYEAELRTTLQRQVEPTVTISPSRTEALNHHNLLVCSVTDFYPAQIKVRWFRNDQEETAGVVSTSLIRNGDWTFQILVMLEITPQRGDIYTCQVEHPSLQSPITVEWRAQSESAQSKMLSGIGGFVLGLIFLGLGLIIRHRGQKGPRGPPPAGLLH

SEQ ID NO: 6517 - protein, 227 aa, Homo sapiens
MALQIPGGFWAAAVTVMLVMLSTPVAEARDFPKDFLVQFKGMCYFTNGTERVRGVARYIYNREEYGRFDSDVGEFQAVTELGRSIEDWNNYKDFLEQERAAVDKVCRHNYEAELRTTLQRQVEPTVTISPSRTEALNHHNLLVCSVTDFYPAQIKVRWFRNDQEETAGVVSTSLIRNGDWTFQILVMLEITPQRGDIYTCQVEHPSLQSPITVEWRPRGPPPAGLLH

SEQ ID NO: 6518 - protein, 218 aa, Homo sapiens
  SITE 1: note = misc_feature - Xaa can be any naturally occurring amino acid
XLQIPGGFWAAAVTVMLVMLSTPVAEARDFPKDFLVQFKGMCYFTNGTERVRGVARYIYNREEYGRFDSDVGEFQAVTELGRSIEDWNNYKDFLEQERAAVDKVCRHNYEAELRTTLQRQVEPTVTISPSRTEALNHHNLLVCSVTDFYPAQIKVRWFRNDQEETAGVVSTSLIRNGDWTFQILVMLEITPQRGDIYTCQVEHPSLQSPITVEWRLLH

SEQ ID NO: 6519 - protein, 240 aa, Homo sapiens
AIGSFHCGCEPGYQLKGRKCMDVNECRQNVCRPDQHCKNTRGGYKCIDLCPNGMTKAENGTCIDIDECKDGTHQCRYNQICENTRGSYRCVCPRGYRSQGVGRPCMDIDECENTDACQHECKNTFGSYQCICPPGYQLTHNGKTCQDIDECLEQNVHCGPNRMCFNMRGSYQCIDTPCPPNYQRDPVSGFCLKNCPPNDLECALSPYALEYKLVSLPFGIATNQDLIRLVAYTQDGVMHP

SEQ ID NO: 6520 - protein, 5635 aa, Homo sapiens
MISWEVVHTVFLFALLYSSLAQDASPQSEIRAEEIPEGASTLAFVFDVTGSMYDDLVQVIEGASKILETSLKRPKRPLFNFALVPFHDPEIGPVTITTDPKKFQYELRELYVQGGGDCPEMSIGAIKIALEISLPGSFIYVFTDARSKDYRLTHEVLQLIQQKQSQVVFVLTGDCDDRTHIGYKVYEEIASTSSGQVFHLDKKQVNEVLKWVEEAVQASKVHLLSTDHLEQAVNTWRIPFDPSLKEVTVSLSGPSPMIEIRNPLGKLIKKGFGLHELLNIHNSAKVVNVKEPEAGMWTVKTSSSGRHSVRITGLSTIDFRAGFSRKPTLDFKKTVSRPVQGIPTYVLLNTSGISTPARIDLLELLSISGSSLKTIPVKYYPHRKPYGIWNISDFVPPNEAFFLKVTGYDKDDYLFQRVSSVSFSSIVPDAPKVTMPEKTPGYYLQPGQIPCSVDSLLPFTLSFVRNGVTLGVDQYLKESASVNLDIAKVTLSDEGFYECIAVSSAGTGRAQTFFDVSEPPPVIQVPNNVTVTPGERAVLTCLIISAVDYNLTWQRNDRDVRLAEPARIRTLANLSLELKSVKFNDAGEYHCMVSSEGGSSAASVFLTVQEPPKVTVMPKNQSFTGGSEVSIMCSATGYPKPKIAWTVNDMFIVGSHRYRMTSDGTLFIKNAAPKDAGIYGCLASNSAGTDKQNSTLRYIEAPKLMVVQSELLVALGDITVMECKTSGIPPPQVKWFKGDLELRPSTFLIIDPLLGLLKIQETQDLDAGDYTCVAINEAGRATGKITLDVGSPPVFIQEPADVSMEIGSNVTLPCYVQGYPEPTIKWRRLDNMPIFSRPFSVSSISQLRTGALFILNLWASDKGTYICEAENQFGKIQSETTVTVTGLVAPLIGISPSVANVIEGQQLTLPCTLLAGNPIPERRWIKNSAMLLQNPYITVRSDGSLHIERVQLQDGGEYTCVASNVAGTNNKTTSVVVHVLPTIQHGQQILSTIEGIPVTLPCKASGNPKPSVIWSKKGELISTSSAKFSAGADGSLYVVSPGGEESGEYVCTATNTAGYAKRKVQLTVYVRPRVFGDQRGLSQDKPVEISVLAGEEVTLPCEVKSLPPPIITWAKETQLISPFSPRHTFLPSGSMKITETRTSDSGMYLCVATNIAGNVTQAVKLNVHVPPKIQRGPKHLKVQVGQRVDIPCNAQGTPLPVITWSKGGSTMLVDGEHHVSNPDGTLSIDQATPSDAGIYTCVATNIAGTDETEITLHVQEPPTVEDLEPPYNTTFQERVANQRIEFPCPAKGTPKPTIKWLHNGRELTGREPGISILEDGTLLVIASVTPYDNGEYICVAVNEAGTTERKYNLKVHVPPVIKDKEQVTNVSVLLNQLTNLFCEVEGTPSPIIMWYKDNVQVTESSTIQTVNNGKILKLFRATPEDAGRYSCKAINIAGTSQKYFNIDVLVPPTIIGTNFPNEVSVVLNRDVALECQVKGTPFPDIHWFKDGKPLFLGDPNVELLDRGQVLHLKNARRNDKGRYQCTVSNAAGKQAKDIKLTIYIPPSIKGGNVTTDISVLINSLIKLECETRGLPMPAITWYKDGQPIMSSSQALYIDKGQYLHIPRAQVSDSATYTCHVANVAGTAEKSFHVDVYVPPMIEGNLATPLNKQVVIAHSLTLECKAAGNPSPILTWLKDGVPVKANDNIRIEAGGKKLEIMSAQEIDRGQYICVATSVAGEKEIKYEVDVLVPPAIEGGDETSYFIVMVNNLLELDCHVTGSPPPTIMWLKDGQLIDERDGFKILLNGRKLVIAQAQVSNTGLYRCMAANTAGDHKKEFEVTVHVPPTIKSSGLSERVVVKYKPVALQCIANGIPNPSITWLKDDQPVNTAQGNLKIQSSGRVLQIAKTLLEDAGRYTCVATNAAGETQQHIQLHVHEPPSLEDAGKMLNETVLVSNPVQLECKAAGNPVPVITWYKDNRLLSGSTSMTFLNRGQIIDIESAQISDAGIYKCVAINSAGATELFYSLQVHVAPSISGSNNMVAVVVNNPVRLECEARGIPAPSLTWLKDGSPVSSFSNGLQVLSGGRILALTSAQISDTGRYTCVAVNAAGEKQRDIDLRVYVPPNIMGEEQNVSVLISQAVELLCQSDAIPPPTLTWLKDGHPLLKKPGLSISENRSVLKIEDAQVQDTGRYTCEATNVAGKTEKNYNVNIWVPPNIGGSDELTQLTVIEGNLISLLCESSGIPPPNLIWKKKGSPVLTDSMGRVRILSGGRQLQISIAEKSDAALYSCVASNVAGTAKKEYNLQVYIRPTITNSGSHPTEIIVTRGKSISLECEVQGIPPPTVTWMKDGHPLIKAKGVEILDEGHILQLKNIHVSDTGRYVCVAVNVAGMTDKKYDLSVHAPPSIIGNHRSPENISVVEKNSVSLTCEASGIPLPSITWFKDGWPVSLSNSVRILSGGRMLRLMQTTMEDAGQYTCVVRNAAGEERKIFGLSVLVPPHIVGENTLEDVKVKEKQSVTLTCEVTGNPVPEITWHKDGQPLQEDEAHHIISGGRFLQITNVQVPHTGRYTCLASSPAGHKSRSFSLNVFVSPTIAGVGSDGNPEDVTVILNSPTSLVCEAYSYPPATITWFKDGTPLESNRNIRILPGGRTLQILNAQEDNAGRYSCVATNEAGEMIKHYEVKVYIPPIINKGDLWGPGLSPKEVKIKVNNTLTLECEAYAIPSASLSWYKDGQPLKSDDHVNIAANGHTLQIKEAQISDTGRYTCVASNIAGEDELDFDVNIQVPPSFQKLWEIGNMLDTGRNGEAKDVIINNPISLYCETNAAPPPTLTWYKDGHPLTSSDKVLILPGGRVLQIPRAKVEDAGRYTCVAVNEAGEDSLQYDVRVLVPPIIKGANSDLPEEVTVLVNKSALIECLSSGSPAPRNSWQKDGQPLLEDDHHKFLSNGRILQILNTQITDIGRYVCVAENTAGSAKKYFNLNVHVPPSVIGPKSENLTVVVNNFISLTCEVSGFPPPDLSWLKNEQPIKLNTNTLIVPGGRTLQIIRAKVSDGGEYTCIAINQAGESKKKFSLTVYVPPSIKDHDSESLSVVNVREGTSVSLECESNAVPPPVITWYKNGRMITESTHVEILADGQMLHIKKAEVSDTGQYVCRAINVAGRDDKNFHLNVYVPPSIEGPEREVIVETISNPVTLTCDATGIPPPTIAWLKNHKRIENSDSLEVRILSGGSKLQIARSQHSDSGNYTCIASNMEGKAQKYYFLSIQVPPSVAGAEIPSDVSVLLGENVELVCNANGIPTPLIQWLKDGKPIASGETERIRVSANGSTLNIYGALTSDTGKYTCVATNPAGEEDRIFNLNVYVTPTIRGNKDEAEKLMTLVDTSINIECRATGTPPPQINWLKNGLPLPLSSHIRLLAAGQVIRIVRAQVSDVAVYTCVASNRAGVDNKHYNLQVFAPPNMDNSMGTEEITVLKGSSTSMACITDGTPAPSMAWLRDGQPLGLDAHLTVSTHGMVLQLLKAETEDSGKYTCIASNEAGEVSKHFILKVLEPPHINGSEEHEEISVIVNNPLELTCIASGIPAPKMTWMKDGRPLPQTDQVQTLGGGEVLRISTAQVEDTGRYTCLASSPAGDDDKEYLVRVHVPPNIAGTDEPRDITVLRNRQVTLECKSDAVPPPVITWLRNGERLQATPRVRILSGGRYLQINNADLGDTANYTCVASNIAGKTTREFILTVNVPPNIKGGPQSLVILLNKSTVLECIAEGVPTPRITWRKDGAVLAGNHARYSILENGFLHIQSAHVTDTGRYLCMATNAAGTDRRRIDLQVHVPPSIAPGPTNMTVIVNVQTTLACEATGIPKPSINWRKNGHLLNVDQNQNSYRLLSSGSLVIISPSVDDTATYECTVTNGAGDDKRTVDLTVQVPPSIADEPTDFLVTKHAPAVITCTASGVPFPSIHWTKNGIRLLPRGDGYRILSSGAIEILATQLNHAGRYTCVARNAAGSAHRHVTLHVHEPPVIQPQPSELHVILNNPILLPCEATGTPSPFITWQKEGINVNTSGRNHAVLPSGGLQISRAVREDAGTYMCVAQNPAGTALGKIKLNVQVPPVISPHLKEYVIAVDKPITLSCEADGLPPPDITWHKDGRAIVESIRQRVLSSGSLQIAFVQPGDAGHYTCMAANVAGSSSTSTKLTVHVPPRIRSTEGHYTVNENSQAILPCVADGIPTPAINWKKDNVLLANLLGKYTAEPYGELILENVVLEDSGFYTCVANNAAGEDTHTVSLTVHVLPTFTELPGDVSLNKGEQLRLSCKATGIPLPKLTWTFNNNIIPAHFDSVNGHSELVIERVSKEDSGTYVCTAENSVGFVKAIGFVYVKEPPVFKGDYPSNWIEPLGGNAILNCEVKGDPTPTIQWNRKGVDIEISHRIRQLGNGSLAIYGTVNEDAGDYTCVATNEAGVVERSMSLTLQSPPIITLEPVETVINAGGKIILNCQATGEPQPTITWSRQGHSISWDDRVNVLSNNSLYIADAQKEDTSEFECVARNLMGSVLVRVPVIVQVHGGFSQWSAWRACSVTCGKGIQKRSRLCNQPLPANGGKPCQGSDLEMRNCQNKPCPVDGSWSEWSLWEECTRSCGRGNQTRTRTCNNPSVQHGGRPCEGNAVEIIMCNIRPCPVHGAWSAWQPWGTCSESCGKGTQTRARLCNNPPPAFGGSYCDGAETQMQVCNERNCPIHGKWATWASWSACSVSCGGGARQRTRGCSDPVPQYGGRKCEGSDVQSDFCNSDPCPTHGNWSPWSGWGTCSRTCNGGQMRRYRTCDNPPPSNGGRACGGPDSQIQRCNTDMCPVDGSWGSWHSWSQCSASCGGGEKTRKRLCDHPVPVKGGRPCPGDTTQVTRCNVQACPGGPQRARGSVIGNINDVEFGIAFLNATITDSPNSDTRIIRAKITNVPRSLGSAMRKIVSILNPIYWTTAKEIGEAVNGFTLTNAVFKRETQVEFATGEILQMSHIARGLDSDGSLLLDIVVSGYVLQLQSPAEVTVKDYTEDYIQTGPGQLYAYSTRLFTIDGISIPYTWNHTVFYDQAQGRMPFLVETLHASSVESDYNQIEETLGFKIHASISKGDRSNQCPSGFTLDSVGPFCADEDECAAGNPCSHSCHNAMGTYYCSCPKGLTIAADGRTCQDIDECALGRHTCHAGQDCDNTIGSYRCVVRCGSGFRRTSDGLSCQDINECQESSPCHQRCFNAIGSFHCGCEPGYQLKGRKCMDVNECRQNVCRPDQHCKNTRGGYKCIDLCPNGMTKAENGTCIDIDECKDGTHQCRYNQICENTRGSYRCVCPRGYRSQGVGRPCMDINECEQVPKPCAHQCSNTPGSFKCICPPGQHLLGDGKSCAGLERLPNYGTQYSSYNLARFSPVRNNYQPQQHYRQYSHLYSSYSEYRNSRTSLSRTRRTIRKTCPEGSEASHDTCVDIDECENTDACQHECKNTFGSYQCICPPGYQLTHNGKTCQDIDECLEQNVHCGPNRMCFNMRGSYQCIDTPCPPNYQRDPVSGFCLKNCPPNDLECALSPYALEYKLVSLPFGIATNQDLIRLVAYTQDGVMHPRTTFLMVDEEQTVPFALRDENLKGVVYTTRPLREAETYRMRVRASSYSANGTIEYQTTFIVYIAVSAYPY

SEQ ID NO: 6521 - protein, 595 aa, Homo sapiens
MILAPEGSSSGKLRIPAAQERDAGTYTCRAVNELGDASAEIQLAVGHAPQLTELPRDVTVELGRSALLACRATGRPPPTVTWRRGDGQPLGLRLGAGRGSRSRQPDSGVLFFESVAPEDQAPYVCEARNVFGKVQAEARLIVTGHAPPQIASSAPTVRVLEGQPVSLPCIVLAGRPLPERHWLKDGRPLPPGSRHSIRADGSLHLDRALQEHAGRYSCVATNTAGSQHRDVELVVQVPPRIHPTATHHITNEGVAASLPCVASGVPAPTITWTKETNALTSRGPHYNVSKEGTLLIAQPSAQDAGAYVCTATNTVGFSSQEMRLSVNTKPRIHMNGSRNADVPLQVTAKAGEEVTLDCEAKGSPPPLVTWTKDSRPVPPITNRYGLLPSGSLRLAQVQVGDSGHYECTASNPAGSASHRYVLGVQGRTSWQPQSLPVPHHPACLSGLSVPLLQPTPRSVRLCHLSLRAPLPPPFATPTSCLSQACLSSSTLSLHLSPYPLRGPGDAVQRPPTTQGRAQWGLGFGRTGVRGEPMKVGLRGSLPGTRGPAGSPGCGDGKRPVRCHRAPPAGSILMPPRGPSEPLLPPLPSTRHFVHL

SEQ ID NO: 6522 - protein, 5059 aa, Homo sapiens
MPGAPLLRLLTAVSAAVAVAVAGAPGTVMPPTTGDATLAFVFDVTGSMWDELMQVIDGASRILERSLSRRSQAIANYALVPFHDPDIGPVTLTADPTVFQRELRELYVQGGGDCPEMSVGAIKAAVEVANPGSFIYVFSDARAKDYHKKEELLRLLQLKQSQVVFVLTGDCGDRTHPGYLAYEEIAATSSGQVFHLDKQQVTEVLKWVESAIQASKVHLLSTDHEEEGEHTWRLPFDPSLKEVTISLSGPGPEIEVQDPLGRILQEDEGLNVLLNIPDSAKVVAFKPEHPGLWSIKVYSSGRHSVRITGVSNIDFRAGFSTQPLLDLNHTLEWPLQGVPISLVINSTGLKAPGRLDSVELAQSSGKPLLTLPTKPLSNGSTHQLWGGPPFHTPKERFYLKVKGKDHEGNPLLRVSGVSYSGVAPGAPLVSMAPRIHGYLHQPLLVSCSVHSALPFRLQLRRGEARLGEERHFQESGNSSWEILRASKAEEGTYECTAVSRAGTGRAKAQIVVTDPPPQLVPAPNVTVSPGETAVLSCRVLGEAPYNLTWVRDWRVLPASTGRVAQLADLSLEISGIIPTDGGRYQCVASNANGVTRASVWLLVREAPQVSIHTSSQHFSQGVEVKVSCSASGYPTPHISWSRESQALQEDSRIHVDAQGTLIIQGVAPEDAGNYSCQATNEVGTDQETVTLYYTDPPSVSAVNAVVLVAVGEEAVLVCEASGVPPPRVIWYRGGLEMILAPEGSSSGKLRIPAAQERDAGTYTCRAVNELGDASAEIQLAVGHAPQLTELPRDVTVELGRSALLACRATGRPPPTVTWRRGDGQPLGLRLGAGRGSRSRQPDSGVLFFESVAPEDQAPYVCEARNVFGKVQAEARLIVTGHAPPQIASSAPTVRVLEGQPVSLPCIVLAGRPLPERHWLKDGRPLPPGSRHSIRADGSLHLDRALQEHAGRYSCVATNTAGSQHRDVELVVQVPPRIHPTATHHITNEGVAASLPCVASGVPAPTITWTKETNALTSRGPHYNVSKEGTLLIAQPSAQDAGAYVCTATNTVGFSSQEMRLSVNTKPRIHMNGSRNADVPLQVTAKAGEEVTLDCEAKGSPPPLVTWTKDSRPVPPITNRYGLLPSGSLRLAQVQVGDSGHYECTASNPAGSASHRYVLGVQVPPQVQPGPRVLKVLVGEALDLNCVAEGNPEPQLSWSKDGVVLQGRGPQGSVHFAAIRTSDAGRYRCEASNSAGVDAWEVELRVLEPPHWGADETSGLLERVAGENASLPCPARGTPKPQVTWRKGPSSEPLHGQPGVAVLEEGSLFLASVSPADSGDYECQATNEVGSTSRRAKLVVYVPPSIREDGRKANVSGMAGQSLTLECDANGFPVPEIVWLKDAQLIPKVGGHRLLDEGQSLHFPRIQEGDSGLYSCRAENQAGTAQRDFHLLVLTPPSVLGAGAAQEVLGLAGADVELQCWTSGVPTPQVEWTKDRQPVLPGGPHLQVQEDGQVLRITGSHVGDEGRYQCVAFSPAGQQARDFQLRVHAPPTIWGSNETGEVAVMEDHLVQLLCEARGVPTPNITWFKDGALLPTSTKVVYTRGGRQLQLGRAQSSDAGVYTCKASNAVGAAEKATRLDVYVPPTIEGAGGRPYVVKAVAGRPVALECVARGHPSPTLSWHHEGLPVAESNESRLETDGSVLRLESPGEASSGLYSCVASSPAGEAVLQYSVEVQVPPQLLVAEGLGQVTTIVGQPLELPCQASGSPVPTIQWLQNGRPAEELAGVQVASQGTTLHIDHVELDHSGLFACQATNEAGTAGAEVEVSVHEFPSVSIIGGENITAPFLQPVTLQCIGDGVPTPSLRWWKDGVALAAFGGNLQIEKVDLRDEGIYTCAATNLAGESKREVALKVLVPPNIEPGPVNKAVLENASVTLECLASGVPPPDVSWFKGHQPVSSWMGVTVSVDGRVLRIEQAQLSDAGSYRCVASNVAGSTELRYGLRVNVPPRITLPPSLPGPVLVNTPVRLTCNATGAPSPTLMWLKDGNPVSPAGTPGLQVFPGGRVLTLASARASDSGRYSCVAVSAVGEDRQDVVLQVHMPPSILGEELNVSVVANESVALECQSHAMPPPVLSWWKDGRPLEPRPGVHLSADKALLQVDRADVWDAGHYTCEALNQAGHSEKHYNLNVWVAPVFPLRESHTLTVREGHPTRLSCECRGVPFPKISWRKDGQPLPGEGAGLQHVSAVGRLLYLGQAQLAQEGTYTCECSNVVGNSSQDLQLEVHVPPQIAGPREPPTQVSVVQDGVATLECNATGKPPPTVTWERDGQPVGAELGLQLQNQGQSLHVERAQAAHTGRYSCVAENLAGRAERKFELSVLVPPELIGDLDPLTNITAALHSPLTLLCEAMGIPPPAIRWFRGEEPVSPGEDTYLLAGGWMLKMTQTQEQDSGLYSCLASNEAGEARRNFSVEVLVPPSIENEDLEEVIKVLDGQTAHLMCNVTGHPQPKLTWFKDGRPLARGDAHHISPDGVLLQVLQANLSSAGHYSCIAANAVGEKTKHFQLSVLLAPTILGGAEDSADEEVTVTVNNPISLICEALAFPSPNITWMKDGAPFEASRNIQLLPGTHGLQILNAQKEDAGQYTCVVTNELGEAVKNYHVEVLIPPSISKDDPLAEVGVKEVKTKVNSTLTLECESWAVPPPTIRWYKDGQPVTPSSRLQVLGEGRLLQIQPTQVSDSGRYLCVATNVAGEDDQDFNVLIQVPPMFQKVGDFSAAFEILSREEEARGGVTEYREIVENNPAYLYCDTNAIPPPDLTWYREDQPLSAGDEVSVLQGGRVLQIPLVRAENAGRYSCKASNEVGEDWLHYELLVLTPPVILGDTEELVEEVTVNASSTVSLQCPALGNPVPTISWLQNGLPFSPSPRLQVLEDGQVLQVSTAEVADAASYMCVAENQAGSAEKLFTLRVQVPPRIAGLDLEQVTAILNSSVSLPCDVHAHPNPEVTWYKDSQALSLGEEVFLLPGTHTLQLGRARLSDSGMYTCEALNAAGRDQKLVQLSVLVPPAFRQAPRGPQDAVLVRVGDKAVLSCETDALPEPTVTWYKDGQPLVLAQRTQALRGGQRLEIQEAQVSDKGLYSCKVSNVAGEAVRTFTLTVQVPPTFENPKTETVSQVAGSPLVLTCDVSGVPAPTVTWLKDRMPVESSAVHGVVSRGGRLQLSRLQPAQAGTYTCVAENTQAEARKDFVVAVLVAPRIRSSGVAREHHVLEGQEVRLDCEADGQPPPDVAWLKDGSPLGQDMGPHLRFYLDGGSLVLKGLRASDAGAYTCVAHNPAGEDARLHTVNVLVPPTIKQGADGSGTLVSRPGELVTMVCPVRGSPPIHVSWLKDGLPLPLSQRTLLHGSGHTLRISKVQLADAGIFTCVAASPAGVADRNFTLQVQVPPVLEPVEFQNDVVVVRGSLVELPCEARGVPLPLVSWMKDGEPLLSQSLEQGPSLQLEAVGAGDSGTYSCVAVSEAGEARRHFQLTVMEPPHIEDSGQPTELSLTPGAPMELLCDAQGTPQPNITWHKDGQALTRLENNSRATRVLRVENVQVRDAGLYTCLAESPAGAIEKSFRVRVQAPPNIVGPRGPRFVVGLAPGQLVLECSVEAEPAPKITWHRDGIVLQEDAHTQFPERGRFLQLQALSTADSGDYSCTARNAAGSTSVAFRVEIHTVPTIRSGPPAVNVSVNQTALLPCQADGVPAPLVSWRKDRVPLDPRSPRFEILPEGSLRIQPVLAQDAGHYLCLASNSAGSDRQGRDLRVLALLPCEASGSPKPLVVWWKDGQKLDFRLQQGAYRLLPSNALLLTAPGPQDSAQFECVVSNEVGEAHRLYQVTVHVPPTIADDQTDFTVTMMAPVVLTCHSTGIPAPTVSWSKAGAQLGARGSGYRVSPSGALEIGQALPIHAGRYTCSARNSAGVAHKHVFLTVQASPVVKPLPSVVRAVAEEEVLLPCEASGIPRPTITWQKEGLNVATGVSTQVLPGGQLRIAHASPEDAGNYLCIAKNSAGSAMGKTRLVVQVPPVIENGLPDLSTTEGSHAFLPCKARGSPEPNITWDKDGQPVSGAEGKFTIQPSGELLVKNLEGQDAGTYTCTAENAVGRARRRVHLTILVLPVFTTLPGDRSLRLGDRLWLRCAARGSPTPRIGWTVNDRPVTEGVSEQDGGSTLQRAAVSREDSGTYVCWAENRVGRTQAVSFVHVKEAPVLQGEAFSYLVEPVGGSIQLDCVVRGDPVPDIHWIKDGLPLRGSHLRHQLQNGSLTIRRTERDDAGRYQCLAENEMGVAKKVVILVLQSAPVFQVEPQDMTVRSGDDVALRCQATGEPTPTIEWLQAGQPLRASRRLRTLPDGSLWLENVETGDAGTYDCVAHNLLGSATARAFLVVRGEPQGSWGSMTGVINGRKFGVATLNTSVMQEAHSGVSSIHSSIRHVPANVGPLMRVLVVTIAPIYWALARESGEALNGHSLTGGRFRQESHVEFATGELLTMTQVARGLDPDGLLLLDVVVNGVVPESLADADLQVQDFEEHYVQTGPGQLFVGSTQRFFQGGLPSFLRCNHSIQYNAARGPQPQLVQHLRASAISSAFDPEAEALRFQLATALQAEENEVGCPEGFELDSQGAFCVDRDECSGGPSPCSHACLNAPGRFSCTCPTGFALAWDDRNCRDVDECAWDAHLCREGQRCVNLLGSYRCLPDCGPGFRVADGAGCEDVDECLEGLDDCHYNQLCENTPGGHRCSCPRGYRMQGPSLPCLDVNECLQLPKACAYQCHNLQGSYRCLCPPGQTLLRDGKACTSLERNGQNVTTVSHRGPLLPWLRPWASIPGTSYHAWVSLRPGPMALSSVGRAWCPPGFIRQNGVCTDLDECRVRNLCQHACRNTEGSYQCLCPAGYRLLPSGKNCQDINECEEESIECGPGQMCFNTRGSYQCVDTPCPATYRQGPSPGTCFRRCSQDCGTGGPSTLQYRLLPLPLGVRAHHDVARLTAFSEVGVPANRTELSMLEPDPRSPFALRPLRAGLGAVYTRRALTRAGLYRLTVRAAAPRHQSVFVLLIAVSPYPY

SEQ ID NO: 6523 - protein, 309 aa, Homo sapiens
  SITE 1: note = misc_feature - Xaa can be any naturally occurring amino acid
XPGQLFVGSTQRFFQGGLPSFLRCNHSIQYNAARGPQPQLVQHLRASAISSAFDPEAEALRFQLATALQAEENEVGCPEGFELDSQGAFCVDVDECAWDAHLCREGQRCVNLLGSYRCLPDCGPGFRVADGAGCEDVDECLEGLDDCHYNQLCENTPGGHRCSCPRGYRMQGPSLPCLDVNECLQLPKACAYQCHNLQGSYRCLCPPGQTLLRDGKACTSLERNGQNVTTVSHRGPLLPWLRPWASIPGTSYHAWVSLRPGPMALSSVGRAWCPPGFIRQNGVCTDLDECRVRNLCQHACRNTEGSYQC

SEQ ID NO: 6524 - protein, 479 aa, Homo sapiens
  SITE 1: note = misc_feature - Xaa can be any naturally occurring amino acid
XVHAHPNPEVTWYKDSQALSLGEEVFLLPGTHTLQLGRARLSDSGMYTCEALNAAGRDQKLVQLSVLVPPAFRQAPRGPQDAVLVRVGDKAVLSCETDALPEPTVTWYKDGQPLVLAQRTQALRGGQRLEIQEAQVSDKGLYSCKVSNVAGEAVRTFTLTVQVPPTFENPKTETVSQVAGSPLVLTCDVSGVPAPTVTWLKDRMPVESSAVHGVVSRGGRLQLSRLQPAQAGTYTCVAENTQAEARKDFVVAVLVAPRIRSSGVAREHHVLEGQEVRLDCEADGQPPPDVAWLKDGSPLGQDMGPHLRFYLDGGSLVLKGLRASDAGAYTCVAHNPAGEDARLHTVNVLVPPTIKQGADGSGTLVSRPGELVTMVCPVRGSPPIHVSWLKDGLPLPLSQRTLLHGSGHTLRISKVQLADAGIFTCVAASPAGVADRNFTLQCPLSWSRWSSRMTWWWFVAPWWNSRARPGAFPCLSCRG

SEQ ID NO: 6525 - protein, 325 aa, Homo sapiens
MAAMRKALPRRLVGLASLRAVSTSSMGTLPKRVKIVEVGPRDGLQNEKNIVSTPVKIKLIDMLSEAGLSVIETTSFVSPKWVPQMGDHTEVLKGIQKFPGINYPVLTPNLKGFEAAVAAGAKEVVIFGAASELFTKKNINCSIEESFQRFDAILKAAQSANISVRGYVSCALGCPYEGKISPAKVAEVTKKFYSMGCYEISLGDTIGVGTPGIMKDMLSAVMQEVPLAALAVHCHDTYGQALANTLMALQMGVSVVDSSVAGLGGCPYAQGASGNLATEDLVYMLEGLGIHTGVNLQKLLEAGNFICQALNRKTSSKVAQATCKL

SEQ ID NO: 6526 - protein, 254 aa, Homo sapiens
MAAMRKALPRRLVGLASLRAVSTSSMGTLPKRVKIVEVGPRDGLQNEKNIVSTPVKIKLIDMLSEAGLSVIETTSFVSPKWVPQMGDHTEVLKGIQKFPGINYPVLTPNLKGFEAAVTKKFYSMGCYEISLGDTIGVGTPGIMKDMLSAVMQEVPLAALAVHCHDTYGQALANTLMALQMGVSVVDSSVAGLGGCPYAQGASGNLATEDLVYMLEGLGIHTGVNLQKLLEAGNFICQALNRKTSSKVAQATCKL

SEQ ID NO: 6527 - protein, 77 aa, Homo sapiens
MLEARREWSRKVFPWSGATQQPGTPFHSPSQTLRRSAGQRPAGVPVPADVLLWTSSRLCVPPLMCSSPCPATCVSAC

SEQ ID NO: 6528 - protein, 182 aa, Homo sapiens
  SITE 1: note = misc_feature - Xaa can be any naturally occurring amino acid
XKALPRRLVGLASLRAVSTSSMGTLPKRVKIVEVGPRDGLQNEKVTKKFYSMGCYEISLGDTIGVGTPGIMKDMLSAVMQEVPLAALAVHCHDTYGQALANTLMALQMGVSVVDSSVAGLGGCPYAQGASGNLATEDLVYMLEGLGIHTGVNLQKLLEAGNFICQALNRKTSSKVAQATCKL

SEQ ID NO: 6529 - protein, 53 aa, Homo sapiens
MEIFIEVFSHFLLQLTELTLNMCLELPTGSLEKSLMISSQVLQIPVANSTKQR

SEQ ID NO: 6530 - protein, 139 aa, Homo sapiens
MSISSALAMVFMGAKGNTAAQMSQALCFSKIGGEDGDIHRGFQSLLVAINRTDTEYVLRTANGLFGEKSYDFLTGFTDSCGKFYQATIKQLDFVNDTEKSTTRVNSWVADKTKGENILLFYFDNILNSFIVSSLQNCQI

SEQ ID NO: 6531 - protein, 442 aa, Homo sapiens
MSALGAVIALLLWGQLFAVDSGNDVTDIADDGCPKPPEIAHGYVEHSVRYQCKNYYKLRTEGDGVYTLNDKKQWINKAVGDKLPECEADDGCPKPPEIAHGYVEHSVRYQCKNYYKLRTEGDGEAMPCSLPHVNLRVTFTSPADVGKEGMLMMMSPSPRVYTLNNEKQWINKAVGDKLPECEAVCGKPKNPANPVQRILGGHLDAKGSFPWQAKMVSHHNLTTGATLINEQWLLTTAKNLFLNHSENATAKDIAPTLTLYVGKKQLVEIEKVVLHPNYSQVDIGLIKLKQKVSVNERVMPICLPSKDYAEVGRVGYVSGWGRNANFKFTDHLKYVMLPVADQDQCIRHYEGSTVPEKKTPKSPVGVQPILNEHTFCAGMSKYQEDTCYGDAGSAFAVHDLEEDTWYATGILSFDKSCAVAEYGVYVKVTSIQDWVQKTIAEN

SEQ ID NO: 6532 - protein, 406 aa, Homo sapiens
MSALGAVIALLLWGQLFAVDSGNDVTDIADDGCPKPPEIAHGYVEHSVRYQCKNYYKLRTEGDGVYTLNDKKQWINKAVGDKLPECEADDGCPKPPEIAHGYVEHSVRYQCKNYYKLRTEGDGVYTLNNEKQWINKAVGDKLPECEAVCGKPKNPANPVQRILGGHLDAKGSFPWQAKMVSHHNLTTGATLINEQWLLTTAKNLFLNHSENATAKDIAPTLTLYVGKKQLVEIEKVVLHPNYSQVDIGLIKLKQKVSVNERVMPICLPSKDYAEVGRVGYVSGWGRNANFKFTDHLKYVMLPVADQDQCIRHYEGSTVPEKKTPKSPVGVQPILNEHTFCAGMSKYQEDTCYGDAGSAFAVHDLEEDTWYATGILSFDKSCAVAEYGVYVKVTSIQDWVQKTIAEN

SEQ ID NO: 6533 - protein, 347 aa, Homo sapiens
MSALGAVIALLLWGQLFAVDSGNDVTDIADDGCPKPPEIAHGYVEHSVRYQCKNYYKLRTEGDGVYTLNDKKQWINKAVGDKLPECEAVCGKPKNPANPVQRILGGHLDAKGSFPWQAKMVSHHNLTTGATLINEQWLLTTAKNLFLNHSENATAKDIAPTLTLYVGKKQLVEIEKVVLHPNYSQVDIGLIKLKQKVSVNERVMPICLPSKDYAEVGRVGYVSGWGRNANFKFTDHLKYVMLPVADQDQCIRHYEGSTVPEKKTPKSPVGVQPILNEHTFCAGMSKYQEDTCYGDAGSAFAVHDLEEDTWYATGILSFDKSCAVAEYGVYVKVTSIQDWVQKTIAEN

SEQ ID NO: 6534 - protein, 88 aa, Homo sapiens
MSALGAVIALLLWGQLFAVDSGNDVTDIADDGCPKPPEIAHGYVEHSVRYQCKNYYKLRTEGDGVYTLNNEKQWINKAVGDKLPECEA

SEQ ID NO: 6535 - protein, 92 aa, Homo sapiens
MSALGAVIALLLWGQLFAVDSGNDVTDIADDGCPKPPEIAHGYVEHSVRYQCKNYYKLRTEGDGVYTLNNEKQWINKAVGDKLPECEAAHTE

SEQ ID NO: 6536 - protein, 222 aa, Homo sapiens
MSALGAVIALLLWGQLFAVDSGNDVTDIADDGCPKPPEIAHGYVEHSVRYQCKNYYKLRTEGDGVYTLNNEKQWINKAVGDKLPECEAGATLINEQWLLTTAKNLFLNHSENATAKDIAPTLTLYVGKKQLVEIEKVVLHPNYSQVDIGLIKLKQKVSVNERVMPICLPSKDYAEVGRVGYVSGWGRNANFKFTDHLKYVMLPVADQDQCIRHYEGSTVPEK

SEQ ID NO: 6537 - protein, 91 aa, Homo sapiens
MSALGAVIALLLWGQLFAVDSGNDVTDIADDGCPKPPEIAHGYVEHSVRYQCKNYYKLRTEGDGVYTLNNEKQWINKAVGDKLPECEAGGC

SEQ ID NO: 6538 - protein, 347 aa, Homo sapiens
MSALGAVIALLLWGQLFAVDSGNDVTDIADDGCPKPPEIAHGYVEHSVRYQCKNYYKLRTEGDGVYTLNNEKQWINKAVGDKLPECEAVCGKPKNPANPVQRILGGHLDAKGSFPWQAKMVSHHNLTTGATLINEQWLLTTAKNLFLNHSENATAKDIAPTLTLYVGKKQLVEIEKVVLHPNYSQVDIGLIKLKQKVSVNERVMPICLPSKDYAEVGRVGYVSGWGRNANFKFTDHLKYVMLPVADQDQCIRHYEGSTVPEKKTPKSPVGVQPILNEHTFCAGMSKYQEDTCYGDAGSAFAVHDLEEDTWYATGILSFDKSCAVAEYGVYVKVTSIQDWVQKTIAEN

SEQ ID NO: 6539 - protein, 347 aa, Homo sapiens; identical to SEQ ID NO: 6538

SEQ ID NO: 6540 - protein, 281 aa, Homo sapiens
MSRISQMTAARSPPRLHMAMWSTRFATSVRTNPVQRILGGHLDAKGSFPWQAKMVSHHNLTTGATLINEQWLLTTAKNLFLNHSENATAKDIAPTLTLYVGKKQLVEIEKVVLHPNYSQVDIGLIKLKQKVSVNERVMPICLPSKDYAEVGRVGYVSGWGRNANFKFTDHLKYVMLPVADQDQCIRHYEGSTVPEKKTPKSPVGVQPILNEHTFCAGMSKYQEDTCYGDAGSAFAVHDLEEDTWYATGILSFDKSCAVAEYGVYVKVTSIQDWVQKTIAEN

SEQ ID NO: 6541 - protein, 281 aa, Homo sapiens; identical to SEQ ID NO: 6540

SEQ ID NO: 6542 - protein, 365 aa, Homo sapiens
  SITE 1: note = misc_feature - Xaa can be any naturally occurring amino acid
XALGAVIALLLWGQLFAVDSGNDVTDIADDGCPKPPEIAHGYVEHSVRYQCKNYYKLRTEGDGVYTLNDKKQWINKAVGDKLPECEADDGCPKPPEIAHGYVEHSVRYQCKNYYKLRTEGDGVYTLNNEKQWINKAVGDKLPECEAGATLINEQWLLTTAKNLFLNHSENATAKDIAPTLTLYVGKKQLVEIEKVVLHPNYSQVDIGLIKLKQKVSVNERVMPICLPSKDYAEVGRVGYVSGWGRNANFKFTDHLKYVMLPVADQDQCIRHYEGSTVPEKKTPKSPVGVQPILNEHTFCAGMSKYQEDTCYGDAGSAFAVHDLEEDTWYATGILSFDKSCAVAEYGVYVKVTSIQDWVQKTIAEN

SEQ ID NO: 6543 - protein, 149 aa, Homo sapiens
  SITE 1: note = misc_feature - Xaa can be any naturally occurring amino acid
XALGAVIALLLWGQLFAVDSGNDVTDIADDGCPKPPEIAHGYVEHSVRYQCKNYYKLRTEGDGVYTLNDKKQWINKAVGDKLPECEADDGCPKPPEIAHGYVEHSVRYQCKNYYKLRTEGDGVYTLNNEKQWINKAVGDKLPECEAGGC

SEQ ID NO: 6544 - protein, 404 aa, Homo sapiens
  SITE 1: note = misc_feature - Xaa can be any naturally occurring amino acid
XALGAVIALLLWGQLFAVDSGNDVTDIADDGCPKPPEIAHGYVEHSVRYQCKNYYKLRTEGDGVYTLNDKKQWINKAVGDKLPECEADDGCPKPPEIAHGYVEHSVRYQCKNYYKLRTEGDVYTLNNEKQWINKAVGDKLPECEAVCGKPKNPANPVQRILGGHLDAKGSFPWQAKMVSHHNLTTGATLINEQWLLTTAKNLFLNHSENATAKDIAPTLTLYVGKKQLVEIEKVVLHPNYSQVDIGLIKLKQKVSVNERVMPICLPSKDYAEVGRVGYVSGWGRNANFKFTDHLKYVMLPVADQDQCIRHYEGSTVPEKKTPKSPVGVQPILNEHTFCAGMSKYQEDTCYGDAGSAFAVHDLEEDTWYATGILSFDKSCAVAEYGVYVKVTSIQDWVQKTIAEN

SEQ ID NO: 6545 - protein, 348 aa, Homo sapiens
MSDLGAVISLLLWGRQLFALYSGNDVTDISDDRFPKPPEIANGYVEHLFRYQCKNYYRLRTEGDGVYTLNDKKQWINKAVGDKLPECEAVCGKPKNPANPVQRILGGHLDAKGSFPWQAKMVSHHNLTTGATLINEQWLLTTAKNLFLNHSENATAKDIAPTLTLYVGKKQLVEIEKVVLHPNYHQVDIGLIKLKQKVLVNERVMPICLPSKNYAEVGRVGYVSGWGQSDNFKLTDHLKYVMLPVADQYDCITHYEGSTCPKWKAPKSPVGVQPILNEHTFCVGMSKYQEDTCYGDAGSAFAVHDLEEDTWYAAGILSFDKSCAVAEYGVYVKVTSIQHWVQKTIAEN

SEQ ID NO: 6546 - protein, 117 aa, Homo sapiens
MSDLGAVISLLLWGRQLFALYSGNDVTDISDDRFPKPPEIANGYVEHLFRYQCKNYYRLRTEGDGVYTLNDKKQWINKAVGDKLPECEAVCGKPKNPANPVQRILGGHLVRGWDPKL

SEQ ID NO: 6547 - protein, 281 aa, Homo sapiens
MSRIFQMTASRSPLRLQMAMWSTCFATSVRTNPVQRILGGHLDAKGSFPWQAKMVSHHNLTTGATLINEQWLLTTAKNLFLNHSENATAKDIAPTLTLYVGKKQLVEIEKVVLHPNYHQVDIGLIKLKQKVLVNERVMPICLPSKNYAEVGRVGYVSGWGQSDNFKLTDHLKYVMLPVADQYDCITHYEGSTCPKWKAPKSPVGVQPILNEHTFCVGMSKYQEDTCYGDAGSAFAVHDLEEDTWYAAGILSFDKSCAVAEYGVYVKVTSIQHWVQKTIAEN

SEQ ID NO: 6548 - protein, 485 aa, Homo sapiens
MLLRSKPALPPPLMLLLLGPLGPLSPGALPRPAQAQDVVDLDFFTQEPLHLVSPSFLSVTIDANLATDPRFLILLGSPKLRTLARGLSPAYLRFGGTKTDFLIFDPKKESTFEERSYWQSQVNQDICKYGSIPPDVEEKLRLEWPYQEQLLLREHYQKKFKNSTYSKPNSFLKKADIFINGSQLGEDFIQLHKLLRKSTFKNAKLYGPDVGQPRRKTAKMLKSFLKAGGEVIDSVTWHHYYLNGRTATKEDFLNPDVLDIFISSVQKVFQVVESTRPGKKVWLGETSSAYGGGAPLLSDTFAAGFMWLDKLGLSARMGIEVVMRQVFFGAGNYHLVDENFDPLPDYWLSLLFKKLVGTKVLMASVQGSKRRKLRVYLHCTNTDNPRYKEGDLTLYAINLHNVTKYLRLPYPFSNKQVDKYLLRPLGPHGLLSKSVQLNGLTLKMVDDQTLPPLMEKPLRPGSSLGLPAFSYSFFVIRNAKVAACI

SEQ ID NO: 6549 - protein, 226 aa, Homo sapiens
MLLRSKPALPPPLMLLLLGPLGPLSPGALPRPAQAQDVVDLDFFTQEPLHLVSPSFLSVTIDANLATDPRFLILLGSPKLRTLARGLSPAYLRFGGTKTDFLIFDPKKESTFEERSYWQSQVNQDICKYGSIPPDVEEKLRLEWPYQEQLLLREHYQKKFKNSTYSRSSVDVLYTFANCSGLDLIFGLNALLRTADLQWNSSNAQLLLDYCSSKGYNISWELGNAS

SEQ ID NO: 6550 - protein, 543 aa, Homo sapiens
MLLRSKPALPPPLMLLLLGPLGPLSPGALPRPAQAQDVVDLDFFTQEPLHLVSPSFLSVTIDANLATDPRFLILLGSPKLRTLARGLSPAYLRFGGTKTDFLIFDPKKESTFEERSYWQSQVNQDICKYGSIPPDVEEKLRLEWPYQEQLLLREHYQKKFKNSTYSRSSVDVLYTFANCSGLDLIFGLNALLRTADLQWNSSNAQLLLDYCSSKGYNISWELGNEPNSFLKKADIFINGSQLGEDFIQLHKLLRKSTFKNAKLYGPDVGQPRRKTAKMLKSFLKAGGEVIDSVTWHHYYLNGRTATKEDFLNPDVLDIFISSVQKVFQVVESTRPGKKVWLGETSSAYGGGAPLLSDTFAAGFMWLDKLGLSARMGIEVVMRQVFFGAGNYHLVDENFDPLPDYWLSLLFKKLVGTKVLMASVQGSKRRKLRVYLHCTNTDNPRYKEGDLTLYAINLHNVTKYLRLPYPFSNKQVDKYLLRPLGPHGLLSKSVQLNGLTLKMVDDQTLPPLMEKPLRPGSSLGLPAFSYSFFVIRNAKVAACI

SEQ ID NO: 6551 - protein, 543 aa, Homo sapiens; identical to SEQ ID NO: 6550

SEQ ID NO: 6552 - protein, 380 aa, Homo sapiens
MLLRSKPALPPPLMLLLLGPLGPLSPGALPRPAQAQDVVDLDFFTQEPLHLVSPSFLSVTIDANLATDPRFLILLGSPKLRTLARGLSPAYLRFGGTKTDFLIFDPKKESTFEERSYWQSQVNQDICKYGSIPPDVEEKLRLEWPYQEQLLLREHYQKKFKNSTYSRSSVDVLYTFANCSGLDLIFGLNALLRTADLQWNSSNAQLLLDYCSSKGYNISWELGNEPNSFLKKADIFINGSQLGEDFIQLHKLLRKSTFKNAKLYGPDVGQPRRKTAKMLKSFLKAGGEVIDSVTWHHYYLNGRTATKEDFLNPDVLDIFISSVQKVFQVVESTRPGKKVWLGETSSAYGGGAPLLSDTFAAGFMIIGYLFCSRNWWAPRC

SEQ ID NO: 6553 - protein, 469 aa, Homo sapiens
MLLRSKPALPPPLMLLLLGPLGPLSPGALPRPAQAQDVVDLDFFTQEPLHLVSPSFLSVTIDANLATDPRFLILLGSPKLRTLARGLSPAYLRFGGTKTDFLIFDPKKESTFEERSYWQSQVNQDICKYGSIPPDVEEKLRLEWPYQEQLLLREHYQKKFKNSTYSRSSVDVLYTFANCSGLDLIFGLNALLRTADLQWNSSNAQLLLDYCSSKGYNISWELGNEPNSFLKKADIFINGSQLGEDFIQLHKLLRKSTFKNAKLYGPDVGQPRRKTAKMLKSFLKAGGEVIDSVTWHHYYLNGRTATKEDFLNPDVLDIFISSVQKVFQDYWLSLLFKKLVGTKVLMASVQGSKRRKLRVYLHCTNTDNPRYKEGDLTLYAINLHNVTKYLRLPYPFSNKQVDKYLLRPLGPHGLLSKSVQLNGLTLKMVDDQTLPPLMEKPLRPGSSLGLPAFSYSFFVIRNAKVAACI

SEQ ID NO: 6554 - protein, 168 aa, Homo sapiens
MLLRSKPALPPPLMLLLLGPLGPLSPGALPRPAQAQDVVDLDFFTQEPLHLVSPSFLSVTIDANLATDPRFLILLGSPKLRTLARGLSPAYLRFGGTKTDFLIFDPKKESTFEERSYWQSQVNQDICKYGSIPPDVEEKLRLEWPYQEQLLLREHYQKKFKNSTYSTS

SEQ ID NO: 6555 - protein, 389 aa, Homo sapiens
ARSLDKLYNFADCSGLHLIFALNALRRNPNNSWNSSSALSLLKYSASKKYNISWELGNEPNNYRTMHGRAVNGSQLGKDYIQLKSLLQPIRIYSRASLYGPNIGRPRKNVIALLDGFMKVAGSTVDAVTWQHCYIDGRVVKVMDFLKTRLLDTLSDQIRKIQKVVNTYTPGKKIWLEGVVTTSAGGTNNLSDSYAAGFLWLNTLGMLANQGIDVVIRHSFFDHGYNHLVDQNFNPLPDYWLSLLYKRLIGPKVLAVHVAGLQRKPRPGRVIRDKLRIYAHCTNHHNHNYVRGSITLFIINLHRSRKKIKLAGTLRDKLVHQYLLQPYGQEGLKSKSVQLNGQPLVMVDDGTLPELKPRPLRAGRTLVIPPVTMGFYVVKNVNALACRYR

SEQ ID NO: 6556 - protein, 149 aa, Homo sapiens
MRVLCAFPEAMPSSNSRPPACLAPGALYLALLLHLSLSSQAGDRRPLPVDRAAGLKEKTLILLDVSTKNPVRTVNENFLSLQLDPSIIHDGWLDFLSSKRLVTLARGLSPAFLRFGGKRTDFLQFQNLRNPAKSRGGPGPDYYLKNYED

SEQ ID NO: 6557 - protein, 592 aa, Homo sapiens
MRVLCAFPEAMPSSNSRPPACLAPGALYLALLLHLSLSSQAGDRRPLPVDRAAGLKEKTLILLDVSTKNPVRTVNENFLSLQLDPSIIHDGWLDFLSSKRLVTLARGLSPAFLRFGGKRTDFLQFQNLRNPAKSRGGPGPDYYLKNYEDDIVRSDVALDKQKGCKIAQHPDVMLELQREKAAQMHLVLLKEQFSNTYSNLILTARSLDKLYNFADCSGLHLIFALNALRRNPNNSWNSSSALSLLKYSASKKYNISWELGNEPNNYRTMHGRAVNGSQLGKDYIQLKSLLQPIRIYSRASLYGPNIGRPRKNVIALLDGFMKVAGSTVDAVTWQHCYIDGRVVKVMDFLKTRLLDTLSDQIRKIQKVVNTYTPGKKIWLEGVVTTSAGGTNNLSDSYAAGFLWLNTLGMLANQGIDVVIRHSFFDHGYNHLVDQNFNPLPDYWLSLLYKRLIGPKVLAVHVAGLQRKPRPGRVIRDKLRIYAHCTNHHNHNYVRGSITLFIINLHRSRKKIKLAGTLRDKLVHQYLLQPYGQEGLKSKSVQLNGQPLVMVDDGTLPELKPRPLRAGRTLVIPPVTMGFYVVKNVNALACRYR

SEQ ID NO: 6558 - protein, 548 aa, Homo sapiens
MRVLCAFPEAMPSSNSRPPACLAPGALYLALLLHLSLSSQAGDRRPLPVDRAAGLKEKTLILLDVSTKNPVRTVNENFLSLQLDPSIIHDGWLDFLSSKRLVTLARGLSPAFLRFGGKRTDFLQFQNLRNPAKSRGGPGPDYYLKNYEDDIVRSDVALDKQKGCKIAQHPDVMLELQREKAAQMHLVLLKEQFSNTYSNLILTARSLDKLYNFADCSGLHLIFALNALRRNPNNSWNSSSALSLLKYSASKKYNISWELGNEPNNYRTMHGRAVNGSQLGKDYIQLKSLLQPIRIYSRASLYGPNIGRPRKNVIALLDGFMKVAGSTVDAVTWQHCYIDGRVVKVMDFLKTRLLDTLSDQIRKIQKVVNTYTPGKKIWLEGVVTTSAGGTNNLSDSYAAGFLWLNTLGMLANQGIDVVIRHSFFDHGYNHLVDQNFNPLPDYWLSLLYKRLIGPKVLAVHVAGLQRKPRPGRVIRDKLRIYAHCTNHHNHNYVRGSITLFIINLHRSRKKIKLAGTLRDKLVHQYLLQPYGQEGLKSKTQRCQYCGII

SEQ ID NO: 6559 - protein, 534 aa, Homo sapiens
MRVLCAFPEAMPSSNSRPPACLAPGALYLALLLHLSLSSQAGDRRPLPVDRAAGLKEKTLILLDVSTKNPVRTVNENFLSLQLDPSIIHDGWLDFLSSKRLVTLARGLSPAFLRFGGKRTDFLQFQNLRNPAKSRGGPGPDYYLKNYEDDIVRSDVALDKQKGCKIAQHPDVMLELQREKAAQMHLVLLKEQFSNTYSNLILTEPNNYRTMHGRAVNGSQLGKDYIQLKSLLQPIRIYSRASLYGPNIGRPRKNVIALLDGFMKVAGSTVDAVTWQHCYIDGRVVKVMDFLKTRLLDTLSDQIRKIQKVVNTYTPGKKIWLEGVVTTSAGGTNNLSDSYAAGFLWLNTLGMLANQGIDVVIRHSFFDHGYNHLVDQNFNPLPDYWLSLLYKRLIGPKVLAVHVAGLQRKPRPGRVIRDKLRIYAHCTNHHNHNYVRGSITLFIINLHRSRKKIKLAGTLRDKLVHQYLLQPYGQEGLKSKSVQLNGQPLVMVDDGTLPELKPRPLRAGRTLVIPPVTMGFYVVKNVNALACRYR

SEQ ID NO: 6560 - protein, 480 aa, Homo sapiens
MRVLCAFPEAMPSSNSRPPACLAPGALYLALLLHLSLSSQAGDRRPLPVDRAAGLKEKTLILLDVSTKNPVRTVNENFLSLQLDPSIIHDGWLDFLSSKRLVTLARGLSPAFLRFGGKRTDFLQFQNLRNPAKSRGGPGPDYYLKNYEDEPNNYRTMHGRAVNGSQLGKDYIQLKSLLQPIRIYSRASLYGPNIGRPRKNVIALLDGFMKVAGSTVDAVTWQHCYIDGRVVKVMDFLKTRLLDTLSDQIRKIQKVVNTYTPGKKIWLEGVVTTSAGGTNNLSDSYAAGFLWLNTLGMLANQGIDVVIRHSFFDHGYNHLVDQNFNPLPDYWLSLLYKRLIGPKVLAVHVAGLQRKPRPGRVIRDKLRIYAHCTNHHNHNYVRGSITLFIINLHRSRKKIKLAGTLRDKLVHQYLLQPYGQEGLKSKSVQLNGQPLVMVDDGTLPELKPRPLRAGRTLVIPPVTMGFYVVKNVNALACRYR

SEQ ID NO: 6561 - protein, 254 aa, Homo sapiens [sequence omitted]

SEQ ID NO: 6562 - protein, 462 aa, Homo sapiens
MARVLGAPVALGLWSLCWSLAIATPLPPTSAHGNVAEGETKPDPDVTERCSDGWSFDATTLDDNGTMLFFKGEFVWKSHKWDRELISERWKNFPSPVDAAFRQGHNSVFLIKGDKVWVYPPEKKEKGYPKLLQDEFPGIPSPLDAAVECHRGECQAEGVLFFQGDREWFWDLATGTMKERSWPAVGNCSSALRWLGRYYCFQGNQFLRFDPVRGEVPPRYPRDVRDYFMPCPGRGHGHRNGTGHGNSTHHGPEYMRCSPHLVLSALTSDNHGATYAFSGTHYWRLDTSRDGWHSWPIAHQWPQGPSAVDAAFSWEEKLYLVQGTQVYVFLTKGGYTLVSGYPKRLEKEVGTPHGIILDSVDAAFICPGSSRLHIMAGRRLWWLDLKSGAQATWTELPWPHEKVDGALCMEKSLGPNSCSANGPGLYLIHGPNLYCYSDVEKLNAAKALPQPQNVTSLLGCTH

SEQ ID NO: 6563 - protein, 699 aa, Homo sapiens
MGHHRPWLHASVLWAGVASLLLPPAMTQQLRGDGLGFRNRNNSTGVAGLSEEASAELRHHLHSPRDHPDENKDVSTENGHHFWSHPDREKEDEDVSKEYGHLLPGHRSQDHKVGDEGVSGEEVFAEHGGQARGHRGHGSEDTEDSAEHRHHLPSHRSHSHQDEDEDEVVSSEHHHHILRHGHRGHDGEDDEGEEEEEEEEEEEEASTEYGHQAHRHRGHGSEEDEDVSDGHHHHGPSHRHQGHEEDDDDDDDDDDDDDDDDVSIEYRHQAHRHQGHGIEEDEDVSDGHHHRDPSHRHRSHEEDDNDDDDVSTEYGHQAHRHQDHRKEEVEAVSGEHHHHVPDHRHQGHRDEEEDEDVSTERWHQGPQHVHHGLVDEEEEEEEITVQFGHYVASHQPRGHKSDEEDFQDEYKTEVPHHHHHRVPREEDEEVSAELGHQAPSHRQSHQDEETGHGQRGSIKEMSHHPPGHTVVKDRSHLRKDDSEEEKEKEEDPGSHEEDDESSEQGEKGTHHGSRDQEDEEDEEEGHGLSLNQEEEEEEDKEEEEEEEDEERREERAEVGAPLSPDHSEEEEEEEEGLEEDEPRFTIIPNPLDRREEAGGASSEEESGEDTGPQDAQEYGNYQPGSLCGYCSFCNRCTECESCHCDEENMGEHCDQCQHCQFCYLCPLVCETVCAPGSYVDYFSSSLYQALADMLETPEP

SEQ ID NO: 6564 - protein, 676 aa, Homo sapiens
MGHHRPWLHASVLWAGVASLLLPPAMTQQLRGDGLGFRNRNNSTGVAGLSEEASAELRHHLHSPRDHPDENKDVSTENGHHFWSHPDREKEDEDVSKEYGHLLPGHRSQDHKVGDEGVSGEEVFAEHGGQARGHRGHGSEDTEDSAEHRHHLPSHRSHSHQDEDEDEVVSSEHHHHILRHGHRGHDGEDDEGEEEEEEEEEEEEASTEYGHQAHRHRGHGSEEDEDVSDGHHHHGPSHRHQGHEEDDDDDDDDDDDDDDDDVSIEYRHQAHRHQGHGIEEDEDVSDGHHHRDPSHRHRSHEEDDNDDDDVSTEYGHQAHRHQDHRKEEVEAVSGEHHHHVPDHRHQGHRDEEEDEDVSTERWHQGPQHVHHGLVDEEEEEEEITVQFGHYVASHQPRGHKSDEEDFQDEYKTEVPHHHHHRVPREEDEEVSAELGHQAPSHRQSHQDEETGHGQRGSIKEMSHHPPGHTVVKDRSHLRKDDSEEEKEKEEDPGSHEEDDESSEQGEKGTHHGSRDQEDEEDEEEGHGLSLNQEEEEEEDKEEEEEEEDEERREERAEVGAPLSPDHSEEEEEEEEGLEEDEPRFTIIPNPLDRREEAGGASSEEESGEDTGPQDAQEYGNYQPGSLCGYCSFCNHCQFCYLCPLVCETVCAPGSYVDYFSSSLYQALADMLETPEP

SEQ ID NO: 6565 - protein, 96 aa, Homo sapiens
  SITE 1: note = misc_feature - Xaa can be any naturally occurring amino acid
XSEEESGEDTGPQDAQEYGNYQPGSLCGYCSFCNRCTECESCHCDEENMGEHCDQCQGPGRHAGNAGTLTQSLDCDAGVPPPAFQPLSTSYIYFSE

SEQ ID NO: 6566 - protein, 525 aa, Homo sapiens
MKALIAALLLITLQYSCAVSPTDCSAVEPEAEKALDLINKRRRDGYLFQLLRIADAHLDRVENTTVYYLVLDVQESDCSVLSRKYWNDCEPPDSRRPSEIVIGQCKVIATRHSHESQDLRVIDFNCTTSSVSSALANTKDSPVLIDFFEDTERYRKQANKALEKYKEENDDFASFRVDRIERVARVRGGEGTGYFVDFSVRNCPRHHFPRHPNVFGFCRADLFYDVEALDLESPKNLVINCEVFDPQEHENINGVPPHLGHPFHWGGHERSSTTKPPFKPHGSRDHHHPHKPHEHGPPPPPDERDHSHGPPLPQGPPPLLPMSCSSCQHATFGTNGAQRHSHNNNSSDLHPHKHHSHEQHPHGHHPHAHHPHEHDTHRQHPHGHHPHGHHPHGHHPHGHHPHGHHPHCHDFQDYGPCDPPPHNQGHCCHGHGPPPGHLRRRGPGKGPRPFHCRQIGSVYRLPPLRKGEVLPLPEANFPSFPLPHHKHPLKPDNQPFPQSVSESCPGKFKSGFPQVSMFFTHTFPK

SEQ ID NO: 6567 - protein, 111 aa, Homo sapiens
MDGPRQDATLDEEEDMVIIYNRVPKTASTSFTNIAYDLCAKNKYHVLHINTTKNNPVMSLQDQVRFVKNITSWKEMKPGFYHGHVSYLDFAKFGVKKKPIYINVIRDPIER

SEQ ID NO: 6568 - protein, 229 aa, Homo sapiens
MGLLRIMMPPKLQLLAVVAFAVAMLFLENQIQKLEESRSKLERAIARHEVREIEQRHTMDGPRQDATLDEEEDMVIIYNRVPKTASTSFTNIAYDLCAKNKYHVLHINTTKNNPVMSLQDQVRFVKNITSWKEMKPGFYHGHVSYLDFAKFGVKKKPIYINVIRDPIERLVSYYYFLRFGDDYRPGLRRRKQGDKKTFDECVAEGGSDCAPEKLWLQIPFFCGHSSECW

SEQ ID NO: 6569 - protein, 356 aa, Homo sapiens
MGLLRIMMPPKLQLLAVVAFAVAMLFLENQIQKLEESRSKLERAIARHEVREIEQRHTMDGPRQDATLDEEEDMVIIYNRVPKTASTSFTNIAYDLCAKNKYHVLHINTTKNNPVMSLQDQVRFVKNITSWKEMKPGFYHGHVSYLDFAKFGVKKKPIYINVIRDPIERLVSYYYFLRFGDDYRPGLRRRKQGDKKTFDECVAEGGSDCAPEKLWLQIPFFCGHSSECWNVGSRWAMDQAKYNLINEYFLVGVTEELEDFIMLLEAALPRFFRGATELYRTGKKSHLRKTTEKKLPTKQTIAKLQQSDIWKMENEFYEFALEQFQFIRAHAVREKDGDLYILAQNFFYEKIYPKSN

SEQ ID NO: 6570 - protein, 83 aa, Homo sapiens
MAALLLGAVLLVAQPQLVPSRPAELGQQELLRKAGTLQDDVRDGVAPNGSAQQLPQTIIIGVRKGGTRALLEMLSLHPDVAAA

SEQ ID NO: 6571 - protein, 83 aa, Homo sapiens; identical to SEQ ID NO: 6570

SEQ ID NO: 6572 - protein, 307 aa, Homo sapiens
MAALLLGAVLLVAQPQLVPSRPAELGQQELLRKAGTLQDDVRDGVAPNGSAQQLPQTIIIGVRKGGTRALLEMLSLHPDVAAAENEVHFFDWEEHYSHGLGWYLSQMPFSWPHQLTVEKTPAYFTSPKVPERVYSMNPSIRLLLILRDPSERVLSDYTQVFYNHMQKHKPYPSIEEFLVRDGRLNVDYKALNRSLYHVHMQNWLRFFPLRHIHIVDGDRLIRDPFPEIQKVERFLKLSPQINASNFYFNKTKGFYCLRDSGRDRCLHESKGRAHPQVDPKLLNKLHEYFHEPNKKFFELVGRTFDWH

SEQ ID NO: 6573 - protein, 411 aa, Homo sapiens
MRRRRAGGRTMVERASKFVLVVAGSVCFMLILYQYAGPGLSLGAPGGRAPPDDLDLFPTPDPHYEKKYYFPVRELERSLRFDMKGDDVIVFLHIQKTGGTTFGRHLVQNVRLEVPCDCRPGQKKCTCYRPNRRETWLFSRFSTGWSCGLHADWTELTNCVPGVLDRRDSAALRTPRKFYYITLLRDPVSRYLSEWRHVQRGATWKTSLHMCDGRTPTPEELPPCYEGTDWSGCTLQEFMDCPYNLANNRQVRMLADLSLVGCYNLSFIPEGKRAQLLLESAKKNLRGMAFFGLTEFQRKTQYLFERTFNLKFIRPFMQYNSTRAGGVEVDEDTIRRIEELNDLDMQLYDYAKDLFQQRYQYKRQLERREQRLRSREERLLHRAKEALPREDADEPGRVPTEDYMSHIIEKW

SEQ ID NO: 6574 - protein, 471 aa, Homo sapiens
MDERFNKWLLTPVLTLLFVVIMYQYVSPSCTSSCTNFGEQPRAGEAGPPAVPGPARRAQAPPEEWERRPQLPPPPRGPPEGPRGAAAPEEEDEEPGDPREGEEEEEEDEPDPEAPENGSLPRFVPRFNFSLKDLTRFVDFNIKGRDVIVFLHIQKTGGTTFGRHLVKNIRLEQPCSCKAGQKKCTCHRPGKKETWLFSRFSTGWSCGLHADWTELTNCVPAIMEKKDCPRNHSHTRNFYYITMLRDPVSRYLSEWKHVQRGATWKTSLHMCDGRSPTPDELPTCYPGDDWSGVSLREFMDCTYNLANNRQVRMLADLSLVGCYNLTFMNESERNTILLQSAKNNLKNMAFFGLTEFQRKTQFLFERTFNLKFISPFTQFNITRASNVEINEGARQRIEDLNFLDMQLYEYAKDLFQQRYHHTKQLEHQRDRQKRREERRLQREHRDHQWPKEDGAAEGTVTEDYNSQVVRW

SEQ ID NO: 6575 - protein, 236 aa, Homo sapiens
RNFYYITMLRDPVSRYLSEWKHVQRGATWKTSLHMCDGRSPTPDELPTCYPGDDWSGVSLREFMDCTYNLANNRQVRMLADLSLVGCYNLTFMNESERNTILLQSAKNNLKNMAFFGLTEFQRKTQFLFERTFNLKFISPFTQFNITRASNVEINEGARQRIEDLNFLDMQLYEYAKDLFQQRYHHTKQLEHQRDRQKRREERRLQREHRDHQWPKEDGAAEGTVTEDYNSQVVRW

SEQ ID NO: 6576 - protein, 333 aa, Homo sapiens
MANLGTLQLLPPRFKRFSCLSLPNIWITGMPVPATSVPCPSAGPHRTMKVLLLTGLGALFFAYYWDDNFDPASLQGARVLLTGANAGVGEELAYHYARLGSHLVLTAHTEALLQKVVGNCRKLGAPKVFYIAADMASPEAPESVVQFALDKLGGLDYLVLNHIGGAPAGTRARSPQATRWLMQVNFVSYVQLTSRALPSLTDSKGSLVVVSSLLGRVPTSFSTPYSAAKFALDGFFGSLRRELDVQDVNVAITMCVLGLRDRASAAEAVRGVTRVKAAPGPKAALAVIRGGATRAAGVFYPWRFRLLCLLRRWLPRPRAWFIRQELNVTAAAA

SEQ ID NO: 6577 - protein, 199 aa, Homo sapiens
MASPEAPESVVQFALDKLGGLDYLVLNHIGGAPAGTRARSPQATRWLMQVNFVSYVQLTSRALPSLTDSKGSLVVVSSLLGRVPTSFSTPYSAAKFALDGFFGSLRRELDVQDVNVAITMCVLGLRDRASAAEAVRGVTRVKAAPGPKAALAVIRGGATRAAGVFYPWRFRLLCLLRRWLPRPRAWFIRQELNVTAAAA

SEQ ID NO: 6578 - protein, 75 aa, Homo sapiens
MKVLLLTGLGALFFAYYWDDNFDPASLQGARVLLTGANAGVGEELAYHYARLGSHLVLTAHTEALLQKAGWTTSC

SEQ ID NO: 6579 - protein, 75 aa, Homo sapiens; identical to SEQ ID NO: 6578

SEQ ID NO: 6580 - protein, 87 aa, Homo sapiens
MKVLLLTGLGALFFAYYWDDNFDPASLQGARVLLTGANAGVGEELAYHYARLGSHLVLTAHTEALLQKARWLTLVVSTLGGRGKWIT

SEQ ID NO: 6581 - protein, 143 aa, Homo sapiens
MKVLLLTGLGALFFAYYWDDNFDPASLQGARVLLTGANAGVGEELAYHYARLGSHLVLTAHTEALLQKVVGNCRKLGAPKVFYIAADMASPEAPESVVQFALDKLGGLDYLVLNHIGGAPAGTRARSPQATRWLMQVNFVSYV

SEQ ID NO: 6582 - protein, 286 aa, Homo sapiens
MKVLLLTGLGALFFAYYWDDNFDPASLQGARVLLTGANAGVGEELAYHYARLGSHLVLTAHTEALLQKVVGNCRKLGAPKVFYIAADMASPEAPESVVQFALDKLGGLDYLVLNHIGGAPAGTRARSPQATRWLMQVNFVSYVQLTSRALPSLTDSKGSLVVVSSLLGRVPTSFSTPYSAAKFALDGFFGSLRRELDVQDVNVAITMCVLGLRDRASAAEAVRGVTRVKAAPGPKAALAVIRGGATRAAGVFYPWRFRLLCLLRRWLPRPRAWFIRQELNVTAAAA

SEQ ID NO: 6583 - protein, 286 aa, Homo sapiens; identical to SEQ ID NO: 6582

SEQ ID NO: 6584 - protein, 286 aa, Homo sapiens; identical to SEQ ID NO: 6582

SEQ ID NO: 6585 - protein, 315 aa, Homo sapiens
MKVLLLTGLGALFFAYYWDDNFDPASLQGARVLLTGANAGVGEELAYHYARLGSHLVLTAHTEALLQKVVGNCRKLGAPKVFYIAADMASPEAPESVVQFALDKLGGLDYLVLNHIGGAPAGTRARSPQATRWLMQVNFVSYVQLTSRALPSLTDSKGSLVVVSSLLGRVPTSFSTPYSAAKFALDGFFGSLRRELDVQDVNVAITMCVLGLRDRASAAEAVRSSTSRPRQPEHRGVPLQSQTAMFLPPTVPGARTLTETPLRGWPQPKMKSSRQKSKTEKNDGHLEPVTAWEVQVPRVRRLCRGLARPHLFGHD

SEQ ID NO: 6586 - protein, 32 aa, Homo sapiens
MKVLLLTGLGALFFAYYWDDNFDPASRERECC

SEQ ID NO: 6587 - protein, 205 aa, Homo sapiens
MKVLLLTGLGALFFAYYWDDNFDPGGLDYLVLNHIGGAPAGTRARSPQATRWLMQVNFVSYVQLTSRALPSLTDSKGSLVVVSSLLGRVPTSFSTPYSAAKFALDGFFGSLRRELDVQDVNVAITMCVLGLRDRASAAEAVRGVTRVKAAPGPKAALAVIRGGATRAAGVFYPWRFRLLCLLRRWLPRPRAWFIRQELNVTAAAA

SEQ ID NO: 6588 - protein, 234 aa, Homo sapiens
MKVLLLTGLGALFFAYYWDDNFDPGGLDYLVLNHIGGAPAGTRARSPQATRWLMQVNFVSYVQLTSRALPSLTDSKGSLVVVSSLLGRVPTSFSTPYSAAKFALDGFFGSLRRELDVQDVNVAITMCVLGLRDRASAAEAVRSSTSRPRQPEHRGVPLQSQTAMFLPPTVPGARTLTETPLRGWPQPKMKSSRQKSKTEKNDGHLEPVTAWEVQVPRVRRLCRGLARPHLFGHD

SEQ ID NO: 6589 - protein, 47 aa, Homo sapiens
MKVLLLTGLGALFFAYYWDDNFDPGGRELPEAGRPQGLLHRGGHGLP

SEQ ID NO: 6590 - protein, 189 aa, Homo sapiens
MKVLLLTGLGALFFAYYWDDNFDPGKLCELRATDVAGAAQPDGQQGLPGGGVLAARPRAHVVLHSLLGGQVCAGRLLRLPAAGAGRAGRERGHHHVRPGPPRSRLRRRGSQGSHEGQGGPGAQGSPGRDPRRRHARGRRLLPVAFPPAVLAPALATAPAGLVYPPGAQRHGRGSLSTGGCPSSPRRQCS

SEQ ID NO: 6591 - protein, 152 aa, Homo sapiens
MQVNFVSYVQLTSRALPSLTDSKGSLVVVSSLLGRVPTSFSTPYSAAKFALDGFFGSLRRELDVQDVNVAITMCVLGLRDRASAAEAVRGVTRVKAAPGPKAALAVIRGGATRAAGVFYPWRFRLLCLLRRWLPRPRAWFIRQELNVTAAAA

SEQ ID NO: 6592 - protein, 152 aa, Homo sapiens; identical to SEQ ID NO: 6591

SEQ ID NO: 6593 - protein, 181 aa, Homo sapiens
MQVNFVSYVQLTSRALPSLTDSKGSLVVVSSLLGRVPTSFSTPYSAAKFALDGFFGSLRRELDVQDVNVAITMCVLGLRDRASAAEAVRSSTSRPRQPEHRGVPLQSQTAMFLPPTVPGARTLTETPLRGWPQPKMKSSRQKSKTEKNDGHLEPVTAWEVQVPRVRRLCRGLARPHLFGHD

SEQ ID NO: 6594 - protein, 135 aa, Homo sapiens
  SITE 1: note = misc_feature - Xaa can be any naturally occurring amino acid
XLGALFFAYYWDDNFDPGGLDYLVLNHIGGAPAGTRARSPQATRWLMQVNFVSYVQLTSRALPSLTDSKGSLVVVSSLLGRVPTSFSTPYSAAKFALDGFFGSLRRELDVQDVNVAITMCVLGLRDRASAAEAVR

SEQ ID NO: 6595 - protein, 256 aa, Homo sapiens
MKFLLDILLLLPLLIVCSLESFVKLFIPKRRKSVTGEIVLITGAGHGIGRLTAYEFAKLKSKLVLWDINKHGLEETAAKCKGLGAKVHTFVVDCSNREDIYSSAKKTTKAFLPAMTKNNHGHIVTVASAAGHVSVPFLLAYCSSKFAAVGFHKTLTDELAALQITGVKTTCLCPNFVNTGFIKNPSTSLGPTLEPEEVVNRLMHGILTEQKMIFIPSSIAFLTTLERILPERFLAVLKRKISVKFDAVIGYKMKAQ

SEQ ID NO: 6596 - protein, 300 aa, Homo sapiens
MKFLLDILLLLPLLIVCSLESFVKLFIPKRRKSVTGEIVLITGAGHGIGRLTAYEFAKLKSKLVLWDINKHGLEETAAKCKGLGAKVHTFVVDCSNREDIYSSAKKVKAEIGDVSILVNNAGVVYTSDLFATQDPQIEKTFEVNVLAHFWTTKAFLPAMTKNNHGHIVTVASAAGHVSVPFLLAYCSSKFAAVGFHKTLTDELAALQITGVKTTCLCPNFVNTGFIKNPSTSLGPTLEPEEVVNRLMHGILTEQKMIFIPSSIAFLTTLERILPERFLAVLKRKISVKFDAVIGYKMKAQ

SEQ ID NO: 6597 - protein, 341 aa, Homo sapiens
MRKVVLITGASSGIGLALCKRLLAEDDELHLCLACRNMSKAEAVCAALLASHPTAEVTIVQVDVSNLQSVFRASKELKQRFQRLDCIYLNAGIMPNPQLNIKALFFGLFSRKVIHMFSTAEGLLTQGDKITADGLQEVFETNVFGHFILIRELEPLLCHSDNPSQLIWTSSRSARKSNFSLEDFQHSKGKEPYSSSKYATDLLSVALNRNFNQQGLYSNVACPGTALTNLTYGILPPFIWTLLMPAILLLRFFANAFTLTPYNGTEALVWLFHQKPESLNPLIKYLSATTGFGRNYIMTQKMDLDEDTAEKFYQKLLELEKHIRVTIQKTDNQARLSGSCL

SEQ ID NO: 6598 - protein, 111 aa, Homo sapiens
MRKVVLITGASSGIGLALCKRLLAEDDELHLCLACRNMSKAEAVCAALLASHPTAEVTIVQVDVSNLQSVFRASKELKQRFQRLDCIYLNAGIMPNPQLNIKALFFGLFSS

SEQ ID NO: 6599 - protein, 109 aa, Homo sapiens
MRKVVLITGASSGIGLALCKRLLAEDDELHLCLACRNMSKAEAVCAALLASHPTAEVTIVQVDVSNLQSVFRASKELKQRMIKKWLYVICVEDHVSEIRLYISKCWDHA

SEQ ID NO: 6600 - protein, 84 aa, Homo sapiens
MRKVVLITGASSGIGLALCKRLLAEDDELHLCLACRNMSKAEAVCAALLASHPTAEVTIVQVDVSNLQSVFRASKELKQRYISC

SEQ ID NO: 6601 - protein, 62 aa, Homo sapiens
  SITE 1: note = misc_feature - Xaa can be any naturally occurring amino acid
XSLEDFQHSKGKEPYSSSKYATDLLSVALNRNFNQQVLYSSVYVIKYLPHYMEVGLSITIFR

SEQ ID NO: 6602 - protein, 49 aa, Homo sapiens
MMKLIINSLYKNKEIFLRELISNASDALDKIRLISLTDENALSGNEELT

SEQ ID NO: 6603 - protein, 803 aa, Homo sapiens
MRALWVLGLCCVLLTFGSVRADDEVDVDGTVEEDLGKSREGSRTDDEVVQREEEAIQLDGLNASQIRELREKSEKFAFQAEVNRMMKLIINSLYKNKEIFLRELISNASDALDKIRLISLTDENALSGNEELTVKIKCDKEKNLLHVTDTGVGMTREELVKNLGTIAKSGTSEFLNKMTEAQEDGQSTSELIGQFGVGFYSAFLVADKVIVTSKHNNDTQHIWESDSNEFSVIADPRGNTLGRGTTITLVLKEEASDYLELDTIKNLVKKYSQFINFPIYVWSSKTETVEEPMEEEEAAKEEKEESDDEAAVEEEEEEKKPKTKKVEKTVWDWELMNDIKPIWQRPSKEVEEDEYKAFYKSFSKESDDPMAYIHFTAEGEVTFKSILFVPTSAPRGLFDEYGSKKSDYIKLYVRRVFITDDFHDMMPKYLNFVKGVVDSDDLPLNVSRETLQQHKLLKVIRKKLVRKTLDMIKKIADDKYNDTFWKEFGTNIKLGVIEDHSNRTRLAKLLRFQSSHHPTDITSLDQYVERMKEKQDKIYFMAGSSRKEAESSPFVERLLKKGYEVIYLTEPVDEYCIQALPEFDGKRFQNVAKEGVKFDESEKTKESREAVEKEFEPLLNWMKDKALKDKIEKAVVSQRLTESPCALVASQYGWSGNMERIMKAQAYQTGKDISTNYYASQKKTFEINPRHPLIRDMLRRIKEDEDDKTVLDLAVVLFETATLRSGYLLPDTKAYGDRIERMLRLSLNIDPDAKVEEEPEEEPEETAEDTTEDTEQDEDEEMDVGTDEEEETAKESTAEKDEL

SEQ ID NO: 6604 - protein, 315 aa, Homo sapiens [sequence omitted]

SEQ ID NO: 6605 - protein, 315 aa, Homo sapiens [sequence omitted]

SEQ ID NO: 6606 - protein, 53 aa, Homo sapiens
MRALWVLGLCCVLLTFGSVRADDEVDVDGTVEEDLGKSREGSRTDDEVVQRSR

SEQ ID NO: 6607 - protein, 147 aa, Homo sapiens
  SITE 1: note = misc_feature - Xaa can be any naturally occurring amino acid
XQYGWSGNMERIMKAQAYQTGKDISTNYYASQKKTFEINPRHPLIRDMLRRIKEDEDDKTVLDLAVVLFETATLRSGYLLPDTKAYGDRIERMLRLSLNIDPDAKVEEEPEEEPEETAEDTTEDTEQDEDEEMDVGTDEEEETAKMS

SEQ ID NO: 6608 - protein, 471 aa, Homo sapiens
MAREMTILGSAVLTLLLAGYLAQQYLPLPTPKVIGIDLGTTYCSVGVFFPGTGKVKVIPDENGHISIPSMVSFTDNDVYVGYESVELADSNPQNTIYDAKRFIGKIFTAEELEAEIGRYPFKVLNKNGMVEFSVTSNETITVSPEYVGSRLLLKLKEMAEAYLGMPVANAVISVPAEFDLKQRNSTIEAANLAGLKILRVINEPTAAAMAYGLHKADVFHVLVIDLGGGTLDVSLLNKQGGMFLTRAMSGNNKLGGQDFNQRLLQYLYKQIYQTYGFVPSRKEEIHRLRQAVEMVKLNLTLHQSAQLSVLLTVEEQDRKEPHSSDTELPKDKLSSADDHRVNSGFGRGLSDKKSGESQVLFETEISRKLFDTLNEDLFQKILVPIQQVLKEGHLEKTEIDEVVLVGGSTRIPRIRQVIQEFFGKDPNTSVDPDLAVVTGVAIQAGIDGGSWPLQVSALEIPNKHLQKTNFN

SEQ ID NO: 6609 - protein, 654 aa, Homo sapiens
MKLSLVAAMLLLLSAARAEEEDKKEDVGTVVGIDLGTTYSCVGVFKNGRVEIIANDQGNRITPSYVAFTPEGERLIGDAAKNQLTSNPENTVFDAKRLIGRTWNDPSVQQDIKFLPFKVVEKKTKPYIQVDIGGGQTKTFAPEEISAMVLTKMKETAEAYLGKKVTHAVVTVPAYFNDAQRQATKDAGTIAGLNVMRIINEPTAAAIAYGLDKREGEKNILVFDLGGGTFDVSLLTIDNGVFEVVATNGDTHLGGEDFDQRVMEHFIKLYKKKTGKDVRKDNRAVQKLRREVEKAKRALSSQHQARIEIESFYEGEDFSETLTRAKFEELNMDLFRSTMKPVQKVLEDSDLKKSDIDEIVLVGGSTRIPKIQQLVKEFFNGKEPSRGINPDEAVAYGAAVQAGVLSGDQDTGDLVLLDVCPLTLGIETVGGVMTKLIPRNTVVPTKKSQIFSTASDNQPTVTIKVYEGERPLTKDNHLLGTFDLTGIPPAPRGVPQIEVTFEIDVNGILRVTAEDKGTGNKNKITITNDQNRLTPEEIERMVNDAEKFAEEDKKLKERIDTRNELESYAYSLKNQIGDKEKLGGKLSSEDKETMEKAVEEKIEWLESHQDADIEDFKAKKKELEEIVQPIISKLYGSAGPPPTGEEDTAEKDEL

SEQ ID NO: 6610 - protein, 236 aa, Homo sapiens
ISTHFAPGDFQGFALVNPQRNSRLTGEFTVEPVPEGAQLSFGNFAQLGHESFYWQLPETYQGDKGEAYFARMRRAHQNRTSLSEEQLRAAVTAGRIPEPPEGRDWAQRASQVDEAQRRMDAEIWQLLSSFAAQPQPPPQGLSPHPQPAAALRAAPPPSSSSSSSSSSASLSFSPGSQFSLSYEGFSLLPGSLYYWQLPRAFLGDKVAAYGGKLRYTLSYTAGPQGSPLSDPDVQIT

SEQ ID NO: 6611 - protein, 4391 aa, Homo sapiens
MGWRAAGALLLALLLHGRLLAVTHGLRAYDGLSLPEDIETVTASQMRWTHSYLSDDEDMLADSISGDDLGSGDLGSGDFQMVYFRALVNFTRSIEYSPQLEDAGSREFREVSEAVVDTLESEYLKIPGDQVVSVVFIKELDGWVFVELDVGSEGNADGAQIQEMLLRVISSGSVASYVTSPQGFQFRRLGTVPQFPRACTEAEFACHSYNECVALEYRCDRRPDCRDMSDELNCEEPVLGISPTFSLLVETTSLPPRPETTIMRQPPVTHAPQPLLPGSVRPLPCGPQEAACRNGHCIPRDYLCDGQEDCEDGSDELDCGPPPPCEPNEFPCGNGHCALKLWRCDGDFDCEDRTDEANCPTKRPEEVCGPTQFRCVSTNMCIPASFHCDEESDCPDRSDEFGCMPPQVVTPPRESIQASRGQTVTFTCVAIGVPTPIINWRLNWGHIPSHPRVTVTSEGGRGTLIIRDVKESDQGAYTCEAMNARGMVFGIPDGVLELVPQRGPCPDGHFYLEHSAACLPCFCFGITSVCQSTRRFRDQIRLRFDQPDDFKGVNVTMPAQPGTPPLSSTQLQIDPSLHEFQLVDLSRRFLVHDSFWALPEQFLGNKVDSYGGSLRYNVRYELARGMLEPVQRPDVVLMGAGYRLLSRGHTPTQPGALNQRQVQFSEEHWVHESGRPVQRAELLQVLQSLEAVLIQTVYNTKMASVGLSDIAMDTTVTHATSHGRAHSVEECRCPIGYSGLSCESCDAHFTRVPGGPYLGTCSGCNCNGHASSCDPVYGHCLNCQHNTEGPQCNKCKAGFFGDAMKATATSCRPCPCPYIDASRRFSDTCFLDTDGQATCDACAPGYTGRRCESCAPGYEGNPIQPGGKCRPVNQEIVRCDERGSMGTSGEACRCKNNVVGRLCNECADGSFHLSTRNPDGCLKCFCMGVSRHCTSSSWSRAQLHGASEEPGHFSLTNAASTHTTNEGIFSPTPGELGFSSFHRLLSGPYFWSLPSRFLGDKVTSYGGELRFTVTQRSQPGSTPLHGQPLVVLQGNNIILEHHVAQEPSPGQPSTFIVPFREQAWQRPDGQPATREHLLMALAGIDTLLIRASYAQQPAESRVSGISMDVAVPEETGQDPALEVEQCSCPPGYRGPSCQDCDTGYTRTPSGLYLGTCERCSCHGHSEACEPETGACQGCQHHTEGPRCEQCQPGYYGDAQRGTPQDCQLCPCYGDPAAGQAAHTCFLDTDGHPTCDACSPGHSGRHCERCAPGYYGNPSQGQPCQRDSQVPGPIGCNCDPQGSVSSQCDAAGQCQCKAQVEGLTCSHCRPHHFHLSASNPDGCLPCFCMGITQQCASSAYTRHLISTHFAPGDFQGFALVNPQRNSRLTGEFTVEPVPEGAQLSFGNFAQLGHESFYWQLPETYQGDKVAAYGGKLRYTLSYTAGPQGSPLSDPDVQITGNNIMLVASQPALQGPERRSYEIMFREEFWRRPDGQPATREHLLMALADLDELLIRATFSSVPLAASISAVSLEVAQPGPSNRPRALEVEECRCPPGYIGLSCQDCAPGYTRTGSGLYLGHCELCECNGHSDLCHPETGACSQCQHNAAGEFCELCAPGYYGDATAGTPEDCQPCACPLTNPENMFSRTCESLGAGGYRCTACEPGYTGQYCEQCGPGYVGNPSVQGGQCLPETNQAPLVVEVHPARSIVPQGGSHSLRCQVSGSPPHYFYWSREDGRPVPSGTQQRHQGSELHFPSVQPSDAGVYICTCRNLHQSNTSRAELLVTEAPSKPITVTVEEQRSQSVRPGADVTFICTAKSKSPAYTLVWTRLHNGKLPTRAMDFNGILTIRNVQLSDAGTYVCTGSNMFAMDQGTATLHVQASGTLSAPVVSIHPPQLTVQPGQLAEFRCSATGSPTPTLEWTGGPGGQLPAKAQIHGGILRLPAVEPTDQAQYLCRAHSSAGQQVARAVLHVHGGGGPRVQVSPERTQVHAGRTVRLYCRAAGVPSATITWRKEGGSLPPQARSERTDIATLLIPAITTADAGFYLCVATSPAGTAQARIQVVVLSASDASPPPVKIESSSPSVTEGQTLDLNCVVAGSAHAQVTWYRRGGSLPPHTQVHGSRLRLPQVSPADSGEYVCRVENGSGPKEASITVSVLHGTHSGPSYTPVPGSTRPIRIEPSSSHVAEGQTLDLNCVVPGQAHAQVTWHKRGGSLPARHQTHGSLLRLHQVTPADSGEYVCHVVGTSGPLEASVLVTIEASVIPGPIPPVRIESSSSTVAEGQTLDLSCVVAGQAHAQVTWYKRGGSLPARHQVRGSRLYIFQASPADAGQYVCRASNGMEASITVTVTGTQGANLAYPAGSTQPIRIEPSSSQVAEGQTLDLNCVVPGQSHAQVTWHKRGGSLPVRHQTHGSLLRLYQASPADSGEYVCRVLGSSVPLEASVLVTIEPAGSVPALGVTPTVRIESSSSQVAEGQTLDLNCLVAGQAHAQVTWHKRGGSLPARHQVHGSRLRLLQVTPADSGEYVCRVVGSSGTQEASVLVTIQQRLSGSHSQGVAYPVRIESSSASLANGHTLDLNCLVASQAPHTITWYKRGGSLPSRHQIVGSRLRIPQVTPADSGEYVCHVSNGAGSRETSLIVTIQGSGSSHVPSVSPPIRIESSSPTVVEGQTLDLNCVVARQPQAIITWYKRGGSLPSRHQTHGSHLRLHQMSVADSGEYVCRANNNIDALEASIVISVSPSAGSPSAPGSSMPIRIESSSSHVAEGETLDLNCVVPGQAHAQVTWHKRGGSLPSHHQTRGSRLRLHHVSPADSGEYVCRVMGSSGPLEASVLVTIEASGSSAVHVPAPGGAPPIRIEPSSSRVAEGQTLDLKCVVPGQAHAQVTWHKRGGNLPARHQVHGPLLRLNQVSPADSGEYSCQVTGSSGTLEASVLVTIEPSSPGPIPAPGLAQPIYIEASSSHVTEGQTLDLNCVVPGQAHAQVTWYKRGGSLPARHQTHGSQLRLHLVSPADSGEYVCRAASGPGPEQEASFTVTVPPSEGSSYRLRSPVISIDPPSSTVQQGQDASFKCLIHDGAAPISLEWKTRNQELEDNVHISPNGSIITIVGTRPSNHGTYRCVASNAYGVAQSVVNLSVHGPPTVSVLPEGPVWVKVGKAVTLECVSAGEPRSSARWTRISSTPAKLEQRTYGLMDSHAVLQISSAKPSDAGTYVCLAQNALGTAQKQVEVIVDTGAMAPGAPQVQAEEAELTVEAGHTATLRCSATGSPAPTIHWSKLRSPLPWQHRLEGDTLIIPRVAQQDSGQYICNATSPAGHAEATIILHVESPPYATTVPEHASVQAGETVQLQCLAHGTPPLTFQWSRVGSSLPGRATARNELLHFERAAPEDSGRYRCRVTNKVGSAEAFAQLLVQGPPGSLPATSIPAGSTPTVQVTPQLETKSIGASVEFHCAVPSDRGTQLRWFKEGGQLPPGHSVQDGVLRIQNLDQSCQGTYICQAHGPWGKAQASAQLVIQALPSVLINIRTSVQTVVVGHAVEFECLALGDPKPQVTWSKVGGHLRPGIVQSGGVVRIAHVELADAGQYRCTATNAAGTTQSHVLLLVQALPQISMPQEVRVPAGSAAVFPCIASGYPTPDISWSKLDGSLPPDSRLENNMLMLPSVRPQDAGTYVCTATNRQGKVKAFAHLQVPERVVPYFTQTPYSFLPLPTIKDAYRKFEIKITFRPDSADGMLLYNGQKRVPGSPTNLANRQPDFISFGLVGGRPEFRFDAGSGMATIRHPTPLALGHFHTVTLLRSLTQGSLIVGDLAPVNGTSQGKFQGLDLNEELYLGGYPDYGAIPKAGLSSGFIGCVRELRIQGEEIVFHDLNLTAHGISHCPTCRDRPCQNGGQCHDSESSSYVCVCPAGFTGSRCEHSQALHCHPEACGPDATCVNRPDGRGYTCRCHLGRSGLRCEEGVTVTTPSLSGAGSYLALPALTNTHHELRLDVEFKPLAPDGVLLFSGGKSGPVEDFVSLAMVGGHLEFRYELGSGLAVLRSAEPLALGRWHRVSAERLNKDGSLRVNGGRPVLRSSPGKSQGLNLHTLLYLGGVEPSVPLSPATNMSAHFRGCVGEVSVNGKRLDLTYSFLGSQGIGQCYDSSPCERQPCQHGATCMPAGEYEFQCLCRDGFKGDLCEHEENPCQLREPCLHGGTCQGTRCLCLPGFSGPRCQQGSGHGIAESDWHLEGSGGNDAPGQYGAYFHDDGFLAFPGHVFSRSLPEVPETIELEVRTSTASGLLLWQGVEVGEAGQGKDFISLGLQDGHLVFRYQLGSGEARLVSEDPINDGEWHRVTALREGRRGSIQVDGEELVSGRSPGPNVAVNAKGSVYIGGAPDVATLTGGRFSSGITGCVKNLVLHSARPGAPPPQPLDLQHRAQAGANTRPCPS

SEQ ID NO: 6612 - protein, 109 aa, Homo sapiens
  SITE 1: note = misc_feature - Xaa can be any naturally occurring amino acid
XGTPPLTFQWSRVGSSLPGRATARNELLHFERAAPEDSGRYRCRVTNKVGSAEAFAQLLVQESRTWTRAAKGRIYARPMDLGGRPRPVPSWLSKVGGWLQASAKSREQR

SEQ ID NO: 6613 - protein, 307 aa, Homo sapiens
  SITE 1: note = misc_feature - Xaa can be any naturally occurring amino acid
XNMLMLPSVRPQDAGTYVCTATNRQGKVKAFAHLQVPERVVPYFTQTPYSFLPLPTIKDAYRKFEIKITFRPDSADGLLLYSGMLLYNGQKRVPGSPTNLANRQPDFISFGLVGGRPEFRFDAGSGMATIRHPTPLALGHFHTVTLLRSLTQGSLIVGDLAPVNGTSQGKFQGLDLNEELYLGGYPDYGAIPKAGLSSGFIGCVRELRIQGEEIVFHDLNLTAHGISHCPTCRDRPCQNGGQCHDSESSSYVCVCPAGFTGSRCEHSQALHCHPEACGPDATCVNRPDGRGYTCRCHLGRSGLRCEE

SEQ ID NO: 6614 - protein, 197 aa, Homo sapiens
  SITE 1: note = misc_feature - Xaa can be any naturally occurring amino acid
XTPSGLYLGTCERCSCHGHSEACEPETGACQGCQHHTEGPRCEQCQPGYYGDAQRGTPQDCQLCPCYGDPAAGQAAHTCFLDTDGHPTCDACSPGHSGRHCERCAPGYYGNPSQGQPCQRDSQVPGPIGCNCDPQGSVSSQCDAAGQCQCKVSPNPCPCGACSAPLPRPCGEIRQHLVEAETWAWGAGHGGQGRGCP

SEQ ID NO: 6615 - protein, 242 aa, Homo sapiens
MAETEALSKLREDFRMQNKSVFILGASGETGRVLLKEILEQGLFSKVTLIGRRKLTFDEEAYKNVNQEVVDFEKLDDYASAFQGHDVGFCCLGTTRGKAGAEGFVRVDRDYVLKSAELAKAGGCKHFNLLSSKGADKSSNFLYLQVKGEVEAKVEELKFDRYSVFRPGVLLCDRQESRPGEWLVRKFFGSLPDSWASGHSVPVVTVVRAMLNNVVRPRDKQMELLENKAIHDLGKAHGSLKP

SEQ ID NO: 6616 - protein, 242 aa, Homo sapiens; identical to SEQ ID NO: 6615

SEQ ID NO: 6617 - protein, 242 aa, Homo sapiens; identical to SEQ ID NO: 6615

SEQ ID NO: 6618 - protein, 196 aa, Homo sapiens
MAETEALSKLREDFRMQNKSVFILGASGETGRVLLKEILEQGLFSKVTLIGRRKLTFDEEAYKNVNQEVVDFEKLDDYASAFQGHDVGFCCLGTTRGKAGAGEVEAKVEELKFDRYSVFRPGVLLCDRQESRPGEWLVRKFFGSLPDSWASGHSVPVVTVVRAMLNNVVRPRDKQMELLENKAIHDLGKAHGSLKP

SEQ ID NO: 6619 - protein, 133 aa, Homo sapiens
MAETEALSKLREDFRMQNKSVFILGASGETGRVLLKEILEQGLFSKVTLIGRRKLTFDEEAYKNVNQEVVDFEKLDDYASAFQGHDVGFCCLGTTRGKAGAVRKAYALFPFCWPVISRILFLLTLFLCACCNA

SEQ ID NO: 6620 - protein, 133 aa, Homo sapiens; identical to SEQ ID NO: 6619

SEQ ID NO: 6621 - protein, 133 aa, Homo sapiens; identical to SEQ ID NO: 6619

SEQ ID NO: 6622 - protein, 276 aa, Homo sapiens
MAGPAALSAAAAAALAAALLLLRREDPGPGAGPSMAETEALSKLREDFRMQNKSVFILGASGETGRVLLKEILEQGLFSKVTLIGRRKLTFDEEAYKNVNQEVVDFEKLDDYASAFQGHDVGFCCLGTTRGKAGAEGFVRVDRDYVLKSAELAKAGGCKHFNLLSSKGADKSSNFLYLQVKGEVEAKVEELKFDRYSVFRPGVLLCDRQESRPGEWLVRKFFGSLPDSWASGHSVPVVTVVRAMLNNVVRPRDKQMELLENKAIHDLGKAHGSLKP

SEQ ID NO: 6623 - protein, 57 aa, Homo sapiens
MKFFVFALVLALMISMISADSHEKRHHGYRRKFHEKHHSHREFPFYGDYGSNYLYDN

SEQ ID NO: 6624 - protein, 57 aa, Homo sapiens; identical to SEQ ID NO: 6623

SEQ ID NO: 6625 - protein, 57 aa, Homo sapiens; identical to SEQ ID NO: 6623

SEQ ID NO: 6626 - protein, 41 aa, Homo sapiens
MKFFVFALILALMLSMTGADSHAKEKHHSHRGYRSNYLYDN

SEQ ID NO: 6627 - protein, 51 aa, Homo sapiens
MKFFVFALILALMLSMTGADSHAKRHHGYKRKFHEKHHSHRGYRSNYLYDN

SEQ ID NO: 6628 - protein, 51 aa, Homo sapiens; identical to SEQ ID NO: 6627

SEQ ID NO: 6629 - protein, 221 aa, Homo sapiens
GKLPVLLLGRSSELRPGEFVVAIGSPFSLQNTVTTGIVSTTQRGGKELGLRNSDMDYIQTDAIINYGNSGGPLVNLDGEVIGINTLKVTAGISFAIPSDKIKKFLTESHDRQAKGKAITKKKYIGIRMMSLTSSKAKELKDRHRDFPDVISGAYIIEVIPDTPAEAGGLKENDVIISINGQSVVSANDVSDVIKRESTLNMVVRRGNEDIMITVIPEEIDP

SEQ ID NO: 6630 - protein, 480 aa, Homo sapiens
MQIPRAALLPLLLLLLAAPASAQLSRAGRSAPLAAGCPDRCEPARCPPQPEHCEGGRARDACGCCEVCGAPEGAACGLQEGPCGEGLQCVVPFGVPASATVRRRAQAGLCVCASSEPVCGSDANTYANLCQLRAASRRSERLHRPPVIVLQRGACGQGQEDPNSLRHKYNFIADVVEKIAPAVVHIELFRKLPFSKREVPVASGSGFIVSEDGLIVTNAHVVTNKHRVKVELKNGATYEAKIKDVDEKADIALIKIDHQGKLPVLLLGRSSELRPGEFVVAIGSPFSLQNTVTTGIVSTTQRGGKELGLRNSDMDYIQTDAIINYGNSGGPLVNLDGEVIGINTLKVTAGISFAIPSDKIKKFLTESHDRQAKGKAITKKKYIGIRMMSLTSSKAKELKDRHRDFPDVISGAYIIEVIPDTPAEAGGLKENDVIISINGQSVVSANDVSDVIKRESTLNMVVRRGNEDIMITVIPEEIDP

SEQ ID NO: 6631 - protein, 453 aa, Homo sapiens
MQARALLLAALAALALAREPPAAPCPARCDVSRCPSPRCPGGYVPDLCNCCLVCAASEGEPCGGPLDSPCGESLECVRGLCRCRWSHAVCGTDGHTYANVCALQAASRRALQLSGTPVRQLQKGACPLGLHQLSSPRYKFNFIADVVEKIAPAVVHIELFLRHPLFGRNVPLSSGSGFIMSEAGLIITNAHVVSSNSAAPGRQQLKVQLQNGDSYEATIKDIDKKSDIATIKIHPKKKLPVLLLGHSADLRPGEFVVAIGSPFALQNTVTTGIVSTAQREGRELGLRDSDMDYIQTDAIINYGNSGGPLVNLDGEVIGINTLKVTAGISFAIPSDRITRFLTEFQDKQIKDWKKRFIGIRMRTITPSLVDELKASNPDFPEVSSGIYVQEVAPNSPSQRGGIQDGDIIVKVNGRPLVDSSELQEAVLTESPLLLEVRRGNDDLLFSIAPEVVM

SEQ ID NO: 6632 - protein, 357 aa, Homo sapiens
MQARALLLAALAALALAREPPAAPCPARCDVSRCPSPRCPGGYVPDLCNCCLVCAASEGEPCGGPLDSPCGESLECVRGLCRCRWSHAVCGTDGHTYANVCALQAASRRALQLSGTPVRQLQKGACPLGLHQLSSPRYKFNFIADVVEKIAPAVVHIELFLRHPLFGRNVPLSSGSGFIMSEAGLIITNAHVVSSNSAAPGRQQLKVQLQNGDSYEATIKDIDKKSDIATIKIHPKKKLPVLLLGHSADLRPGEFVVAIGSPFALQNTVTTGIVSTAQREGRELGLRDSDMDYIQTDAIINYGNSGGPLVNLDGEVIGINTLKVTAGISFAIPSDRITRFLTEFQDKQIKAPSLAVH

SEQ ID NO: 6633 - protein, 476 aa, Homo sapiens
MIRPQLRTAGLGRCLLPGLLLLLVPVLWAGAEKLHTQPSCPAVCQPTRCPALPTCALGTTPVFDLCRCCRVCPAAEREVCGGAQGQPCAPGLQCLQPLRPGFPSTCGCPTLGGAVCGSDRRTYPSMCALRAENRAARRLGKVPAVPVQWGNCGDTGTRSAGPLRRNYNFIAAVVEKVAPSVVHVQLWGRLLHGSRLVPVYSGSGFIVSEDGLIITNAHVVRNQQWIEVVLQNGARYEAVVKDIDLKLDLAVIKIESNAELPVLMLGRSSDLRAGEFVVALGSPFSLQNTATAGIVSTKQRGGKELGMKDSDMDYVQIDATINYGNSGGPLVNLDGDVIGVNSLRVTDGISFAIPSDRVRQFLAEYHEHQMKGKAFSNKKYLGLQMLSLTVPLSEELKMHYPDFPDVSSGVYVCKVVEGTAAQSSGLRDHDVIVNINGKPITTTTDVVKALDSDSLSMAVLRGKDNLLLTVIPETIN

SEQ ID NO: 6634 - protein, 69 aa, Homo sapiens
MAAHLLPICALFLTLLDMAQGFRGPLLPNRPFTTVWNANTQWCLERHGVDVDVSVFDVVANPGQTFRGP

SEQ ID NO: 6635 - protein, 103 aa, Homo sapiens
MAAHLLPICALFLTLLDMAQGFRGPLLPNRPFTTVWNANTQWCLERHGVDVDVSVFDVVANPGQTFRGPDMTIFYSSQLGTYPYYTPTGEPVFGGLPQNASLI

SEQ ID NO: 6636 - protein, 435 aa, Homo sapiens
MAAHLLPICALFLTLLDMAQGFRGPLLPNRPFTTVWNANTQWCLERHGVDVDVSVFDVVANPGQTFRGPDMTIFYSSQLGTYPYYTPTGEPVFGGLPQNASLIAHLARTFQDILAAIPAPDFSGLAVIDWEAWRPRWAFNWDTKDIYRQRSRALVQAQHPDWPAPQVEAVAQDQFQGAARAWMAGTLQLGRALRPRGLWGFYGFPDCYNYDFLSPNYTGQCPSGIRAQNDQLGWLWGQSRALYPSIYMPAVLEGTGKSQMYVQHRVAEAFRVAVAAGDPNLPVLPYVQIFYDTTNHFLPLDELEHSLGESAAQGAAGVVLWVSWENTRTKESCQAIKEYMDTTLGPFILNVTSGALLCSQALCSGHGRCVRRTSHPKALLLLNPASFSIQLTPGGGPLSLRGALSLEDQAQMAVEFKCRCYPGWQAPWCERKSMW

SEQ ID NO: 6637 - protein, 435 aa, Homo sapiens; identical to SEQ ID NO: 6636

SEQ ID NO: 6638 - protein, 405 aa, Homo sapiens
MAAHLLPICALFLTLLDMAQGFRGPLLPNRPFTTVWNANTQWCLERHGVDVDVSVFDVVANPGQTFRGPDMTIFYSSQLGTYPYYTPTGEPVFGGLPQNASLIAHLARTFQDILAAIPAPDFSGLAVIDWEAWRPRWAFNWDTKDIYRQRSRALVQAQHPDWPAPQVEAVAQDQFQGAARAWMAGTLQLGRALRPRGLWGFYGFPDCYNYDFLSPNYTGQCPSGIRAQNDQLGWLWGQSRALYPSIYMPAVLEGTGKSQMYVQHRVAEAFRVAVAAGDPNLPVLPYVQIFYDTTNHFLPLESCQAIKEYMDTTLGPFILNVTSGALLCSQALCSGHGRCVRRTSHPKALLLLNPASFSIQLTPGGGPLSLRGALSLEDQAQMAVEFKCRCYPGWQAPWCERKSMW

SEQ ID NO: 6639 - protein, 435 aa, Homo sapiens; identical to SEQ ID NO: 6636

SEQ ID NO: 6640 - protein, 435 aa, Homo sapiens; identical to SEQ ID NO: 6636

SEQ ID NO: 6641 - protein, 253 aa, Homo sapiens
MAGTLQLGRALRPRGLWGFYGFPDCYNYDFLSPNYTGQCPSGIRAQNDQLGWLWGQSRALYPSIYMPAVLEGTGKSQMYVQHRVAEAFRVAVAAGDPNLPVLPYVQIFYDTTNHFLPLDELEHSLGESAAQGAAGVVLWVSWENTRTKESCQAIKEYMDTTLGPFILNVTSGALLCSQALCSGHGRCVRRTSHPKALLLLNPASFSIQLTPGGGPLSLRGALSLEDQAQMAVEFKCRCYPGWQAPWCERKSMW

SEQ ID NO: 6642 - protein, 176 aa, Homo sapiens
MYVQHRVAEAFRVAVAAGDPNLPVLPYVQIFYDTTNHFLPLDELEHSLGESAAQGAAGVVLWVSWENTRTKESCQAIKEYMDTTLGPFILNVTSGALLCSQALCSGHGRCVRRTSHPKALLLLNPASFSIQLTPGGGPLSLRGALSLEDQAQMAVEFKCRCYPGWQAPWCERKSMW

SEQ ID NO: 6643 - protein, 48 aa, Homo sapiens
MRAGPGPTVTLALVLAVSWAMELKPTAPPIFTGRPFVVAWDVPTQDCG

SEQ ID NO: 6644 - protein, 76 aa, Homo sapiens
MRAGPGPTVTLALVLAVSWAMELKPTAPPIFTGRPFVVAWDVPTQDCGPRLKVPLDLNAFDVQASPNEGFVNQNIT

SEQ ID NO: 6645 - protein, 81 aa, Homo sapiens
MRAGPGPTVTLALVLAVSWAMELKPTAPPIFTGRPFVVAWDVPTQDCGPRLKVPLDLNAFDVQASPNEGFVNQNITIFYRD

SEQ ID NO: 6646 - protein, 117 aa, Homo sapiens
MRAGPGPTVTLALVLAVSWAMELKPTAPPIFTGRPFVVAWDVPTQDCGPRLKVPLDLNAFDVQASPNEGFVNQNITIFYRDRLGLYPRFDSAGRSVHGGVPQNVSLWAHRKMLQKRV

SEQ ID NO: 6647 - protein, 121 aa, Homo sapiens
MRAGPGPTVTLALVLAVSWAMELKPTAPPIFTGRPFVVAWDVPTQDCGPRLKVPLDLNAFDVQASPNEGFVNQNITIFYRDRLGLYPRFDSAGRSVHGGVPQNVSLWAHRKMLQKRVEHYI

SEQ ID NO: 6648 - protein, 473 aa, Homo sapiens
MRAGPGPTVTLALVLAVSWAMELKPTAPPIFTGRPFVVAWDVPTQDCGPRLKVPLDLNAFDVQASPNEGFVNQNITIFYRDRLGLYPRFDSAGRSVHGGVPQNVSLWAHRKMLQKRVEHYIRTQESAGLAVIDWEDWRPVWVRNWQDKDVYRRLSRQLVASRHPDWPPDRIVKQAQYEFEFAAQQFMLETLRYVKAVRPRHLWGFYLFPDCYNHDYVQNWESYTGRCPDVEVARNDQLAWLWAESTALFPSVYLDETLASSRHGRNFVSFRVQEALRVARTHHANHALPVYVFTRPTYSRRLTGLSEMDLISTIGESAALGAAGVILWGDAGYTTSTETCQYLKDYLTRLLVPYVVNVSWATQYCSRAQCHGHGRCVRRNPSASTFLHLSTNSFRLVPGHAPGEPQLRPVGELSWADIDHLQTHFRCQCYLGWSGEQCQWDHRQAAGGASEAWAGSHLTSLLALAALAFTWTL

SEQ ID NO: 6649 - protein, 473 aa, Homo sapiens; identical to SEQ ID NO: 6648

SEQ ID NO: 6650 - protein, 473 aa, Homo sapiens; identical to SEQ ID NO: 6648

SEQ ID NO: 6651 - protein, 473 aa, Homo sapiens; identical to SEQ ID NO: 6648

SEQ ID NO: 6652 - protein, 168 aa, Homo sapiens
MLPPAHHQAFVRHRLEEAFRVALVGHRHPLPVLAYVRLTHRRSGRFLSQDDLVQSIGVSAALGAAGVVLWGDLSLSSSEEECWHLHDYLVDTLGPYVINVTRAAMACSHQRCHGHGRCARRDPGQMEAFLHLWPDGSLGDWKSFSCHCYWGWAGPTCQEPRPGPKEAV

SEQ ID NO: 6653 - protein, 138 aa, Homo sapiens
MLPPAHHQAFVRHRLEEAFRVALVGHRHPLPVLAYVRLTHRRSGRFLSQEECWHLHDYLVDTLGPYVINVTRAAMACSHQRCHGHGRCARRDPGQMEAFLHLWPDGSLGDWKSFSCHCYWGWAGPTCQEPRPGPKEAV

SEQ ID NO: 6654 - protein, 160 aa, Homo sapiens
MTTQLGPALVLGVALCLGCGQPLPQVPERPFSVLWNVPSAHCEARFGVHLPLNALGIIANRGQHFHGQNMTIFYKNQLGLYPYFGPRGTAHNGGIPQALPLDRHLALAAYQIHHSLRPGFAGPAVLDWEEWCPLWAGNWGRRRAYQAASWAWAQQVFPDL

SEQ ID NO: 6655 - protein, 417 aa, Homo sapiens
MTTQLGPALVLGVALCLGCGQPLPQVPERPFSVLWNVPSAHCEARFGVHLPLNALGIIANRGQHFHGQNMTIFYKNQLGLYPYFGPRGTAHNGGIPQALPLDRHLALAAYQIHHSLRPGFAGPAVLDWEEWCPLWAGNWGRRRAYQAASWAWAQQVFPDLDPQEQLYKAYTGFEQAARALMEDTLRVAQALRPHGLWGFYHYPACGNGWHSMASNYTGRCHAATLARNTQLHWLWAASSALFPSIYLPPRLPPAHHQAFVRHRLEEAFRVALVGHRHPLPVLAYVRLTHRRSGRFLSQDDLVQSIGVSAALGAAGVVLWGDLSLSSSEEECWHLHDYLVDTLGPYVINVTRAAMACSHQRCHGHGRCARRDPGQMEAFLHLWPDGSLGDWKSFSCHCYWGWAGPTCQEPRPGPKEAV

SEQ ID NO: 6656 - protein, 387 aa, Homo sapiens
MTTQLGPALVLGVALCLGCGQPLPQVPERPFSVLWNVPSAHCEARFGVHLPLNALGIIANRGQHFHGQNMTIFYKNQLGLYPYFGPRGTAHNGGIPQALPLDRHLALAAYQIHHSLRPGFAGPAVLDWEEWCPLWAGNWGRRRAYQAASWAWAQQVFPDLDPQEQLYKAYTGFEQAARALMEDTLRVAQALRPHGLWGFYHYPACGNGWHSMASNYTGRCHAATLARNTQLHWLWAASSALFPSIYLPPRLPPAHHQAFVRHRLEEAFRVALVGHRHPLPVLAYVRLTHRRSGRFLSQEECWHLHDYLVDTLGPYVINVTRAAMACSHQRCHGHGRCARRDPGQMEAFLHLWPDGSLGDWKSFSCHCYWGWAGPTCQEPRPGPKEAV

SEQ ID NO: 6657 - protein, 387 aa, Homo sapiens; identical to SEQ ID NO: 6656

SEQ ID NO: 6658 - protein, 417 aa, Homo sapiens; identical to SEQ ID NO: 6655

SEQ ID NO: 6659 - protein, 92 aa, Homo sapiens
MADKVRRQRPRRRVCWALVAVLLADLLALSDTLAVMSVDLGSESMKVAIVKPGVPMEIVLNKESRRKTPVIVTLKENERFFGDSAASMAIKN

SEQ ID NO: 6660 - protein, 103 aa, Homo sapiens
MADKVRRQRPRRRVCWALVAVLLADLLALSDTLAVMSVDLGSESMKVAIVKPGVPMEIVLNKESRRKTPVIVTLKENERFFGDSAASMAIKNPKATLRYFQHL

SEQ ID NO: 6661 - protein, 149 aa, Homo sapiens
MADKVRRQRPRRRVCWALVAVLLADLLALSDTLAVMSVDLGSESMKVAIVKPGVPMEIVLNKESRRKTPVIVTLKENERFFGDSAASMAIKNPKATLRYFQHLLGKQADNPHVALYQARFPEHELTFDPQRQTVHFQISSQLQFSPEEV

SEQ ID NO: 6662 - protein, 154 aa, Homo sapiens
MADKVRRQRPRRRVCWALVAVLLADLLALSDTLAVMSVDLGSESMKVAIVKPGVPMEIVLNKESRRKTPVIVTLKENERFFGDSAASMAIKNPKATLRYFQHLLGKQADNPHVALYQARFPEHELTFDPQRQTVHFQISSQLQFSPEEVLGMVL

SEQ ID NO: 6663 - protein, 211 aa, Homo sapiens
MADKVRRQRPRRRVCWALVAVLLADLLALSDTLAVMSVDLGSESMKVAIVKPGVPMEIVLNKESRRKTPVIVTLKENERFFGDSAASMAIKNPKATLRYFQHLLGKQADNPHVALYQARFPEHELTFDPQRQTVHFQISSQLQFSPEEVLGMVLNYSRSLAEDFAEQPIKDAVITVPVFFNQAERRAVLQAARMAGLKVLQLINDNTATAL

SEQ ID NO: 6664 - protein, 224 aa, Homo sapiens
MADKVRRQRPRRRVCWALVAVLLADLLALSDTLAVMSVDLGSESMKVAIVKPGVPMEIVLNKESRRKTPVIVTLKENERFFGDSAASMAIKNPKATLRYFQHLLGKQADNPHVALYQARFPEHELTFDPQRQTVHFQISSQLQFSPEEVLGMVLNYSRSLAEDFAEQPIKDAVITVPVFFNQAERRAVLQAARMAGLKVLQLINDNTATALSYGVFRRKDINTT

SEQ ID NO: 6665 - protein, 656 aa, Homo sapiens
MADKVRRQRPRRRVCWALVAVLLADLLALSDTLAVMSVDLGSESMKVAIVKPGVPMEIVLNKESRRKTPVIVTLKENERFFGDSAASMAIKNPKATLRYFQHLLGKQADNPHVALYQARFPEHELTFDPQRQTVHFQISSQLQFSPEEVLGMVLNYSRSLAEDFAEQPIKDAVITVPVFFNQAERRAVLQAARMAGLKVLQLINDNTATALSYGVFRRKDINTTAQNIMFYDMGSGSTVCTIVTYQMVKTKEAGMQPQLQIRGVGFDRTLGGLEMELRLRERLAGLFNEQRKGQRAKDVRENPRAMAKLLREANRLKTVLSANADHMAQIEGLMDDVDFKAKVTRVEFEELCADLFERVPGPVQQALQSAEMSLDEIEQVILVGGATRVPRVQEVLLKAVGKEELGKNINADEAAAMGAVYQAAALSKAFKVKPFVVRDAVVYPILVEFTREVEEEPGIHSLKHNKRVLFSRMGPYPQRKVITFNRYSHDFNFHINYGDLGFLGPEDLRVFGSQNLTTVKLKGVGDSFKKYPDYESKGIKAHFNLDESGVLSLDRVESVFETLVEDSAEEESTLTKLGNTISSLFGGGTTPDAKENGTDTVQEEEESPAEGSKDEPGEQVELKEEAEAPVEDGSQPPPPEPKGDATPEGEKATEKE

SEQ ID NO: 6666 - protein, 937 aa, Homo sapiens
MADKVRRQRPRRRVCWALVAVLLADLLALSDTLAVMSVDLGSESMKVAIVKPGVPMEIVLNKESRRKTPVIVTLKENERFFGDSAASMAIKNPKATLRYFQHLLGKQADNPHVALYQARFPEHELTFDPQRQTVHFQISSQLQFSPEEVLGMVLNYSRSLAEDFAEQPIKDAVITVPVFFNQAERRAVLQAARMAGLKVLQLINDNTATALSYGVFRRKDINTTAQNIMFYDMGSGSTVCTIVTYQMVKTKEAGMQPQLQIRGVGFDRTLGGLEMELRLRERLAGLFNEQRKGQRAKDVRENPRAMAKLLREANRLKTVLSANADHMAQIEGLMDDVDFKAKVTRVEFEELCADLFERVPGPVQQALQSAEMSLDEIEQVILVGGATRVPRVQEVLLKAVGKEELGKNINADEAAAMGAVYQAAALSKAFKVKPFVVRDAVVYPILVEFTREVEEEPGIHSLKHNKRVLFSRMGPYPQRKVITFNRYSHDFNFHINYGDLGFLGPEDLRVFGSQNLTTVKLKGVGDSFKKYPDYESKGIKAHFNLDESGVLSLDRVESVFETLVEDSAEEESTLTKLGNTISSLFGGGTTPDAKENGTDTVQKPSEKAEAGPEGVAPAPEGEKKQKPARKRRMVEEIGVELVVLDLPDLPEDKLAQSVQKLQDLTLRDLEKQEREKAANSLEAFIFETQDKLYQPEYQEVSTEEQREEISGKLSAASTWLEDEGVGATTVMLKEKLAELRKLCQGLFFRVEERKKWPERLSALDNLLNHSSMFLKGARLIPEMDQIFTEVEMTTLEKVINETWAWKNATLAEQAKLPATEKPVLLSKDIEAKMMALDREVQYLLNKAKFTKPRPRPKDKNGTRAEPPLNASASDQGEKVIPPAGQTEDAEPISEPEKVETGSEPGDTEPLELGGPGAEPEQKEQSTGQKRPLKNDEL

SEQ ID NO: 6667 - protein, 678 aa, Homo sapiens
MADKVRRQRPRRRVCWALVAVLLADLLALSDTLAVMSVDLGSESMKVAIVKPGVPMEIVLNKESRRKTPVIVTLKENERFFGDSAASMAIKNPKATLRYFQHLLGKQADNPHVALYQARFPEHELTFDPQRQTVHFQISSQLQFSPEEVLGMVLNYSRSLAEDFAEQPIKDAVITVPVFFNQAERRAVLQAARMAGLKVLQLINDNTATALSYGVFRRKDINTTAQNIMFYDMGSGSTVCTIVTYQMVKTKEAGMQPQLQIRGVGFDRTLGGLEMELRLRERLAGLFNEQRKGQRAKDVRENPRAMAKLLREANRLKTVLSANADHMAQIEGLMDDVDFKAKVTRVEFEELCADLFERVPGPVQQALQSAEMSLDEIEQVILVGGATRVPRVQEVLLKAVGKEELGKNINADEAAAMGAVYQAAALSKAFKVKPFVVRDAVVYPILVEFTREVEEEPGIHSLKHNKRVLFSRMGPYPQRKVITFNRYSHDFNFHINYGDLGFLGPEDLRVFGSQNLTTVKLKGVGDSFKKYPDYESKGIKAHFNLDESGVLSLDRVESVFETLVEDSAEEESTLTKLGNTISSLFGGGTTPDAKENGTDTVQEEEESPAEGSKDEPGEQVELKEEAEAPVEDGSQPPPPEPKGDATPEGEKATEKENGDKSEAQKPVVCRASVTRFGF

SEQ ID NO: 6668 - protein, 677 aa, Homo sapiens
MADKVRRQRPRRRVCWALVAVLLADLLALSDTLAVMSVDLGSESMKVAIVKPGVPMEIVLNKESRRKTPVIVTLKENERFFGDSAASMAIKNPKATLRYFQHLLGKQADNPHVALYQARFPEHELTFDPQRQTVHFQISSQLQFSPEEVLGMVLNYSRSLAEDFAEQPIKDAVITVPVFFNQAERRAVLQAARMAGLKVLQLINDNTATALSYGVFRRKDINTTAQNIMFYDMGSGSTVCTIVTYQMVKTKEAGMQPQLQIRGVGFDRTLGGLEMELRLRERLAGLFNEQRKGQRAKDVRENPRAMAKLLREANRLKTVLSANADHMAQIEGLMDDVDFKAKVTRVEFEELCADLFERVPGPVQQALQSAEMSLDEIEQVILVGGATRVPRVQEVLLKAVGKEELGKNINADEAAAMGAVYQAAALSKAFKVKPFVVRDAVVYPILVEFTREVEEEPGIHSLKHNKRVLFSRMGPYPQRKVITFNRYSHDFNFHINYGDLGFLGPEDLRVFGSQNLTTVKLKGVGDSFKKYPDYESKGIKAHFNLDESGVLSLDRVESVFETLVEDSAEEESTLTKLGNTISSLFGGGTTPDAKENGTDTVQEEEESPAEGSKDEPGEQVELKEEAEAPVEDGSQPPPPEPKGDATPEGEKATEKENGDKSEAQASVCRASVTRFGF

SEQ ID NO: 6669 - protein, 999 aa, Homo sapiens
MADKVRRQRPRRRVCWALVAVLLADLLALSDTLAVMSVDLGSESMKVAIVKPGVPMEIVLNKESRRKTPVIVTLKENERFFGDSAASMAIKNPKATLRYFQHLLGKQADNPHVALYQARFPEHELTFDPQRQTVHFQISSQLQFSPEEVLGMVLNYSRSLAEDFAEQPIKDAVITVPVFFNQAERRAVLQAARMAGLKVLQLINDNTATALSYGVFRRKDINTTAQNIMFYDMGSGSTVCTIVTYQMVKTKEAGMQPQLQIRGVGFDRTLGGLEMELRLRERLAGLFNEQRKGQRAKDVRENPRAMAKLLREANRLKTVLSANADHMAQIEGLMDDVDFKAKVTRVEFEELCADLFERVPGPVQQALQSAEMSLDEIEQVILVGGATRVPRVQEVLLKAVGKEELGKNINADEAAAMGAVYQAAALSKAFKVKPFVVRDAVVYPILVEFTREVEEEPGIHSLKHNKRVLFSRMGPYPQRKVITFNRYSHDFNFHINYGDLGFLGPEDLRVFGSQNLTTVKLKGVGDSFKKYPDYESKGIKAHFNLDESGVLSLDRVESVFETLVEDSAEEESTLTKLGNTISSLFGGGTTPDAKENGTDTVQEEEESPAEGSKDEPGEQVELKEEAEAPVEDGSQPPPPEPKGDATPEGEKATEKENGDKSEAQKPSEKAEAGPEGVAPAPEGEKKQKPARKRRMVEEIGVELVVLDLPDLPEDKLAQSVQKLQDLTLRDLEKQEREKAANSLEAFIFETQDKLYQPEYQEVSTEEQREEISGKLSAASTWLEDEGVGATTVMLKEKLAELRKLCQGLFFRVEERKKWPERLSALDNLLNHSSMFLKGARLIPEMDQIFTEVEMTTLEKVINETWAWKNATLAEQAKLPATEKPVLLSKDIEAKMMALDREVQYLLNKAKFTKPRPRPKDKNGTRAEPPLNASASDQGEKVIPPAGQTEDAEPISEPEKVETGSEPGDTEPLELGGPGAEPEQKEQSTGQKRPLKNDEL

SEQ ID NO: 6670 - protein, 937 aa, Homo sapiens; identical to SEQ ID NO: 6666

SEQ ID NO: 6671 - protein, 147 aa, Homo sapiens
MADKVRRQRPRRRVCWALVAVLLADLLALSDTLAVMSVDLGSESMKVAIVKPGVPMEIVLNKESRRKTPVIVTLKENERFFGDSAASMAIKNPKATLRYFQHLLGKQADNPHVALYQARFPEHELTFDPQRQTVHFQISSQLQFSPL

SEQ ID NO: 6672 - protein, 38 aa, Homo sapiens
MADKVRRQRPRRRVCWALVAVLLADLLALSGNLGGKHR

SEQ ID NO: 6673 - protein, 38 aa, Homo sapiens; identical to SEQ ID NO: 6672

SEQ ID NO: 6674 - protein, 79 aa, Homo sapiens
MGILKLQVFLIVLSVALNHLKATPIERQEWIIPVLSRNILLELRGAKPEHEAGKKSKVIRWKSGNATLPHVQRSAWQIF

SEQ ID NO: 6675 - protein, 79 aa, Homo sapiens
MGILKLQVFLIVLSVALNHLKATPIESHQVEKRKCNTATCATQRLANFLVHSSNNFGAILSSTNVGSNTYGKRNAVEVL

SEQ ID NO: 6676 - protein, 89 aa, Homo sapiens
MGILKLQVFLIVLSVALNHLKATPIESHQVEKRKCNTATCATQRLANFLVHSSNNFGAILSSTNVGSNTYGKRNAVEVLKREPLNYLPL

SEQ ID NO: 6677 - protein, 89 aa, Homo sapiens; identical to SEQ ID NO: 6676

SEQ ID NO: 6678 - protein, 85 aa, Homo sapiens
  SITE 1: note = misc_feature - Xaa can be any naturally occurring amino acid
XLKATPIERCLDQIPIFTVFQENHQVEKRKCNTATCATQRLANFLVHSSNNFGAILSSTNVGSNTYGKRNAVEVLKREPLNYLPL

SEQ ID NO: 6679 - protein, 317 aa, Homo sapiens
MKTALILLSILGMACAFSMKNLHRRVKIEDSEENGVFKYRPRYYLYKHAYFYPHLKRFPVQGSSDSSEENGDDSSEEEEEEEETSNEGENNEESNEDEDSEAENTTLSATTLGYGEDATPGTGYTGLAAIQLPKKAGDITNKATKEKESDEEEEEEEEGNENEESEAEVDENEQGINGTSTNSTEAENGNGSSGGDNGEEGEEESVTGANAEDTTETGRQGKGTSKTTTSPNGGFEPTTPPQVYRTTSPPFGKTTTVEYEGEYEYTGANEYDNGYEIYESENGEPRGDNYRAYEDEYSYFKGQGYDGYDGQNYYHHQ

SEQ ID NO: 6680 - protein, 180 aa, Homo sapiens
MAPSSPRPALPALLVLLGALFPGPGNAQTSVSPSKVILPRGGSVLVTCSTSCDQPKLLGIETPLPKKELLLPGNNRKVYELSNVQEDSQPMCYSNCPDGQSTAKTFLTVYWTPERVEGGAPRANLTVVLLRGEKELKREPAVGEPAEVTTTVLVRRDHHGANFSCRTELDLRPQGLELFE

SEQ ID NO: 6681 - protein, 532 aa, Homo sapiens
MAPSSPRPALPALLVLLGALFPGPGNAQTSVSPSKVILPRGGSVLVTCSTSCDQPKLLGIETPLPKKELLLPGNNRKVYELSNVQEDSQPMCYSNCPDGQSTAKTFLTVYWTPERVELAPLPSWQPVGKNLTLRCQVEGGAPRANLTVVLLRGEKELKREPAVGEPAEVTTTVLVRRDHHGANFSCRTELDLRPQGLELFENTSAPYQLQTFVLPATPPQLVSPRVLEVDTQGTVVCSLDGLFPVSEAQVHLALGDQRLNPTVTYGNDSFSAKASVSVTAEDEGTQRLTCAVILGNQSQETLQTVTIYSFPAPNVILTKPEVSEGTEVTVKCEAHPRAKVTLNGVPAQPLGPRAQLLLKATPEDNGRSFSCSATLEVAGQLIHKNQTRELRVLYGPRLDERDCPGNWTWPENSQQTPMCQAWGNPLPELKCLKDGTFPLPIGESVTVTRDLEGTYLCRARSTQGEVTRKVTVNVLSPRYEIVIITVVAAAVIMGTAGLSTYLYNRQRKIKKYRLQQAQKGTPMKPNTQATPP

SEQ ID NO: 6682 - protein, 310 aa, Homo sapiens
MAPSSPRPALPALLVLLGALFPVSEAQVHLALGDQRLNPTVTYGNDSFSAKASVSVTAEDEGTQRLTCAVILGNQSQETLQTVTIYSFPAPNVILTKPEVSEGTEVTVKCEAHPRAKVTLNGVPAQPLGPRAQLLLKATPEDNGRSFSCSATLEVAGQLIHKNQTRELRVLYGPRLDERDCPGNWTWPENSQQTPMCQAWGNPLPELKCLKDGTFPLPIGESVTVTRDLEGTYLCRARSTQGEVTRKVTVNVLSPRYEIVIITVVAAAVIMGTAGLSTYLYNRQRKIKKYRLQQAQKGTPMKPNTQATPP

SEQ ID NO: 6683 - protein, 174 aa, Homo sapiens
MNSNVSVYQPPRQVILTLQPTLVAVGKSFTIECRVPTVEPLDSLTLFLFRGNETLHYETFGKAAPAPQEATATFNSTADREDGHRNFSCLAVLDLMSRGGNIFHKHSAPKMLEIYEPVSDSQMVIIVTVVSVLLSLFVTSVLLCFIFGQHLRQQRMGTYGVRAAWRRLPQAFRP

SEQ ID NO: 6684 - protein, 251 aa, Homo sapiens
MSSFGYRTLTVALFTLICCPGSDEKVFEVHVRPKKLATSLDKILLDEQAQWKHYLVSNISHDTVLQCHFTCSGKQESMNSNVSVYQPPRQVILTLQPTLVAVGKSFTIECRVPTVEPLDSLTLFLFRGNETLHYETFGKAAPAPQEATATFNSTADREDGHRNFSCLAVLDLMSRGGNIFHKHSAPKMLEIYEPVSDSQMVIIVTVVSVLLSLFVTSVLLCFIFGQHLRQQRMGTYGVRAAWRRLPQAFRP

SEQ ID NO: 6685 - protein, 167 aa, Homo sapiens
MSSFGYRTLTVALFTLICCPGSDEKVFEVHVRPKKLAVEPKGSLEVNCSTTCNQPEVGGLETSLDKILLDEQAQWKHYLVSNISHDTVLQCHFTCSGKQESMNSNVSVYQPPRQVILTLQPTLVAVGKSFTIECRVPTVEPLDSLTLFLFRGNETLHYETFGKAAPA

SEQ ID NO: 6686 - protein, 214 aa, Homo sapiens
MSSFGYRTLTVALFTLICCPGSDEKVFEVHVRPKKLAVEPKGSLEVNCSTTCNQPEVGGLETSLDKILLDEQAQWKHYLVSNISHDTVLQCHFTCSGKQESMNSNVSVYQPPRQVILTLQPTLVAVGKSFTIECRVPTVEPLDSLTLFLFRGNETLHYETFGKAAPAPQEATATFNSTADREDGHRNFSCLAVLDLMSRGGNIFHKHSAPKMLE

SEQ ID NO: 6687 - protein, 216 aa, Homo sapiens
MSSFGYRTLTVALFTLICCPGSDEKVFEVHVRPKKLAVEPKGSLEVNCSTTCNQPEVGGLETSLDKILLDEQAQWKHYLVSNISHDTVLQCHFTCSGKQESMNSNVSVYQPPRQVILTLQPTLVAVGKSFTIECRVPTVEPLDSLTLFLFRGNETLHYETFGKAAPAPQEATATFNSTADREDGHRNFSCLAVLDLMSRGGNIFHKHSAPKMLEIY

SEQ ID NO: 6688 - protein, 275 aa, Homo sapiens
MSSFGYRTLTVALFTLICCPGSDEKVFEVHVRPKKLAVEPKGSLEVNCSTTCNQPEVGGLETSLDKILLDEQAQWKHYLVSNISHDTVLQCHFTCSGKQESMNSNVSVYQPPRQVILTLQPTLVAVGKSFTIECRVPTVEPLDSLTLFLFRGNETLHYETFGKAAPAPQEATATFNSTADREDGHRNFSCLAVLDLMSRGGNIFHKHSAPKMLEIYEPVSDSQMVIIVTVVSVLLSLFVTSVLLCFIFGQHLRQQRMGTYGVRAAWRRLPQAFRP

SEQ ID NO: 6689 - protein, 275 aa, Homo sapiens; identical to SEQ ID NO: 6688

SEQ ID NO: 6690 - protein, 275 aa, Homo sapiens; identical to SEQ ID NO: 6688

SEQ ID NO: 6691 - protein, 275 aa, Homo sapiens; identical to SEQ ID NO: 6688

SEQ ID NO: 6692 - protein, 275 aa, Homo sapiens; identical to SEQ ID NO: 6688

SEQ ID NO: 6693 - protein, 53 aa, Homo sapiens
MSSFGYRTLTVALFTLICCPGVNEFQRQRVPASKAGHPDTATHFGGCGQVLHH

SEQ ID NO: 6694 - protein, 271 aa, Homo sapiens
MGSLFPLSLLFFLAAAYPGVGSALGRRTKRAQSPKGSPLAPSGTSVPFWVRMSPEFVAVQPGKSVQLNCSNSCPQPQNSSLRTPLRQGKTLRGPGWVSYQLLDVRAWSSLAHCLVTCAGKTRWATSRITAYKPPHSVILEPPVLKGRKYTLRCHVTQVFPVGYLVVTLRHGSRVIYSESLERFTGLDLANVTLTYEFAAGPRDFWQPVICHARLNLDGLVVRNSSAPITLMLAWSPAPTALASGSIAALVGILLTVGAAYLCKCLAMKSQA

SEQ ID NO: 6695 - protein, 237 aa, Homo sapiens
MGSLFPLSLLFFLAAAYPGVGSALGRRTKRAQSPKGSPLAPSGTSVPFWVRMSPEFVAVQPGKSVQLNCSNSCPQPQNSSLRTPLRQGKTLRGPGWVSYQLLDVRAWSSLAHCLVTCAGKTRWATSRITAYKPPHSVILEPPVLKGRKYTLRCHVTQVFPVGYLVVTLRHGSRVIYSESLERFTGLDLANVTLTYEFAAGPRDFWQPVICHARLNLDGLVVRNSSAPITLMLGEAPL

SEQ ID NO: 6696 - protein, 272 aa, Homo sapiens
MGSLFPLSLLFFLAAAYPGVGSALGRRTKRAQSPKGSPLAPSGTSVPFWVRMSPEFVAVQPGKSVQLNCSNSCPQPQNSSLRTPLRQGKTLRGPGWVSYQLLDVRAWSSLAHCLVTCAGKTRWATSRITAYSVPGGLLGGDPEAWKPGHLFRKPGALHRPGSGQRDLDLRVCCWTPRLLAARDLPRAPQSRRPGGPQQLGTHYTDARLEPRAHSFGLRFHRCPCRDPPHCGRCVPMQVPSYEVPGVKGDVLCRLSEKKRNMKQSGEMAIHGG

SEQ ID NO: 6697 - protein, 155 aa, Homo sapiens
MKVASGSTATAAAGPSCALKAGKTASGAGEVVRCLSEQSVAISRCAGGAGARLPALLDEQQVNVLLYDMNGCYSRLKELVPTLPQNRKVSKVEILQHVIDYIRDLQLELNSESEVGTPGGRGLPVRAPLSTLNGEISALTAEAACVPADDRILCR

SEQ ID NO: 6698 - protein, 149 aa, Homo sapiens
MKVASGSTATAAAGPSCALKAGKTASGAGEVVRCLSEQSVAISRCAGGAGARLPALLDEQQVNVLLYDMNGCYSRLKELVPTLPQNRKVSKVEILQHVIDYIRDLQLELNSESEVGTPGGRGLPVRAPLSTLNGEISALTAEVRSRSDH

SEQ ID NO: 6699 - protein, 257 aa, Homo sapiens
EFIIRGGRVPSHCLHFSRSFQKKTYSKMNNPAIKRIGNHITKSPEDKREYRGLELANGIKVLLISDPTTDKSSAALDVHIGSLSDPPNIAGLSHFCEHMLFLGTKKYPKENEYSQFLSEHAGSSNAFTSGEHTNYYFDVSHEHLEGALDRFAQFFLCPLFDESCKDREVNAVDSEHEKNVMNDAWRLFQLEKATGNPKHPFSKFGTGNKYTLETRPNQEGIDVRQELLKFHSAYYSSNLMAVCVLGRESLDDLTNLV

SEQ ID NO: 6700 - protein, 1019 aa, Homo sapiens [sequence omitted]

SEQ ID NO: 6701 - protein, 61 aa, Homo sapiens
MRYRLAWLLHPALPSTFRSVLGARLPPPERLCGNYQVVFQSSGTILHFHQQCVKIPISLYP

SEQ ID NO: 6702 - protein, 464 aa, Homo sapiens
MSKLWFKQDDKFFLPKACLNFEFFSPFAYVDPLHCNMAYLYLELLKDSLNEYAYAAELAGLSYDLQNTIYGMYLSVKGYNDKQPILLKKIIEKMATFEIDEKRFEIIKEAYMRSLNNFRAEQPHQHAMYYLRLLMTEVAWTKDELKEALDDVTLPRLKAFIPQLLSRLHIEALLHGNITKQAALGIMQMVEDTLIEHAHTKPLLPSQLVRYREVQLPDRGWFVYQQRNEVHNNCGIEIYYQTDMQSTSENMFLELFCQIISEPCFNTLRTKEQLGYIVFSGPRRANGIQGLRFIIQSEKPPHYLESRVEAFLITMEKSIEDMTEEAFQKHIQALAIRRLDKPKKLSAECAKYWGEIISQQYNFDRDNTEVAYLKTLTKEDIIKFYKEMLAVDAPRRHKVSVHVLAREMDSCPVVGEFPCQNDINLSQAPALPQPEVIQNMTEFKRGLPLFPLVKPHINFMAAKL

SEQ ID NO: 6703 - protein, 106 aa, Homo sapiens
MAAPGALLVMGTLTLSPRLEYSGVISAHCNLCLLSSSDCHASASGVTGVTGVHHHTQLSFVFLVETGFCHVGRASPELLASSDPPASASQSAGIIGVSQGLNLTWS

SEQ ID NO: 6704 - protein, 187 aa, Homo sapiens
MAAPGALLVMGVSGSGKSTVGALLASELGWKFYDADDYHPEENRRKMGKGIPLNDQDRIPWLCNLHDILLRDVASGQRVVLACSALKKTYRDILTQGKDGVALKCEESGKEAKQAEMQLLVVHLSGSFEVISGRLLKREGHFMPPELLQSQFETLEPPAAPENFIQISVDKNVSEIIATIMETLKMK

SEQ ID NO: 6705 - protein, 90 aa, Homo sapiens
MAAPGALLVMGVSGSGKSTVGALLASELGWKFYDADDYHPEENRRKMGKGIPLNDQRCSLGTACGSSLFSPEENVQRHINTRKRWCSSEV

SEQ ID NO: 6706 - protein, 59 aa, Homo sapiens
MAAPGALLVMGVSGSGNWDGNSMMLMIITRRKIEGRWEKAYRSMTRTGFHGSVTCMTFY

SEQ ID NO: 6707 - protein, 90 aa, Homo sapiens
MGKGIPLNDQDRIPWLCNLHDILLRDVASGQRVVLACSALKKTYRDILTQGKDGVALKCEESGKEAKQAEMQLLVVHLSGSFEVISGRLL

SEQ ID NO: 6708 - protein, 141 aa, Homo sapiens
MGKGIPLNDQDRIPWLCNLHDILLRDVASGQRVVLACSALKKTYRDILTQGKDGVALKCEESGKEAKQAEMQLLVVHLSGSFEVISGRLLKREGHFMPPELLQSQFETLEPPAAPENFIQISVDKNVSEIIATIMETLKMK

SEQ ID NO: 6709 - protein, 86 aa, Homo sapiens
MPPPRTGRGLLWLGLVLSSVCVALGSETQANSTTDALNVLLIIVDDLRPSLGCYGDKLVRSPNIDQLASHSLLFQNAFAQQAVCAP

SEQ ID NO: 6710 - protein, 550 aa, Homo sapiens
MPPPRTGRGLLWLGLVLSSVCVALGSETQANSTTDALNVLLIIVDDLRPSLGCYGDKLVRSPNIDQLASHSLLFQNAFAQQAVCAPSRVSFLTGRRPDTTRLYDFNSYWRVHAGNFSTIPQYFKENGYVTMSVGKVFHPGISSNHTDDSPYSWSFPPYHPSSEKYENTKTCRGPDGELHANLLCPVDVLDVPEGTLPDKQSTEQAIQLLEKMKTSASPFFLAVGYHKPHIPFRYPKEFQKLYPLENITLAPDPEVPDGLPPVAYNPWMDIRQREDVQALNISVPYGPIPVDFQRKIRQSYFASVSYLDTQVGRLLSALDDLQLANSTIIAFTSDHGWALGEHGEWAKYSNFDVATHVPLIFYVPGRTASLPEAGEKLFPYLDPFDSASQLMEPGRQSMDLVELVSLFPTLAGLAGLQVPPRCPVPSFHVELCREGKNLLKHFRFRDLEEDPYLPGNPRELIAYSQYPRPSDIPQWNSDKPSLKDIKIMGYSIRTIDYRYTVWVGFNPDEFLANFSDIHAGELYFVDSDPLQDHNMYNDSQGGDLFQLLMP

SEQ ID NO: 6711 - protein, 343 aa, Homo sapiens
MPPPRTGRGLLWLGLVLSSVCVALGSETQANSTTDALNVLLIIVDDLRPSLGCYGDKLVRSPNIDQLASHSLLFQNAFAQQAVCAPSRVSFLTGRRPDTTRLYDFNSYWRVHAGNFSTIPQYFKENGYVTMSVGKVFHPGISSNHTDDSPYSWSFPPYHPSSEKYENTKTCRGPDGELHANLLCPVDVLDVPEGTLPDKQSTEQAIQLLEKMKTSASPFFLAVGYHKPHIPFRYPKEFQKLYPLENITLAPDPEVPDGLPPVAYNPWMDIRQREDVQALNISVPYGPIPVDFQRKIRQSYFASVSYLDTQVGRLLSALDDLQLANSTIIAFTSDHGFLMRTNT

SEQ ID NO: 6712 - protein, 312 aa, Homo sapiens
MPPPRTGRGLLWLGLVLSSVCVALGSETQANSTTDALNVLLIIVDDLRPSLGCYGDKLVRSPNIDQLASHSLLFQNAFAQQAVCAPSRVSFLTGRRPDTTRLYDFNSYWRVHAGNFSTIPQYFKENGYVTMSVGKVFHPGISSNHTDDSPYSWSFPPYHPSSEKYENTKTCRGPDGELHANLLCPVDVLDVPEGTLPDKQSTEQAIQLLEKMKTSASPFFLAVGYHKPHIPFRYPKEFQKLYPLENITLAPDPEVPDGLPPVAYNPWMDIRQREDVQALNISVPYGPIPVDFQEDQSSTGFRLKTSSTRKYK

SEQ ID NO: 6713 - protein, 179 aa, Homo sapiens
MPPPRTGRGLLWLGLVLSSVCVALGSETQANSTTDALNVLLIIVDDLRPSLGCYGDKLVRSPNIDQLASHSLLFQNAFAQQAVCAPSRVSFLTGRRPDTTRLYDFNSYWRVHAGNFSTIPQYFKENGYVTMSVGKVFHPGTAPCPESGFSWFVVSESSIPILGMGLSLQSPLLAGRVPR

SEQ ID NO: 6714 - protein, 106 aa, Homo sapiens
RSPNIDQLASHSLLFQNAFAQQAVCAPSRVSFLTGRRPDTTRLYDFNSYWRVHAGNFSTIPQYFKENGYVTMSVGKVFHPALVGTHFSAESLFSRPFSVSIGPASR

SEQ ID NO: 6715 - protein, 232 aa, Homo sapiens
LAHPGPGIGAGPSPGSAGPSPLPGMDGRWALLDPESIVRGSTGRGLSYNFTHLDGYLDLLRENQLLPGFELMGSASGHFTDFEDKQQVFEWKDLVSSLARRYIGRYGLAHVSKWNFETWNEPDHHDFDNVSMTMQGFLNYYDACSEGLRAASPALRLGGPGDSFHTPPRSPLSWGLLRHCHDGTNFFTGEAGVRLDYISLHRKGARSSISILEQEKVVAQQIRQLFPKFADT

SEQ ID NO: 6716 - protein, 176 aa, Homo sapiens
MCLPSECHSHWTQVQASLSPAAPCPPPWLPRGSTGRGLSYNFTHLDGYLDLLRENQLLPGFELMGSASGHFTDFEDKQQVFEWKDLVSSLARRYIGRYGLAHVSKWNFETWNEPDHHDFDNVSMTMQGFLNYYDACSEGLRAASPALRLGGPGDSFHTPPRSPLSWGLLRHCHDGT

SEQ ID NO: 6717 - protein, 521 aa, Homo sapiens
MGSASGHFTDFEDKQQVFEWKDLVSSLARRYIGRYGLAHVSKWNFETWNEPDHHDFDNVSMTMQGFLNYYDACSEGLRAASPALRLGGPGDSFHTPPRSPLSWGLLRHCHDGTNFFTGEAGVRLDYISLHRKGARSSISILEQEKVVAQQIRQLFPKFADTPIYNDEADPLVGWSLPQPWRADVTYAAMVVKVIAQHQNLLLANTTSAFPYALLSNDNAFLSYHPHPFAQRTLTARFQVNNTRPPHVQLLRKPVLTAMGLLALLDEEQLWAEVSQAGTVLDSNHTVGVLASAHRPQGPADAWRAAVLIYASDDTRAHPNRSVAVTLRLRGVPPGPGLVYVTRYLDNGLCSPDGEWRRLGRPVFPTAEQFRRMRAAEDPVAAAPRPLPAGGRLTLRPALRLPSLLLVHVCARPEKPPGQVTRLRALPLTQGQLVLVWSDEHVGSKCLWTYEIQFSQDGKAYTPVSRKPSTFNLFVFSPDTGAVSGSYRVRALDYWARPGPFSDPVPYLEVPVPRGPPSPGNP

SEQ ID NO: 6718 - protein, 653 aa, Homo sapiens
MRPLRPRAALLALLASLLAAPPVAPAEAPHLVHVDAARALWPLRRFWRSTGFCPPLPHSQADQYVLSWDQQLNLAYVGAVPHRGIKQVRTHWLLELVTTRGSTGRGLSYNFTHLDGYLDLLRENQLLPGFELMGSASGHFTDFEDKQQVFEWKDLVSSLARRYIGRYGLAHVSKWNFETWNEPDHHDFDNVSMTMQGFLNYYDACSEGLRAASPALRLGGPGDSFHTPPRSPLSWGLLRHCHDGTNFFTGEAGVRLDYISLHRKGARSSISILEQEKVVAQQIRQLFPKFADTPIYNDEADPLVGWSLPQPWRADVTYAAMVVKVIAQHQNLLLANTTSAFPYALLSNDNAFLSYHPHPFAQRTLTARFQVNNTRPPHVQLLRKPVLTAMGLLALLDEEQLWAEVSQAGTVLDSNHTVGVLASAHRPQGPADAWRAAVLIYASDDTRAHPNRSVAVTLRLRGVPPGPGLVYVTRYLDNGLCSPDGEWRRLGRPVFPTAEQFRRMRAAEDPVAAAPRPLPAGGRLTLRPALRLPSLLLVHVCARPEKPPGQVTRLRALPLTQGQLVLVWSDEHVGSKCLWTYEIQFSQDGKAYTPVSRKPSTFNLFVFSPDTGAVSGSYRVRALDYWARPGPFSDPVPYLEVPVPRGPPSPGNP

SEQ ID NO: 6719 - protein, 224 aa, Homo sapiens
MRPLRPRAALLALLASLLAAPPVAPAEAPHLVHVDAARALWPLRRFWRSTGFWGSTGRGLSYNFTHLDGYLDLLRENQLLPGFELMGSASGHFTDFEDKQQVFEWKDLVSSLARRYIGRYGLAHVSKWNFETWNEPDHHDFDNVSMTMQGFLNYYDACSEGLRAASPALRLGGPGDSFHTPPRSPLSWGLLRHCHDGTNFFTGEAGVRLDYISLHRKGARSSIS

SEQ ID NO: 6720 - protein, 196 aa, Homo sapiens
  SITE 1: note = misc_feature - Xaa can be any naturally occurring amino acid
XVPCAPAPRCWRSWPRSWPRPRWPRPRPRTWCMWTRPARCGPCGASGGAQASAPRCHTARLTSTSSAGTSSSTSPMWAPSLTAASSRGSTGRGLSYNFTHLDGYLDLLRENQLLPGFELMGSASGHFTDFEDKQQVFEWKDLVSSLARRYIGRYGLAHVSKWNFETWNEPDHHDFDNVSMTMQGFLNYYDACSEGL

SEQ ID NO: 6721 - protein, 105 aa, Homo sapiens
MGFTGAGIAASSIAAKMMSAAAIANGGGVSAGSLVATLQSVGAAGLSTSSNILLASVGSVLGACLGNSPSSSLPAEPEAKEDEARENVPQGEPPKPPLKSEKHEE

SEQ ID NO: 6722 - protein, 130 aa, Homo sapiens
MMKRAAAAAVGGALAVGAVPVVLSAMGFTGAGIAASSIAAKMMSAAAIANGGGVSAGSLVATLQSVGAAGLSTSSNILLASVGSVLGACLGNSPSSSLPAEPEAKEDEARENVPQGEPPKPPLKSEKHEE

SEQ ID NO: 6723 - protein, 105 aa, Homo sapiens
MTLSPLLLFLPPLLLLLDVPTAAVQASPLQALDFFGNGPPVNYKTGNLYLRGPLKKSNAPLVNVTLYYEALCGGCRAFLIRELFPTWLLVMEILNVTLVPYGNAQ

SEQ ID NO: 6724 - protein, 250 aa, Homo sapiens
MTLSPLLLFLPPLLLLLDVPTAAVQASPLQALDFFGNGPPVNYKTGNLYLRGPLKKSNAPLVNVTLYYEALCGGCRAFLIRELFPTWLLVMEILNVTLVPYGNAQEQNVSGRWEFKCQHGEEECKFNKVEACVLDELDMELAFLTIVCMEEFEDMERSLPLCLQLYAPGLSPDTIMECAMGDRGMQLMHANAQRTDALQPPHEYVPWVTVNGKPLEDQTQLLTLVCQLYQGKKPDVCPSSTSSLRSVCFK

SEQ ID NO: 6725 - protein, 189 aa, Homo sapiens
MASPFALLMVLVVLSCKSSCSLGCDLPETHSLDNRRTLMLLAQMSRISPSSCLMDRHDFGFPQEEFDGNQFQKAPAISVLHELIQQIFNLFTTKDSSAAWDEDLLDKFCTELYQQLNDLEACVMQEERVGETPLMNADSILAVKKYFRRITLYLTEKKYSPCAWEVVRAEIMRSLSLSTNLQERLRRKE

SEQ ID NO: 6726 - protein, 189 aa, Homo sapiens
MALSFSLLMAVLVLSYKSICSLGCDLPQTHSLGNRRALILLGQMGRISPFSCLKDRHDFRIPQEEFDGNQFQKAQAISVLHEMIQQTFNLFSTEDSSAAWEQSLLEKFSTELYQQLNDLEACVIQEVGVEETPLMNEDSILAVRKYFQRITLYLIERKYSPCAWEVVRAEIMRSLSFSTNLQKRLRRKD

SEQ ID NO: 6727 - protein, 189 aa, Homo sapiens
MASPFALLMALVVLSCKSSCSLGCDLPETHSLDNRRTLMLLAQMSRISPSSCLMDRHDFGFPQEEFDGNQFQKAPAISVLHELIQQIFNLFTTKDSSAAWDEDLLDKFCTELYQQLNDLEACVMQEERVGETPLMNADSILAVKKYFRRITLYLTEKKYSPCAWEVVRAEIMRSLSLSTNLQERLRRKE

SEQ ID NO: 6728 - protein, 190 aa, Homo sapiens
MMASPFALLMALVVLSCKSSCSLGCDLPETHSLDNRRTLMLLAQMSRISPSSCLMDRHDFGFPQEEFDGNQFQKAPAISVLHELIQQIFNLFTTKDSSAAWDEDLLDKFCTELYQQLNDLEACVMQEERVGETPLMNADSILAVKKYFRRITLYLTEKKYSPCAWEVVRAEIMRSLSLSTNLQERLRRKE

SEQ ID NO: 6729 - protein, 189 aa, Homo sapiens
MALPFALMMALVVLSCKSSCSLGCNLSQTHSLNNRRTLMLMAQMRRISPFSCLKDRHDFEFPQEEFDGNQFQKAQAISVLHEMMQQTFNLFSTKNSSAAWDETLLEKFYIELFQQMNDLEACVIQEVGVEETPLMNEDSILAVKKYFQRITLYLMEKKYSPCAWEVVRAEIMRSLSFSTNLQKRLRRKD

SEQ ID NO: 6730 - protein, 189 aa, Homo sapiens
MALSFSLLMAVLVLSYKSICSLGCDLPQTHSLGNRRALILLAQMGRISHFSCLKDRYDFGFPQEVFDGNQFQKAQAISAFHEMIQQTFNLFSTKDSSAAWDETLLDKFYIELFQQLNDLEACVTQEVGVEEIALMNEDSILAVRKYFQRITLYLMGKKYSPCAWEVVRAEIMRSFSFSTNLQKGLRRKD

SEQ ID NO: 6731 - protein, 189 aa, Homo sapiens
MALSFSLLMAVLVLSYKSICSLGCDLPQTHSLGNRRALILLAQMGRISPFSCLKDRHDFGLPQEEFDGNQFQKTQAISVLHEMIQQTFNLFSTEDSSAAWEQSLLEKFSTELYQQLNNLEACVIQEVGMEETPLMNEDSILAVRKYFQRITLYLTEKKYSPCAWEVVRAEIMRSLSFSTNLQKILRRKD

SEQ ID NO: 6732 - protein, 188 aa, Homo sapiens
MALTFALLVALLVLSCKSSCSVGCDLPQTHSLGSRRTLMLLAQMRRISLFSCLKDRHDFGFPQEEFGNQFQKAETIPVLHEMIQQIFNLFSTKDSSAAWDETLLDKFYTELYQQLNDLEACVIQGVGVTETPLMKEDSILAVRKYFQRITLYLKEKKYSPCAWEVVRAEIMRSFSLSTNLQESLRSKE

SEQ ID NO: 6733 - protein, 189 aa, Homo sapiens
MALSFSLLMAVLVLSYKSICSLGCDLPQTHSLGNRRALILLAQMGRISPFSCLKDRHDFGFPQEEFDGNQFQKAQAISVLHEMIQQTFNLFSTKDSSATWEQSLLEKFSTELNQQLNDLEACVIQEVGVEETPLMNVDSILAVKKYFQRITLYLTEKKYSPCAWEVVRAEIMRSFSLSKIFQERLRRKE

SEQ ID NO: 6734 - protein, 189 aa, Homo sapiens
MALSFSLLMAVLVLSYKSICSLGCDLPQTHSLGNRRALILLAQMGRISHFSCLKDRHDFGFPEEEFDGHQFQKAQAISVLHEMIQQTFNLFSTEDSSAAWEQSLLEKFSTELYQQLNDLEACVIQEVGVEETPLMNEDSILAVRKYFQRITLYLTEKKYSPCAWEVVRAEIMRSLSFSTNLQKRLRRKD

SEQ ID NO: 6735 - protein, 189 aa, Homo sapiens
MALPFVLLMALVVLNCKSICSLGCDLPQTHSLSNRRTLMIMAQMGRISPFSCLKDRHDFGFPQEEFDGNQFQKAQAISVLHEMIQQTFNLFSTKDSSATWDETLLDKFYTELYQQLNDLEACMMQEVGVEDTPLMNVDSILTVRKYFQRITLYLTEKKYSPCAWEVVRAEIMRSFSLSANLQERLRRKE

SEQ ID NO: 6736 - protein, 189 aa, Homo sapiens
MALPFALLMALVVLSCKSSCSLDCDLPQTHSLGHRRTMMLLAQMRRISLFSCLKDRHDFRFPQEEFDGNQFQKAEAISVLHEVIQQTFNLFSTKDSSVAWDERLLDKLYTELYQQLNDLEACVMQEVWVGGTPLMNEDSILAVRKYFQRITLYLTEKKYSPCAWEVVRAEIMRSFSSSRNLQERLRRKE

SEQ ID NO: 6737 - protein, 190 aa, Homo sapiens
TMALPFALLMALVVLSCKSSCSLDCDLPQTHSLGHRRTMMLLAQMRRISLFSCLKDRHDFRFPQEEFDGNQFQKAEAISVLHEVIQQTFNLFSTKDSSVAWDERLLDKLYTELYQQLNDLEACVMQEVWVGGTPLMNEDSILAVRKYFQRITLYLTEKKYSPCAWEVVRAEIMRSFSSSRNLQERLRRKE

SEQ ID NO: 6738 - protein, 189 aa, Homo sapiens
MARSFSLLMVVLVLSYKSICSLGCDLPQTHSLRNRRALILLAQMGRISPFSCLKDRHEFRFPEEEFDGHQFQKTQAISVLHEMIQQTFNLFSTEDSSAAWEQSLLEKFSTELYQQLNDLEACVIQEVGVEETPLMNEDFILAVRKYFQRITLYLMEKKYSPCAWEVVRAEIMRSFSFSTNLKKGLRRKD

SEQ ID NO: 6739 - protein, 189 aa, Homo sapiens
MALTFYLLVALVVLSYKSFSSLGCDLPQTHSLGNRRALILLAQMRRISPFSCLKDRHDFEFPQEEFDDKQFQKAQAISVLHEMIQQTFNLFSTKDSSAALDETLLDEFYIELDQQLNDLESCVMQEVGVIESPLMYEDSILAVRKYFQRITLYLTEKKYSSCAWEVVRAEIMRSFSLSINLQKRLKSKE

SEQ ID NO: 6740 - protein, 557 aa, Homo sapiens
MMVVLLGATTLVLVAVAPWVLSAAAGGKNLKSPQKVEVDIIDDNFILRWNRSDESVGNVTFSFDYQKTGMDNWIKLSGCQNITSTKCNFSSLKLNVYEEIKLRIRAEKENTSSWYEVDSFTPFRKAQIGPPEVHLEAEDKAIVIHISPGTKDSVMWALDGLSFTYSLVIWKNSSGVEERIENIYSRHKIYKLSPETTYCLKVKAALLTSWKIGVYSPVHCIKTTVENELPPPENIEVSVQNQNYVLKWDYTYANMTFQVQWLHAFLKRNPGNHLYKWKQIPDCENVKTTQCVFPQNVFQKGIYLLRVQASDGNNTSFWSEEIKFDTEIQAFLLPPVFNIRSLSDSFHIYIGAPKQSGNTPVIQDYPLIYEIIFWENTSNAERKIIEKKTDVTVPNLKPLTVYCVKARAHTMDEKLNKSSVFSDAVCEKTKPGNTSKIWLIVGICIALFALPFVIYAAKVFLRCINYVFFPSLKPSSSIDEYFSEQPLKNLLLSTSEEQIEKCFIIENISTIATVEETNQTDEDHKKYSSQTSQDSGNYSNEDESESKTSEELQQDFV

SEQ ID NO: 6741 - protein, 136 aa, Homo sapiens
MMVVLLGATTLVLVAVAPWVLSAAAGGKNLKSPQKVEVDIIDDNFILRWNRSDESVGNVTFSFDYQKTGMDNWIKLSGCQNITSTKCNFSSLKLNVYEEIKLRIRAEKENTSSWYEVDSFTPFRKVENELPPPENI

SEQ ID NO: 6742 - protein, 187 aa, Homo sapiens
MTNKCLLQIALLLCFSTTALSMSYNLLGFLQRSSNFQCQKLLWQLNGRLEYCLKDRMNFDIPEEIKQLQQFQKEDAALTIYEMLQNIFAIFRQDSSSTGWNETIVENLLANVYHQINHLKTVLEEKLEKEDFTRGKLMSSLHLKRYYGRILHYLKAKEYSHCAWTIVRVEILRNFYFINRLTGYLRN

SEQ ID NO: 6743 - protein, 208 aa, Homo sapiens
MIIKHFFGTVLVLLASTTIFSLDLKLIIFQQRQVNQESLKLLNKLQTLSIQQCLPHRKNFLLPQKSLSPQQYQKGHTLAILHEMLQQIFSLFRANISLDGWEENHTEKFLIQLHQQLEYLEALMGLEAEKLSGTLGSDNLRLQVKMYFRRIHDYLENQDYSTCAWAIVQVEISRCLFFVFSLTEKLSKQGRPLNDMKQELTTEFRSPR

SEQ ID NO: 6744 - protein, 166 aa, Homo sapiens
MKYTSYILAFQLCIVLGSLGCYCQDPYVKEAENLKKYFNAGHSDVADNGTLFLGILKNWKEESDRKIMQSQIVSFYFKLFKNFKDDQSIQKSVETIKEDMNVKFFNSNKKKRDDFEKLTNYSVTDLNVQRKAIHELIQVMAELSPAAKTGKRKRSQMLFRGRRASQ

SEQ ID NO: 6745 - protein, 30 aa, Homo sapiens
LLPLVMQGVSRAEMGTADLGPSSVLSTDVF

SEQ ID NO: 6746 - protein, 210 aa, Homo sapiens
MALLFLLPLVMQGVSRAEMGTADLGPSSVPTPTNVTIESYNMNPIVYWEYQIMPQVPVFTVEVKNYGVKARVGQKESAYAKSEEFAVCRDGKIGPPKLDIRKEEKQIMIDIFHPSVFVNGDEQEVDYDPETTCYIRVYNVYVRMNGSEIQYKILTQKEDDCDEIQCQLAIPVSSLNSQYCVSAEGVLHVWGVTTEKSKEVCITIFNSSIK

SEQ ID NO: 6747 - protein, 489 aa, Homo sapiens
MALLFLLPLVMQGVSRAEMGTADLGPSSVPTPTNVTIESYNMNPIVYWEYQIMPQVPVFTVEVKNYGVKNSEWIDACINISHHYCNISDHVGDPSNSLWVRVKARVGQKESAYAKSEEFAVCRDGKIGPPKLDIRKEEKQIMIDIFHPSVFVNGDEQEVDYDPETTCYIRVYNVYVRMNGSEIQYKILTQKEDDCDEIQCQLAIPVSSLNSQYCVSAEGVLHVWGVTTEKSKEVCITIFNSSIKGSLWIPVVAALLLFLVLSLVFICFYIKKINPLKEKSIILPKSLISVVRSATLETKPESKYVSLITSYQPFSLEKEVVCEEPLSPATVPGMHTEDNPGKVEHTEELSSITEVVTTEENIPDVVPGSHLTPIERESSSPLSSNQSEPGSIALNSYHSRNCSESDHSRNGFDTDSSCLESHSSLSDSEFPPNNKGEIKTEGQELITVIKAPTSFGYDKPHVLVDLLVDDSGKESLIGYRPTEDSKEFS

SEQ ID NO: 6748 - protein, 470 aa, Homo sapiens
MCGSIVQSLVPTPTNVTIESYNMNPIVYWEYQIMPQVPVFTVEVKNYGVKNSEWIDACINISHHYCNISDHVGDPSNSLWVRVKARVGQKESAYAKSEEFAVCRDGKIGPPKLDIRKEEKQIMIDIFHPSVFVNGDEQEVDYDPETTCYIRVYNVYVRMNGSEIQYKILTQKEDDCDEIQCQLAIPVSSLNSQYCVSAEGVLHVWGVTTEKSKEVCITIFNSSIKGSLWIPVVAALLLFLVLSLVFICFYIKKINPLKEKSIILPKSLISVVRSATLETKPESKYVSLITSYQPFSLEKEVVCEEPLSPATVPGMHTEDNPGKVEHTEELSSITEVVTTEENIPDVVPGSHLTPIERESSSPLSSNQSEPGSIALNSYHSRNCSESDHSRNGFDTDSSCLESHSSLSDSEFPPNNKGEIKTEGQELITVIKAPTSFGYDKPHVLVDLLVDDSGKESLIGYRPTEDSKEFS

SEQ ID NO: 6749 - protein, 161 aa, Homo sapiens
MLLKSPENSLLQFQFKYGVPTPTNVTIESYNMNPIVYWEYQIMPQVPVFTVEVKNYGVKNSEWIDACINISHHYCNISDHVGDPSNSLWVRVKARVGQKESAYAKSEEFAVCRDGKIGPPKLDIRKEEKQIMIDIFHPSVFVNGDEQEVDYDPETTCYIRV

SEQ ID NO: 6750 - protein, 479 aa, Homo sapiens
MLLKSPENSLLQFQFKYGVPTPTNVTIESYNMNPIVYWEYQIMPQVPVFTVEVKNYGVKNSEWIDACINISHHYCNISDHVGDPSNSLWVRVKARVGQKESAYAKSEEFAVCRDGKIGPPKLDIRKEEKQIMIDIFHPSVFVNGDEQEVDYDPETTCYIRVYNVYVRMNGSEIQYKILTQKEDDCDEIQCQLAIPVSSLNSQYCVSAEGVLHVWGVTTEKSKEVCITIFNSSIKGSLWIPVVAALLLFLVLSLVFICFYIKKINPLKEKSIILPKSLISVVRSATLETKPESKYVSLITSYQPFSLEKEVVCEEPLSPATVPGMHTEDNPGKVEHTEELSSITEVVTTEENIPDVVPGSHLTPIERESSSPLSSNQSEPGSIALNSYHSRNCSESDHSRNGFDTDSSCLESHSSLSDSEFPPNNKGEIKTEGQELITVIKAPTSFGYDKPHVLVDLLVDDSGKESLIGYRPTEDSKEFS

SEQ ID NO: 6751 - protein, 479 aa, Homo sapiens; identical to SEQ ID NO: 6750

SEQ ID NO: 6752 - protein, 448 aa, Homo sapiens
MNPIVYWEYQIMPQVPVFTVEVKNYGVKNSEWIDACINISHHYCNISDHVGDPSNSLWVRVKARVGQKESAYAKSEEFAVCRDGKIGPPKLDIRKEEKQIMIDIFHPSVFVNGDEQEVDYDPETTCYIRVYNVYVRMNGSEIQYKILTQKEDDCDEIQCQLAIPVSSLNSQYCVSAEGVLHVWGVTTEKSKEVCITIFNSSIKGSLWIPVVAALLLFLVLSLVFICFYIKKINPLKEKSIILPKSLISVVRSATLETKPESKYVSLITSYQPFSLEKEVVCEEPLSPATVPGMHTEDNPGKVEHTEELSSITEVVTTEENIPDVVPGSHLTPIERESSSPLSSNQSEPGSIALNSYHSRNCSESDHSRNGFDTDSSCLESHSSLSDSEFPPNNKGEIKTEGQELITVIKAPTSFGYDKPHVLVDLLVDDSGKESLIGYRPTEDSKEFS

SEQ ID NO: 6753 - protein, 448 aa, Homo sapiens; identical to SEQ ID NO: 6752

SEQ ID NO: 6754 - protein, 448 aa, Homo sapiens; identical to SEQ ID NO: 6752

SEQ ID NO: 6755 - protein, 27 aa, Homo sapiens
  SITE 1: note = misc_feature - Xaa can be any naturally occurring amino acid
XLLPLVMQGVSRAEMGTADLGPSSDVF

SEQ ID NO: 6756 - protein, 200 aa, Homo sapiens
MAAAWTVVLVTLVLGLAVAGPVPTSKPTTTGKGCHIGRFKSLSPQELASFKKARDALEESLKLKNWSCSSPVFPGNWDLRLLQVRERPVALEAELALTLKVLEAAAGPALEDVLDQPLHTLHHILSQLQACIQPQPTAGPRPRGRLHHWLHRLQEAPKKESAGCLEASVTFNLFRLLTRDLKYVADGNLCLRTSTHPEST

SEQ ID NO: 6757 - protein, 200 aa, Homo sapiens
MKLDMTGDCTPVLVLMAAVLTVTGAVPVARLHGALPDARGCHIAQFKSLSPQELQAFKRAKDALEESLLLKDCRCHSRLFPRTWDLRQLQVRERPMALEAELALTLKVLEATADTDPALVDVLDQPLHTLHHILSQFRACIQPQPTAGPRTRGRLHHWLYRLQEAPKKESPGCLEASVTFNLFRLLTRDLNCVASGDLCV

SEQ ID NO: 6758 - protein, 200 aa, Homo sapiens
MKLDMTGDCMPVLVLMAAVLTVTGAVPVARLRGALPDARGCHIAQFKSLSPQELQAFKRAKDALEESLLLKDCKCRSRLFPRTWDLRQLQVRERPVALEAELALTLKVLEATADTDPALGDVLDQPLHTLHHILSQLRACIQPQPTAGPRTRGRLHHWLHRLQEAPKKESPGCLEASVTFNLFRLLTRDLNCVASGDLCV

SEQ ID NO: 6759 - protein, 196 aa, Homo sapiens
MTGDCMPVLVLMAAVLTVTGAVPVARLRGALPDARGCHIAQFKSLSPQELQAFKRAKDALEESLLLKDCKCRSRLFPRTWDLRQLQVRERPVALEAELALTLKVLEATADTDPALGDVLDQPLHTLHHILSQLRACIQPQPTAGPRTRGRLHHWLHRLQEAPKKESPGCLEASVTFNLFRLLTRDLNCVASGDLCV

SEQ ID NO: 6760 - protein, 520 aa, Homo sapiens
MAGPERWGPLLLCLLQAAPGRPRLAPPQNVTLLSQNFSVYLTWLPGLGNPQDVTYFVAYQSSPTRRRWREVEECAGTKELLCSMMCLKKQDLYNKFKGRVRTVSPSSKSPWVESEYLDYLFEVEPAPPVLVLTQTEEILSANATYQLPPCMPPLDLKYEVAFWKEGAGNKTLFPVTPHGQPVQITLQPAASEHHCLSARTIYTFSVPKYSKFSKPTCFLLEVPEANWAFLVLPSLLILLLVIAAGGVIWKTLMGNPWFQRAKMPRALDFSGHTHPVATFQPSRPESVNDLFLCPQKELTRGVRPTPRVRAPATQQTRWKKDLAEDEEEEDEEDTEDGVSFQPYIEPPSFLGQEHQAPGHSEAGGVDSGRPRAPLVPSEGSSAWDSSDRSWASTVDSSWDRAGSSGYLAEKGPGQGPGGDGHQESLPPPEFSKDSGFLEELPEDNLSSWATWGTLPPEPNLVPGGPPVSLQTLTFCWESSPEEEEEARESEIEDSDAGSWGAESTQRTEDRGRTLGHYMAR

SEQ ID NO: 6761 - protein, 491 aa, Homo sapiens
MAGPERWGPLLLCLLQAAPGRPRLAPPQNVTLLSQNFSVYLTWLPGLGNPQDVTYFVAYQSSPTRRRWREVEECAGTKELLCSMMCLKKQDLYNKFKGRVRTVSPSSKSPWVESEYLDYLFEVEPAPPVLVLTQTEEILSANATYQLPPCMPPLDLKYEVAFWKEGAGNKTLFPVTPHGQPVQITLQPAASEHHCLSARTIYTFSVPKYSKFSKPTCFLLEVPEANWAFLVLPSLLILLLVIAAGGVIWKTLMGNPWFQRAKMPRALELTRGVRPTPRVRAPATQQTRWKKDLAEDEEEEDEEDTEDGVSFQPYIEPPSFLGQEHQAPGHSEAGGVDSGRPRAPLVPSEGSSAWDSSDRSWASTVDSSWDRAGSSGYLAEKGPGQGPGGDGHQESLPPPEFSKDSGFLEELPEDNLSSWATWGTLPPEPNLVPGGPPVSLQTLTFCWESSPEEEEEARESEIEDSDAGSWGAESTQRTEDRGRTLGHYMAR

SEQ ID NO: 6762 - protein, 244 aa, Homo sapiens
MAGPERWGPLLLCLLQAAPGRPRLAPPQNVTLLSQNFSVYLTWLPGLGNPQDVTYFVAYQSSPTRRRWREVEECAGTKELLCSMMCLKKQDLYNKFKGRVRTVSPSSKSPWVESEYLDYLFEVEPAPPVLVLTQTEEILSANATYQLPPCMPPLDLKYEVAFWKEGAGNKTLFPVTPHGQPVQITLQPAASEHHCLSARTIYTFSVPKYSKFSKPTCFLLEVPGLFWTHTPCGNLSAQQTRVRE

SEQ ID NO: 6763 - protein, 211 aa, Homo sapiens
MAGPERWGPLLLCLLQAAPGRPRLAPPQNVTLLSQNFSVYLTWLPGLGNPQDVTYFVAYQSSPTRRRWREVEECAGTKELLCSMMCLKKQDLYNKFKGRVRTVSPSSKSPWVESEYLDYLFEVEPAPPVLVLTQTEEILSANATYQLPPCMPPLDLKYEVAFWKEGAGNKVGSSFPAPRLGPLLHPFLLRFFSPSQPAPAPLLQEVFPVHS

SEQ ID NO: 6764 - protein, 185 aa, Homo sapiens
MMCLKKQDLYNKFKGRVRTVSPSSKSPWVESEYLDYLFEVEPAPPVLVLTQTEEILSANATYQLPPCMPPLDLKYEVAFWKEGAGNKTLFPVTPHGQPVQITLQPAASEHHCLSARTIYTFSVPKYSKFSKPTCFLLEVPEANWAFLVLPSLLILLLVIAAGGVIWKTLMGNPWFQRAKMPRALV

SEQ ID NO: 6765 - protein, 195 aa, Homo sapiens
MALLFPLLAALVMTSYSPVGSLGCDLPQNHGLLSRNTLVLLHQMRRISPFLCLKDRRDFRFPQEMVKGSQLQKAHVMSVLHEMLQQIFSLFHTERSSAAWNMTLLDQLHTGLHQQLQHLETCLLQVVGEGESAGAISSPALTLRRYFQGIRVYLKEKKYSDCAWEVVRMEIMKSLFLSTNMQERLRSKDRDLGSS

SEQ ID NO: 6766 - protein, 153 aa, Homo sapiens
MGKISSLPTQLFKCCFCDFLKVKMHTMSSSHLFYLALCLLTFTSSATAGPETLCGAELVDALQFVCGDRGFYFNKPTGYGSSSRRAPQTGIVDECCFRSCDLRRLEMYCAPLKPAKSARSVRAQRHTDMPKTQKEVHLKNASRGSAGNKNYRM

SEQ ID NO: 6767 - protein, 153 aa, Homo sapiens; identical to SEQ ID NO: 6766

SEQ ID NO: 6768 - protein, 158 aa, Homo sapiens
MGKISSLPTQLFKCCFCDFLKVKMHTMSSSHLFYLALCLLTFTSSATAGPETLCGAELVDALQFVCGDRGFYFNKPTGYGSSSRRAPQTGIVDECCFRSCDLRRLEMYCAPLKPAKSARSVRAQRHTDMPKTQKYQPPSTNKNTKSQRRKGSTFEERK

SEQ ID NO: 6769 - protein, 158 aa, Homo sapiens; identical to SEQ ID NO: 6768

SEQ ID NO: 6770 - protein, 195 aa, Homo sapiens
MGKISSLPTQLFKCCFCDFLKVKMHTMSSSHLFYLALCLLTFTSSATAGPETLCGAELVDALQFVCGDRGFYFNKPTGYGSSSRRAPQTGIVDECCFRSCDLRRLEMYCAPLKPAKSARSVRAQRHTDMPKTQKYQPPSTNKNTKSQRRKGWPKTHPGGEQKEGTEASLQIRGKKKEQRREIGSRNAECRGKKGK

SEQ ID NO: 6771 - protein, 137 aa, Homo sapiens
MITPTVKMHTMSSSHLFYLALCLLTFTSSATAGPETLCGAELVDALQFVCGDRGFYFNKPTGYGSSSRRAPQTGIVDECCFRSCDLRRLEMYCAPLKPAKSARSVRAQRHTDMPKTQKEVHLKNASRGSAGNKNYRM

SEQ ID NO: 6772 - protein, 183 aa, Homo sapiens
MGIPMGKSMLVLLTFLAFASCCIAAYRPSETLCGGELVDTLQFVCGDRGFYFRLPGRPASRVSRRSRGIVEECCFRSCDLALLETYCATPAKSERDVSTPPTVLPDNFPRYPVGKFFQYDTWKQSTQRLRRGLPALLRARRGHVLAKELEAFREAKRHRPLIALPTQDPAHGGAPPEMASNRK

SEQ ID NO: 6773 - protein, 183 aa, Homo sapiens; identical to SEQ ID NO: 6772

SEQ ID NO: 6774 - protein, 180 aa, Homo sapiens
MGIPMGKSMLVLLTFLAFASCCIAAYRPSETLCGGELVDTLQFVCGDRGFYFSRPASRVSRRSRGIVEECCFRSCDLALLETYCATPAKSERDVSTPPTVLPDNFPRYPVGKFFQYDTWKQSTQRLRRGLPALLRARRGHVLAKELEAFREAKRHRPLIALPTQDPAHGGAPPEMASNRK

SEQ ID NO: 6775 - protein, 180 aa, Homo sapiens; identical to SEQ ID NO: 6774

SEQ ID NO: 6776 - protein, 180 aa, Homo sapiens; identical to SEQ ID NO: 6774

SEQ ID NO: 6777 - protein, 180 aa, Homo sapiens; identical to SEQ ID NO: 6774

SEQ ID NO: 6778 - protein, 180 aa, Homo sapiens; identical to SEQ ID NO: 6774

SEQ ID NO: 6779 - protein, 236 aa, Homo sapiens
MVSPDPQIIVVAPETELASMQVQRTEDGVTIIQIFWVGRKGELLRRTPVSSAMQTPMGIPMGKSMLVLLTFLAFASCCIAAYRPSETLCGGELVDTLQFVCGDRGFYFSRPASRVSRRSRGIVEECCFRSCDLALLETYCATPAKSERDVSTPPTVLPDNFPRYPVGKFFQYDTWKQSTQRLRRGLPALLRARRGHVLAKELEAFREAKRHRPLIALPTQDPAHGGAPPEMASNRK

SEQ ID NO: 6780 - protein, 643 aa, Homo sapiens
MALRKAGDLEPQFTPERRFRLCWYQAHSGRALLGPPPQASPPAGGLALALLLLSWVALGPRSLEGADPGTPGEAEGPACPAACVCSYDDDADELSVFCSSRNLTRLPDGVPGGTQALWLDGNNLSSVPPAAFQNLSSLGFLNLQGGQLGSLEPQALLGLENLCHLHLERNQLRSLALGTFAHTPALASLGLSNNRLSRLEDGLFEGLGSLWDLNLGWNSLAVLPDAAFRGLGSLRELVLAGNRLAYLQPALFSGLAELRELDLSRNALRAIKANVFVQLPRLQKLYLDRNLIAAVAPGAFLGLKALRWLDLSHNRVAGLLEDTFPGLLGLRVLRLSHNAIASLRPRTFKDLHFLEELQLGHNRIRQLAERSFEGLGQLEVLTLDHNQLQEVKAGAFLGLTNVAVMNLSGNCLRNLPEQVFRGLGKLHSLHLEGSCLGRIRPHTFTGLSGLRRLFLKDNGLVGIEEQSLWGLAELLELDLTSNQLTHLPHRLFQGLGKLEYLLLSRNRLAELPADALGPLQRAFWLDVSHNRLEALPNSLLAPLGRLRYLSLRNNSLRTFTPQPPGLERLWLEGNPWDCGCPLKALRDFALQNPSAVPRFVQAICEGDDCQPPAYTYNNITCASPPEVVGLDLRDLSEAHFAPC

SEQ ID NO: 6781 - protein, 605 aa, Homo sapiens
MALRKGGLALALLLLSWVALGPRSLEGADPGTPGEAEGPACPAACVCSYDDDADELSVFCSSRNLTRLPDGVPGGTQALWLDGNNLSSVPPAAFQNLSSLGFLNLQGGQLGSLEPQALLGLENLCHLHLERNQLRSLALGTFAHTPALASLGLSNNRLSRLEDGLFEGLGSLWDLNLGWNSLAVLPDAAFRGLGSLRELVLAGNRLAYLQPALFSGLAELRELDLSRNALRAIKANVFVQLPRLQKLYLDRNLIAAVAPGAFLGLKALRWLDLSHNRVAGLLEDTFPGLLGLRVLRLSHNAIASLRPRTFKDLHFLEELQLGHNRIRQLAERSFEGLGQLEVLTLDHNQLQEVKAGAFLGLTNVAVMNLSGNCLRNLPEQVFRGLGKLHSLHLEGSCLGRIRPHTFTGLSGLRRLFLKDNGLVGIEEQSLWGLAELLELDLTSNQLTHLPHRLFQGLGKLEYLLLSRNRLAELPADALGPLQRAFWLDVSHNRLEALPNSLLAPLGRLRYLSLRNNSLRTFTPQPPGLERLWLEGNPWDCGCPLKALRDFALQNPSAVPRFVQAICEGDDCQPPAYTYNNITCASPPEVVGLDLRDLSEAHFAPC

SEQ ID NO: 6782 - protein, 131 aa, Homo sapiens
MTVGRRLPTALHGACQEAWPWRCCCCPGWHWAPAAWREQTPERRGKPRAQRARPPVSAATMTTRMSSASSAAPGTSRACLMESRAAPKPCGWTATTSRPSPRQPSRTSPAWASSTCRAASWAAWSHRRCWA

SEQ ID NO: 6783 - protein, 216 aa, Homo sapiens
MSEVPVARVWLVLLLLTVQVGVTAGAPWQCAPCSAEKLALCPPVSASCSEVTRSAGCGCCPMCALPLGAACGVATARCARGLSCRALPGEQQPLHALTRGQGACVQESDASAPHAAEAGSPESPESTEITEEELLDNFHLMAPSEEDHSILWDAISTYDGSKALHVTNIKKWKCETSMDGEAGLCWCVYPWNGKRIPGSPEIRGDPNCQIYFNVQN

SEQ ID NO: 6784 - protein, 259 aa, Homo sapiens
MSEVPVARVWLVLLLLTVQVGVTAGAPWQCAPCSAEKLALCPPVSASCSEVTRSAGCGCCPMCALPLGAACGVATARCARGLSCRALPGEQQPLHALTRGQGACVQESDASAPHAAEAGSPESPESTEITEEELLDNFHLMAPSEEDHSILWDAISTYDGSKALHVTNIKKWKEPCRIELYRVVESLAKAQETSGEEISKFYLPNCNKNGFYHSRQCETSMDGEAGLCWCVYPWNGKRIPGSPEIRGDPNCQIYFNVQN

SEQ ID NO: 6785 - protein, 257 aa, Homo sapiens
MSEVPVARVWLVLLLLTVQVGVTAGAPWQCAPCSAEKLALCPPVSASCSEVTRSAGCGCCPMCALPLGAACGVATARCARGLSCRALPGEQQPLHALTRGQGACVQESDASAPHAAEAGSPESPESTEITEEELLDNFHLMAPSEEDHSILWDAISTYDGSKALHVTNIKKWKEPCRIELYRVVESLAKAQETSGEEISKFYLPNCNKNGFYHSRQTSMDGEAGLCWCVYPWNGKRIPGSPEIRGDPNCQIYFNVQN

SEQ ID NO: 6786 - protein, 98 aa, Homo sapiens
KHHLGLEEPKKLRPPPARQLLAELASGACFVGLLSSLRASPAVCACRLPANRNWTRSWSGSPPCAFRMSGALWSTSTPCTSPTVTSMACTTSNSARCL

SEQ ID NO: 6787 - protein, 325 aa, Homo sapiens
MLPRVGCPALPLPPPPLLPLLLLLLGASGGGGGARAEVLFRCPPCTPERLAACGPPPVAPPAAVAAVAGGARMPCAELVREPGCGCCSVCARLEGEACGVYTPRCGQGLRCYPHPGSELPLQALVMGEGTCEKRRDAEYGASPEQVADNGDDHSEGGLVENHVDSTMNMLGGGGSAGRKPLKSGMKELAVFREKVTEQHRQMGKGGKHHLGLEEPKKLRPPPARTPCQQELDQVLERISTMRLPDERGPLEHLYSLHIPNCDKHGLYNLKQCKMSLNGQRGECWCVNPNTGKLIQGAPTIRGDPECHLFYNEQQEARGVHTQRMQ

SEQ ID NO: 6788 - protein, 78 aa, Homo sapiens
MNMLGGGGSAGRKPLKSGMKELAVFREKVTEQHRQMGKGGKHHLGLEEPKKLRPPPARTPCQQELDQVLERISTMRLP

SEQ ID NO: 6789 - protein, 181 aa, Homo sapiens
MPCNNGDDHSEGGLVENHVDSTMNMLGGGGSAGRKPLKSGMKELAVFREKVTEQHRQMGKGGKHHLGLEEPKKLRPPPARTPCQQELDQVLERISTMRLPDERGPLEHLYSLHIPNCDKHGLYNLKQCKMSLNGQRGECWCVNPNTGKLIQGAPTIRGDPECHLFYNEQQEARGVHTQRMQ

SEQ ID NO: 6790 - protein, 194 aa, Homo sapiens
MQRARPLQALLDGRGLCVNASAVSRLRAYLLPAPPAPGNASESEEDRSAGSVESPSVSSTHRVSDPKFHPLHSKIIIIKKGHAKDSQRYKVDYESQSTDTQNFSSESKRETEYGPCRREMEDTLNHLKFLNVLSPRGVHIPNCDKKGFYKKKQCRPSKGRKRGFCWCVDKYGQPLPGYTTKGKEDVHCYSMQSK

SEQ ID NO: 6791 - protein, 297 aa, Homo sapiens
MQRARPTLWAAALTLLVLLRGPPVARAGASSAGLGPVVRCEPCDARALAQCAPPPAVCAELVREPGCGCCLTCALSEGQPCGIYTERCGSGLRCQPSPDEARPLQALLDGRGLCVNASAVSRLRAYLLPAPPAPGEPPAPGNASESEEDRSAGSVESPSVSSTHRVSDPKFHPLHSKIIIIKKGHAKDSQRYKVDYESQSTDTQNFSSESKRETEYGPCRREMEDTLNHLKFLNVLSPRGVHIPNCDKKGFYKKKQCRPSKGRKRGFCWCVDKYGQPLPGYTTKGKEDVHCYSMQSK

SEQ ID NO: 6792 - protein, 291 aa, Homo sapiens
MQRARPTLWAAALTLLVLLRGPPVARAGASSAGLGPVVRCEPCDARALAQCAPPPAVCAELVREPGCGCCLTCALSEGQPCGIYTERCGSGLRCQPSPDEARPLQALLDGRGLCVNASAVSRLRAYLLPAPPAPGNASESEEDRSAGSVESPSVSSTHRVSDPKFHPLHSKIIIIKKGHAKDSQRYKVDYESQSTDTQNFSSESKRETEYGPCRREMEDTLNHLKFLNVLSPRGVHIPNCDKKGFYKKKQCRPSKGRKRGFCWCVDKYGQPLPGYTTKGKEDVHCYSMQSK

SEQ ID NO: 6793 - protein, 270 aa, Homo sapiens
MQRARPTLWAAALTLLVRCEPCDARALAQCAPPPAVCAELVREPGCGCCLTCALSEGQPCGIYTERCGSGLRCQPSPDEARPLQALLDGRGLCVNASAVSRLRAYLLPAPPAPGNASESEEDRSAGSVESPSVSSTHRVSDPKFHPLHSKIIIIKKGHAKDSQRYKVDYESQSTDTQNFSSESKRETEYGPCRREMEDTLNHLKFLNVLSPRGVHIPNCDKKGFYKKKQCRPSKGRKRGFCWCVDKYGQPLPGYTTKGKEDVHCYSMQSK

SEQ ID NO: 6794 - protein, 263 aa, Homo sapiens
MQRARPTLWAACEPCDARALAQCAPPPAVCAELVREPGCGCCLTCALSEGQPCGIYTERCGSGLRCQPSPDEARPLQALLDGRGLCVNASAVSRLRAYLLPAPPAPGNASESEEDRSAGSVESPSVSSTHRVSDPKFHPLHSKIIIIKKGHAKDSQRYKVDYESQSTDTQNFSSESKRETEYGPCRREMEDTLNHLKFLNVLSPRGVHIPNCDKKGFYKKKQCRPSKGRKRGFCWCVDKYGQPLPGYTTKGKEDVHCYSMQSK

SEQ ID NO: 6795 - protein, 132 aa, Homo sapiens
MRSAVCQFPRHRLAAGRPHPESGRGNASESEEDRSAGSVESPSVSSTHRVSDPKFHPLHSKIIIIKKGHAKDSQRYKVDYESQSTDTQNFSSESKRETEYGPCRREMEDTLNHLKFLNVLSPRGVHIPNCDK

SEQ ID NO: 6796 - protein, 143 aa, Homo sapiens
  SITE 1: note = misc_feature - Xaa can be any naturally occurring amino acid
XESPSVSSTHRVSDPKFHPLHSKIIIIKKGHAKDSQRYKVDYESQSTDTQNFSSESKRETEYGPCRREMEDTLNHLKFLNVLSPRGVHIPNCDKKGFYKKKQCRPSKGRKRGFCWCVDKYGQPLPGYTTKGKEDVHCYSMQSK

SEQ ID NO: 6797 - protein, 153 aa, Homo sapiens
  SITE 1: note = misc_feature - Xaa can be any naturally occurring amino acid
XSEEDRSAGSVESPSVSSTHRVSDPKFHPLHSKIIIIKKGHAKDSQRYKVDYESQSTDTQNFSSESKRETEYGPCRREMEDTLNHLKFLNVLSPRGVHIPNCDKKGFYKKKQCRPSKGRKRGFCWCVDKYGQPLPGYTTKGKEDVHCYSMQSK

SEQ ID NO: 6798 - protein, 258 aa, Homo sapiens
MLPLCLVAALLLAAGPGPSLGDEAIHCPPCSEEKLARCRPPVGCEELVREPGCGCCATCALGLGMPCGVYTPRCGSGLRCYPPRGVEKPLHTLMHGQGVCMELAEIEAIQESLQPSDKDEGDHPNNSFSPCSAHDRRCLQKHFAKIRDRSTSGGKMKVNGAPREDARPVPQGSCQSELHRALERLAASQSRTHEDLYIIPIPNCDRNGNFHPKQCHPALDGQRGKCWCVDRKTGVKLPGGLEPKGELDCHQLADSFRE

SEQ ID NO: 6799 - protein, 272 aa, Homo sapiens
MVLLTAVLLLLAAYAGPAQSLGSFVHCEPCDEKALSMCPPSPLGCELVKEPGCGCCMTCALAEGQSCGVYTERCAQGLRCLPRQDEEKPLHALLHGRGVCLNEKSYREQVKIERDSREHEEPTTSEMAEETYSPKIFRPKHTRISELKAEAVKKDRRKKLTQSKFVGGAENTAHPRIISAPEMRQESEQGPCRRHMEASLQELKASPRMVPRAVYLPNCDRKGFYKRKQCKPSRGRKRGICWCVDKYGMKLPGMEYVDGDFQCHTFDSSNVE

SEQ ID NO: 6800 - protein, 233 aa, Homo sapiens
MVLLTAVLLLLAAYAGPAQSLGSFVHCEPCDEKALSMCPPSPLGCELVKEPGCGCCMTCALAEGQSCGVYTERCAQGLRCLPRQDEEKPLHALLHGRGVCLNEKSYREQVKIGCAPGGQRHICFSLYYSPHPKLPSPGLWPCAPWPTGADPPAPSPAERDSREHEEPTTSEMAEETYSPKIFRPKHTRISELKAEAVKKDRRKKLTQSKFVGGAENTAHPRIISAPEMRQESE

SEQ ID NO: 6801 - protein, 238 aa, Homo sapiens
MTPHRLLPPLLLLLALLLAASPGGALARCPGCGQGVQAGCPGGCVEEEDGGSPAEGCAEAEGCLRREGQECGVYTPNCAPGLQCHPPKDDEAPLRALLLGRGRCLPARAPAEENPKESKPQAGTARPQDVNRRDQQRNPGTSTTPSQPNSAGVQDTEMGPCRRHLDSVLQQLQTEVYRGAQTLYVPNCDHRGFYRKRQCRSSQGQRRGPCWCVDRMGKSLPGSPDGNGSSSCPTGSSG

SEQ ID NO: 6802 - protein, 240 aa, Homo sapiens
MTPHRLLPPLLLLLALLLAASPGGALARCPGCGQGVQAGCPGGCVEEEDGGSPAEGCAEAEGCLRREGQECGVYTPNCAPGLQCHPPKDDEAPLRALLLGRGRCLPARAPAVAEENPKESKPQAGTARPQDVNRRDQQRNPGTSTTPSQPNSAGVQDTEMGPCRRHLDSVLQQLQTEVYRGAQTLYVPNCDHRGFYRKRQCRSSQGQRRGPCWCVDRMGKSLPGSPDGNGSSSCPTGSSG

SEQ ID NO: 6803 - protein, 136 aa, Homo sapiens
MTPHRLLPPLLLLLALLLAASPGGALARCPGCGQGVQAGCPGGCVEEEDGGSPAEGCAEAEGCLRREGQECGVYTPNCAPGLQCHPPKDDEAPLRALLLGRGRCLPARAPAVLSSPRTLRKLSPEPGATCSCRGES

SEQ ID NO: 6804 - protein, 282 aa, Homo sapiens
MERPSLRALLLGAAGLLLLLLPLSSSSSSDTCGPCEPASCPPLPPLGCLLGETRDACGCCPMCARGEGEPCGGGGAGRGYCAPGMECVKSRKRRKGKAGAAAGGPGVSGVCVCKSRYPVCGSDGTTYPSGCQLRAASQRAESRGEKAITQVSKGTCEQGPSIVTPPKDIWNVTGAQVYLSCEVIGIPTPVLIWNKVKRGHYGVQRTELLPGDRDNLAIQTRGGPEKHEVTGWVLVSPLSKEDAGEYECHASNSQGQASASAKITVVDALHEIPVKKGEGAEL

SEQ ID NO: 6805 - protein, 279 aa, Homo sapiens
MERPSLRALLLGAAGLLLLLLPLSSSSSSDTCGPCEPASCPPLPPLGCLLGETRDACGCCPMCARGEGEPCGGGGAGRGYCAPGMECVKSRKRRKGKAGAAAGGPGVSGVCVCKSRYPVCGSDGTTYPSGCQLRAASQRAESRGEKAITQVSKGTCEQGPSIVTPPKDIWNVTGAQVYLSCEVIGIPTPVLIWNKVKRGHYGVQRTELLPGDRDNLAIQTRGGPEKHEVTGWVLVSPLSKEDAGEYECHASNSQGQASASAKITVVDALHEIPVKKGTQ

SEQ ID NO: 6806 - protein, 278 aa, Homo sapiens
MPRLSLLLPLLLLLLLPLLPPLSPSLGIRDVGGRRPKCGPCRPEGCPAPAPCPAPGISALDECGCCARCLGAEGASCGGRAGGRCGPGLVCASQAAGAAPEGTGLCVCAQRGTVCGSDGRSYPSVCALRLRARHTPRAHPGHLHKARDGPCEFAPVVVVPPRSVHNVTGAQVGLSCEVRAVPTPVITWRKVTKSPEGTQALEELPGDHVNIAVQVRGGPSDHEATAWILINPLRKEDEGVYQCHAANMVGEAESHSTVTVLDLSKYRSFHFPAPDDRM

SEQ ID NO: 6807 - protein, 110 aa, Homo sapiens
MAPRGCIVAVFAIFCISRLLCSHGAPVAPMTPYLMLCQPHKRCGDKFYDPLQHCCYDDAVVPLARTQTCGNCTFRVCFEQCCPWTFMVKLINQNCDSARTSDDRLCRSVS

SEQ ID NO: 6808 - protein, 130 aa, Homo sapiens
MRFSVSGMRTDYPRSVLAPAYVSVCLLLLCPREVIAPAGSEPWLCQPAPRCGDKIYNPLEQCCYNDAIVSLSETRQCGPPCTFWPCFELCCLDSFGLTNDFVVKLKVQGVNSQCHSSPISSKCESRRRFP

SEQ ID NO: 6809 - protein, 119 aa, Homo sapiens
MVPRIFAPAYVSVCLLLLCPREVIAPAGSEPWLCQPAPRCGDKIYNPLEQCCYNDAIVSLSETRQCGPPCTFWPCFELCCLDSFGLTNDFVVKLKVQGVNSQCHSSPISSKCESRRRFP

SEQ ID NO: 6810 - protein, 84 aa, Homo sapiens
QPAPRCGDKIYNPLEQCCYNDAIVSLSETRQCGPPCTFWPCFELCCLDSFGLTNDFVVKLKVQGVNSQCHSSPISSKCERRRFP

SEQ ID NO: 6811 - protein, 125 aa, Homo sapiens
MRPRCCILALVCWITVFLLQCSKGTTDAPVGSGLWLCQPTPRCGNKIYNPSEQCCYDDAILSLKETRRCGSTCTFWPCFELCCPESFGPQQKFLVKLRVLGMKSQCHLSPISRSCTRNRRHVLYP

SEQ ID NO: 6812 - protein, 16 aa, Homo sapiens
MGPGRCLLTALLLLAL

SEQ ID NO: 6813 - protein, 132 aa, Homo sapiens
MGPGRCLLTALLLLALAPPPEASQYCGRLEYWNPDNKCCSSCLQRFGPPPCPDYEFRENCGLNDHGDFVTPPFRKCSSGQCNPDGAELCSPCGGGAVTPTPAAGGGRTPWRCREAGPCQGALPPHTWKPRRP

SEQ ID NO: 6814 - protein, 138 aa, Homo sapiens
MGPGRCLLTALLLLALAPPPEASQYCGRLEYWNPDNKCCSSCLQRFGPPPCPDYEFRENCGLNDHGDFVTPPFRKCSSGQCNPDGAELCSPCGGGAVTPTPAAGGGRTPWRCRERPVPAKGHCPLTPGNPGAPSSQER

SEQ ID NO: 6815 - protein, 355 aa, Homo sapiens
MGPGRCLLTALLLLALAPPPEASQYCGRLEYWNPDNKCCSSCLQRFGPPPCPDYEFRENCGLNDHGDFVTPPFRKCSSGQCNPDGAELCSPCGGGAVTPTPAAGGGRTPWRCRERPVPAKGHCPLTPGNPGAPSSQERSSPASSIAWRTPEPVPQQAWPNFLPLVVLVLLLTLAVIAILLFILLWHLCWPKEKADPYPYPGLVCGVPNTHTPSSSHLSSPGALETGDTWKEASLLPLLSRELSSLASQPLSRLLDELEVLEELIVLLDPEPGPGGGMAHGTTRHLAARYGLPAAWSTFAYSLRPSRSPLRALIEMVVAREPSASLGQLGTHLAQLGRADALRVLSKLGSSGVCWA

SEQ ID NO: 6816 - protein, 355 aa, Homo sapiens; identical to SEQ ID NO: 6815

SEQ ID NO: 6817 - protein, 167 aa, Homo sapiens
MGPGRCLLTALLLLALAPPPEASQYCGRLEYWNPDNKCCSSCLQRFGPPPCPELSSLASQPLSRLLDELEVLEELIVLLDPEPGPGGGMAHGTTRHLAARYGLPAAWSTFAYSLRPSRSPLRALIEMVVAREPSASLGQLGTHLAQLGRADALRVLSKLGSSGVCWA

SEQ ID NO: 6818 - protein, 187 aa, Homo sapiens
MGPGRCLLTALLLLALAPPPEASQYCGRLEYWNPDNKCCSSCLQRFGPPPCPGALETGDTWKEASLLPLLSRELSSLASQPLSRLLDELEVLEELIVLLDPEPGPGGGMAHGTTRHLAARYGLPAAWSTFAYSLRPSRSPLRALIEMVVAREPSASLGQLGTHLAQLGRADALRVLSKLGSSGVCWA

SEQ ID NO: 6819 - protein, 60 aa, Homo sapiens
  SITE 1: note = misc_feature - Xaa can be any naturally occurring amino acid
XGRLEYWNPDNKCCSSCLQRFGPPPCPGENPRPSLAWAELAEAGPCQGALPPHTWKPRRP

SEQ ID NO: 6820 - protein, 74 aa, Homo sapiens
  SITE 1: note = misc_feature - Xaa can be any naturally occurring amino acid
XNCGLNDHGDFVTPPFRKCSSGQCNPDGAELCSPCGGGAVTPTPAAGGGRTPWRCREAPWRQGTHGRRPHYFHS

SEQ ID NO: 6821 - protein, 53 aa, Homo sapiens
MCSYYHMKKRSVSGCNITIFAVMFSHLSAGKSPCGNQANVLCISRLEFVQYQS

SEQ ID NO: 6822 - protein, 336 aa, Homo sapiens
MPPPAPGARLRLLAAAALAGLAVISRGLLSQSLEFNSPADNYTVCEGDNATLSCFIDEHVTRVAWLNRSNILYAGNDRWTSDPRVRLLINTPEEFSILITEVGLGDEGLYTCSFQTRHQPYTTQVYLIVHVPARIVNISSPVTVNEGGNVNLLCLAVGRPEPTVTWRQLRDGFTSEGEILEISDIQRGQAGEYECVTHNGVNSAPDSRRVLVTVNYPPTITDVTSARTALGRAALLRCEAMAVPPADFQWYKDDRLLSSGTAEGLKVQTERTRSMLLFANVSARHYGNYTCRAANRLGASSASMRLLRPGSLENSAPRPPGLLALLSALGWLWWRM

SEQ ID NO: 6823 - protein, 1327 aa, Homo sapiens
MTLDRPGEGATMLKTFTVLLFCILMDPQPELWIESNYPQAPWENITLWCRSPSRISSKFLLLKDKTQMTWIRPSHKTFQVSFLIGALTESNAGLYRCCYWKETGWSKPSKVLELEAPGQLPKPIFWIQAETPALPGCNVNILCHGWLQDLVFMLFKEGYAEPVDYQVPTGTMAIFSIDNLTPEDEGVYICRTHIQMLPTLWSEPSNPLKLVVAGLYPKPTLTAHPGPIMAPGESLNLRCQGPIYGMTFALMRVEDLEKSFYHKKTIKNEANFFFQSLKIQDTGHYLCFYYDASYRGSLLSDVLKIWVTDTFPKTWLLARPSAVVQMGQNVSLRCRGPVDGVGLALYKKGEDKPLQFLDATSIDDNTSFFLNNVTYSDTGIYSCHYLLTWKTSIRMPSHNTVELMVVDKPPKPSLSAWPSTVFKLGKAITLQCRVSHPVLEFSLEWEERETFQKFSVNGDFIISNVDGKGTGTYSCSYRVETHPNIWSHRSEPLKLMGPAGYLTWNYVLNEAIRLSLIMQLVALLLVVLWIRWKCRRLRIREAWLLGTAQGVTMLFIVTALLCCGLCNGVLIEETEIVMPTPKPELWAETNFPLAPWKNLTLWCRSPSGSTKEFVLLKDGTGWIATRPASEQVRAAFPLGALTQSHTGSYHCHSWEEMAVSEPSEALELVGTDILPKPVISASPTIRGQELQLRCKGWLAGMGFALYKEGEQEPVQQLGAVGREAFFTIQRMEDKDEGNYSCRTHTEKRPFKWSEPSEPLELVIKEMYPKPFFKTWASPVVTPGARVTFNCSTPHQHMSFILYKDGSEIASSDRSWASPGASAAHFLIISVGIGDGGNYSCRYYDFSIWSEPSDPVELVVTEFYPKPTLLAQPGPVVFPGKSVILRCQGTFQGMRFALLQEGAHVPLQFRSVSGNSADFLLHTVGAEDSGNYSCIYYETTMSNRGSYLSMPLMIWVTDTFPKPWLFAEPSSVVPMGQNVTLWCRGPVHGVGYILHKEGEATSMQLWGSTSNDGAFPITNISGTSMGRYSCCYHPDWTSSIKIQPSNTLELLVTGLLPKPSLLAQPGPMVAPGENMTLQCQGELPDSTFVLLKEGAQEPLEQQRPSGYRADFWMPAVRGEDSGIYSCVYYLDSTPFAASNHSDSLEIWVTDKPPKPSLSAWPSTMFKLGKDITLQCRGPLPGVEFVLEHDGEEAPQQFSEDGDFVINNVEGKGIGNYSCSYRLQAYPDIWSEPSDPLELVGAAGPVAQECTVGNIVRSSLIVVVVVALGVVLAIEWKKWPRLRTRGSETDGRDQTIALEECNQEGEPGTPANSPSSTSQRISVELPVPI

SEQ ID NO: 6824 - protein, 1327 aa, Homo sapiens; identical to SEQ ID NO: 6823

SEQ ID NO: 6825 - protein, 242 aa, Homo sapiens
MTLDRPGEGATMLKTFTVLLFCIRMSLGMTSIVMDPQPELWIESNYPQAPWENITLWCRSPSRISSKFLLLKDKTQMTWIRPSHKTFQVSFLIGALTESNAGLYRCCYWKETGWSKPSKVLELEAPGQLPKPIFWIQAETPALPGCNVNILCHGWLQDLVFMLFKEGYAEPVDYQVPTGTMAIFSIDNLTPEDEGVYICRTHIQMLPTLWSEPSNPLKLVVAGGCGYGCWHLAIVVPGIMAG

SEQ ID NO: 6826 - protein, 242 aa, Homo sapiens; identical to SEQ ID NO: 6825

SEQ ID NO: 6827 - protein, 1341 aa, Homo sapiens
MTLDRPGEGATMLKTFTVLLFCIRMSLGMTSIVMDPQPELWIESNYPQAPWENITLWCRSPSRISSKFLLLKDKTQMTWIRPSHKTFQVSFLIGALTESNAGLYRCCYWKETGWSKPSKVLELEAPGQLPKPIFWIQAETPALPGCNVNILCHGWLQDLVFMLFKEGYAEPVDYQVPTGTMAIFSIDNLTPEDEGVYICRTHIQMLPTLWSEPSNPLKLVVAGLYPKPTLTAHPGPIMAPGESLNLRCQGPIYGMTFALMRVEDLEKSFYHKKTIKNEANFFFQSLKIQDTGHYLCFYYDASYRGSLLSDVLKIWVTDTFPKTWLLARPSAVVQMGQNVSLRCRGPVDGVGLALYKKGEDKPLQFLDATSIDDNTSFFLNNVTYSDTGIYSCHYLLTWKTSIRMPSHNTVELMVVDKPPKPSLSAWPSTVFKLGKAITLQCRVSHPVLEFSLEWEERETFQKFSVNGDFIISNVDGKGTGTYSCSYRVETHPNIWSHRSEPLKLMGPAGYLTWNYVLNEAIRLSLIMQLVALLLVVLWIRWKCRRLRIREAWLLGTAQGVTMLFIVTALLCCAISFAGLCNGVLIEETEIVMPTPKPELWAETNFPLAPWKNLTLWCRSPSGSTKEFVLLKDGTGWIATRPASEQVRAAFPLGALTQSHTGSYHCHSWEEMAVSEPSEALELVGTDILPKPVISASPTIRGQELQLRCKGWLAGMGFALYKEGEQEPVQQLGAVGREAFFTIQRMEDKDEGNYSCRTHTEKRPFKWSEPSEPLELVIKEMYPKPFFKTWASPVVTPGARVTFNCSTPHQHMSFILYKDGSEIASSDRSWASPGASAAHFLIISVGIGDGGNYSCRYYDFSIWSEPSDPVELVVTEFYPKPTLLAQPGPVVFPGKSVILRCQGTFQGMRFALLQEGAHVPLQFRSVSGNSADFLLHTVGAEDSGNYSCIYYETTMSNRGSYLSMPLMIWVTDTFPKPWLFAEPSSVVPMGQNVTLWCRGPVHGVGYILHKEGEATSMQLWGSTSNDGAFPITNISGTSMGRYSCCYHPDWTSSIKIQPSNTLELLVTGLLPKPSLLAQPGPMVAPGENMTLQCQGELPDSTFVLLKEGAQEPLEQQRPSGYRADFWMPAVRGEDSGIYSCVYYLDSTPFAASNHSDSLEIWVTDKPPKPSLSAWPSTMFKLGKDITLQCRGPLPGVEFVLEHDGEEAPQQFSEDGDFVINNVEGKGIGNYSCSYRLQAYPDIWSEPSDPLELVGAAGPVAQECTVGNIVRSSLIVVVVVALGVVLAIEWKKWPRLRTRGSETDGRDQTIALEECNQEGEPGTPANSPSSTSQRISVELPVPI

SEQ ID NO: 6828 - protein, 1336 aa, Homo sapiens
MTLDRPGEGATMLKTFTVLLFCIRMSLGMTSIVMDPQPELWIESNYPQAPWENITLWCRSPSRISSKFLLLKDKTQMTWIRPSHKTFQVSFLIGALTESNAGLYRCCYWKETGWSKPSKVLELEAPGQLPKPIFWIQAETPALPGCNVNILCHGWLQDLVFMLFKEGYAEPVDYQVPTGTMAIFSIDNLTPEDEGVYICRTHIQMLPTLWSEPSNPLKLVVAGLYPKPTLTAHPGPIMAPGESLNLRCQGPIYGMTFALMRVEDLEKSFYHKKTIKNEANFFFQSLKIQDTGHYLCFYYDASYRGSLLSDVLKIWVTDTFPKTWLLARPSAVVQMGQNVSLRCRGPVDGVGLALYKKGEDKPLQFLDATSIDDNTSFFLNNVTYSDTGIYSCHYLLTWKTSIRMPSHNTVELMVVDKPPKPSLSAWPSTVFKLGKAITLQCRVSHPVLEFSLEWEERETFQKFSVNGDFIISNVDGKGTGTYSCSYRVETHPNIWSHRSEPLKLMGPAGYLTWNYVLNEAIRLSLIMQLVALLLVVLWIRWKCRRLRIREAWLLGTAQGVTMLFIVTALLCCGLCNGVLIEETEIVMPTPKPELWAETNFPLAPWKNLTLWCRSPSGSTKEFVLLKDGTGWIATRPASEQVRAAFPLGALTQSHTGSYHCHSWEEMAVSEPSEALELVGTDILPKPVISASPTIRGQELQLRCKGWLAGMGFALYKEGEQEPVQQLGAVGREAFFTIQRMEDKDEGNYSCRTHTEKRPFKWSEPSEPLELVIKEMYPKPFFKTWASPVVTPGARVTFNCSTPHQHMSFILYKDGSEIASSDRSWASPGASAAHFLIISVGIGDGGNYSCRYYDFSIWSEPSDPVELVVTEFYPKPTLLAQPGPVVFPGKSVILRCQGTFQGMRFALLQEGAHVPLQFRSVSGNSADFLLHTVGAEDSGNYSCIYYETTMSNRGSYLSMPLMIWVTDTFPKPWLFAEPSSVVPMGQNVTLWCRGPVHGVGYILHKEGEATSMQLWGSTSNDGAFPITNISGTSMGRYSCCYHPDWTSSIKIQPSNTLELLVTGLLPKPSLLAQPGPMVAPGENMTLQCQGELPDSTFVLLKEGAQEPLEQQRPSGYRADFWMPAVRGEDSGIYSCVYYLDSTPFAASNHSDSLEIWVTDKPPKPSLSAWPSTMFKLGKDITLQCRGPLPGVEFVLEHDGEEAPQQFSEDGDFVINNVEGKGIGNYSCSYRLQAYPDIWSEPSDPLELVGAAGPVAQECTVGNIVRSSLIVVVVVALGVVLAIEWKKWPRLRTRGSETDGRDQTIALEECNQEGEPGTPANSPSSTSQRISVELPVPI

SEQ ID NO: 6829 - protein, 2623 aa, Homo sapiens
MKVKGRGITCLLVSFAVICLVATPGGKACPRRCACYMPTEVHCTFRYLTSIPDSIPPNVERINLGYNSLVRLMETDFSGLTKLELLMLHSNGIHTIPDKTFSDLQALQVLKMSYNKVRKLQKDTFYGLRSLTRLHMDHNNIEFINPEVFYGLNFLRLVHLEGNQLTKLHPDTFVSLSYLQIFKISFIKFLYLSDNFLTSLPQEMVSYMPDLDSLYLHGNPWTCDCHLKWLSDWIQEKPDVIKCKKDRSPSSAQQCPLCMNPRTSKGKPLAMVSAAAFQCAKPTIDSSLKSKSLTILEDSSSAFISPQGFMAPFGSLTLNMTDQSGNEANMVCSIQKPSRTSPIAFTEENDYIVLNTSFSTFLVCNIDYGHIQPVWQILALYSDSPLILERSHLLSETPQLYYKYKQVAPKPEDIFTNIEADLRADPSWLMQDQISLQLNRTATTFSTLQIQYSSDAQITLPRAEMRPVKHKWTMISRDNNTKLEHTVLVGGTVGLNCPGQGDPTPHVDWLLADGSKVRAPYVSEDGRILIDKSGKLELQMADSFDTGVYHCISSNYDDADILTYRITVVEPLVEAYQENGIHHTVFIGETLDLPCHSTGIPDASISWVIPGNNVLYQSSRDKKVLNNGTLRILQVTPKDQGYYRCVAANPSGVDFLIFQVSVKMKGQRPLEHDGETEGSGLDESNPIAHLKEPPGAQLRTSALMEAEVGKHTSSTSKRHNYRELTLQRRGDSTHRRFRENRRHFPPSARRIDPQHWAALLEKAKKNAMPDKRENTTVSPPPVVTQLPNIPGEEDDSSGMLALHEEFMVPATKALNLPARTVTADSRTISDSPMTNINYGTEFSPVVNSQILPPEEPTDFKLSTAIKTTAMSKNINPTMSSQIQGTTNQHSSTVFPLLLGATEFQDSDQMGRGREHFQSRPPITVRTMIKDVNVKMLSSTTNKLLLESVNTTNSHQTSVREVSEPRHNHFYSHTTQILSTSTFPSDPHTAAHSQFPIPRNSTVNIPLFRRFGRQRKIGGRGRIISPYRTPVLRRHRYSIFRSTTRGSSEKSTTAFSATVLNVTCLSCLPRERLTTATAALSFPSAAPITFPKADIARVPSEESTTLVQNPLLLLENKPSVEKTTPTIKYFRTEISQVTPTGAVMTYAPTSIPMEKTHKVNASYPRVSSTNEAKRDSVITSSLSGAITKPPMTIIAITRFSRRKIPWQQNFVNNHNPKGRLRNQHKVSLQKSTAVMLPKTSPALPRDKVSPFHFTTLSTSVMQIPSNTLTTAHHTTTKTHNPGSLPTKKELPFPPLNPMLPSIISKDSSTKSIISTQTAIPATTPTFPASVITYETQTERSRAQTIQREQEPQKKNRTDPNISPDQSSGFTTPTAMTPPVLTTAETSVKPSVSAFTHSPPENTTGISSTISFHSRTLNLTDVIEELAQASTQTLKSTIASETTLSSKSHQSTTTRKAIIRHSTIPPFLSSSATLMPVPISPPFTQRAVTDNVATPISGLMTNTVVKLHESSRHNAKPQQLVAEVATSPKVHPNAKFTIGTTHFIYSNLLHSTPMPALTTVKSQNSKLTPSPWAENQFWHKPYSEIAEKGKKPEVSMLATTGLSEATTLVSDWDGQKNTKKSDFDKKPVQEATTSKLLPFDSLSRYIFEKPRIVGGKAASFTIPANSDAFLPCEAVGNPLPTIHWTRVPSGLDLSKRKQNSRVQVLPNGTLSIQRVEIQDRGQYLCSASNLFGTDHLHVTLSVVSYPPRILERRTKEITVHSGSTVELKCRAEGRPSPTVTWILANQTVVSESSQGSRQAVVTVDGTLVLHNLSIYDRGFYKCVASNPGGQDSLLVKIQVIAAPPVILEQRRQVIVGTWGESLKLPCTAKGTPQPSVYWVLSDGTEVKPLQFTNSKLFLFSNGTLYIRNLASSDRGTYECIATSSTGSERRVVMLTMEERVTSPRIEAASQKRTEVNFGDKLLLNCSATGEPKPQIMWRLPSKAVVDQQHRVGSWIHVYPNGSLFIGSVTEKDSGVYLCVARNKMGDDLILMHVSLRLKPAKIDHKQYFRKQVLHGKDFQVDCKASGSPVPEISWSLPDGTMINNAMQADDSGHRTRRYTLFNNGTLYFNKVGVAEEGDYTCYAQNTLGKDEMKVHLTVITAAPRIRQSNKTNKRIKAGDTAVLDCEVTGDPKPKIFWLLPSNDMISFSIDRYTFHANGSLTINKVKLLDSGEYVCVARNPSGDDTKMYKLDVVSKPPLINGLYTNRTVIKATAVRHSKKHFDCRAEGTPSPEVMWIMPDNIFLTAPYYGSRITVHKNGTLEIRNVRLSDSADFICVARNEGGESVLVVQLEVLEMLRRPTFRNPFNEKIVAQLGKSTALNCSVDGNPPPEIIWILPNGTRFSNGPQSYQYLIASNGSFIISKTTREDAGKYRCAARNKVGYIEKLVILEIGQKPVILTYAPGTVKGISGESLSLHCVSDGIPKPNIKWTMPSGYVVDRPQINGKYILHDNGTLVIKEATAYDRGNYICKAQNSVGHTLITVPVMIVAYPPRITNRPPRSIVTRTGAAFQLHCVALGVPKPEITWEMPDHSLLSTASKERTHGSEQLHLQGTLVIQNPQTSDSGIYKCTAKNPLGSDYAATYIQVI

SEQ ID NO: 6830 - protein, 86 aa, Homo sapiens
TMEERVTSPRIEAASQKRTEVNFGDKLLLNCSATGEPKPQIMWRLPSKAVVDQQHRILDFYFSEAEAMPCSCCNHKTEYPAYYCQV

SEQ ID NO: 6831 - protein, 406 aa, Homo sapiens
MSLVELLLWWNCFSRTGVAASLEVSESPGSIQVARGQPAVLPCTFTTSAALINLNVIWMVTPLSNANQPEQVILYQGGQMFDGAPRFHGRVGFTGTMPATNVSIFINNTQLSDTGTYQCLVNNLPDIGGRNIGVTGLTVLVPPSAPHCQIQGSQDIGSDVILLCSSEEGIPRPTYLWEKLDNTLKLPPTATQDQVQGTVTIRNISALSSAQPRNIGLIAGAIGTGAVIIIFCIALILGAFFYWRSKNKEEEEEEIPNEIREDDLPPKCSSAKAFHTEISSSDNNTLTSSNAYNSRYWSNNPKVHRNTESVSHFSDLGQSFSFHSGNANIPSIYANGTHLVPGQHKTLVVTANRGSSPQVMSRSNGSVSRKPRPPHTHSYTISHATLERIGAVPVMVPAQSRAGSLV

SEQ ID NO: 6832 - protein, 430 aa, Homo sapiens
MSLVELLLWWNCFSRTGVAASLEVSESPGSIQVARGQPAVLPCTFTTSAALINLNVIWMVTPLSNANQPEQVILYQGGQMFDGAPRFHGRVGFTGTMPATNVSIFINNTQLSDTGTYQCLVNNLPDIGGRNIGVTGLTVLVPPSAPHCQIQGSQDIGSDVILLCSSEEGIPRPTYLWEKLDNTLKLPPTATQDQVQGTVTIRNISALSSGLYQCVASNAIGTSTCLLDLQVISPQPRNIGLIAGAIGTGAVIIIFCIALILGAFFYWRSKNKEEEEEEIPNEIREDDLPPKCSSAKAFHTEISSSDNNTLTSSNAYNSRYWSNNPKVHRNTESVSHFSDLGQSFSFHSGNANIPSIYANGTHLVPGQHKTLVVTANRGSSPQVMSRSNGSVSRKPRPPHTHSYTISHATLERIGAVPVMVPAQSRAGSLV

SEQ ID NO: 6833 - protein, 430 aa, Homo sapiens; identical to SEQ ID NO: 6832

SEQ ID NO: 6834 - protein, 407 aa, Homo sapiens
MTSQRSPLAPLLLLSLHGVAASLEVSESPGSIQVARGQPAVLPCTFTTSAALINLNVIWMVTPLSNANQPEQVILYQGGQMFDGAPRFHGRVGFTGTMPATNVSIFINNTQLSDTGTYQCLVNNLPDIGGRNIGVTGLTVLVPPSAPHCQIQGSQDIGSDVILLCSSEEGIPRPTYLWEKLDNTLKLPPTATQDQVQGTVTIRNISALSSAQPRNIGLIAGAIGTGAVIIIFCIALILGAFFYWRSKNKEEEEEEIPNEIREDDLPPKCSSAKAFHTEISSSDNNTLTSSNAYNSRYWSNNPKVHRNTESVSHFSDLGQSFSFHSGNANIPSIYANGTHLVPGQHKTLVVTANRGSSPQVMSRSNGSVSRKPRPPHTHSYTISHATLERIGAVPVMVPAQSRAGSLV

SEQ ID NO: 6835 - protein, 431 aa, Homo sapiens
MTSQRSPLAPLLLLSLHGVAASLEVSESPGSIQVARGQPAVLPCTFTTSAALINLNVIWMVTPLSNANQPEQVILYQGGQMFDGAPRFHGRVGFTGTMPATNVSIFINNTQLSDTGTYQCLVNNLPDIGGRNIGVTGLTVLVPPSAPHCQIQGSQDIGSDVILLCSSEEGIPRPTYLWEKLDNTLKLPPTATQDQVQGTVTIRNISALSSGLYQCVASNAIGTSTCLLDLQVISPQPRNIGLIAGAIGTGAVIIIFCIALILGAFFYWRSKNKEEEEEEIPNEIREDDLPPKCSSAKAFHTEISSSDNNTLTSSNAYNSRYWSNNPKVHRNTESVSHFSDLGQSFSFHSGNANIPSIYANGTHLVPGQHKTLVVTANRGSSPQVMSRSNGSVSRKPRPPHTHSYTISHATLERIGAVPVMVPAQSRAGSLV

SEQ ID NO: 6836 - protein, 403 aa, Homo sapiens
MTSQRSPLAPLLLLSLHGVAASLEVSESPGSIQVARGQPAVLPCTFTTSAALINLNVIWMVTPLSNANQPEQVILYQGGQMFDGAPRFHGRVGFTGTMPATNVSIFINNTQLSDTGTYQCLVNNLPDIGGRNIGVTGLTVLVPPSAPHCQIQGSQDIGSDVILLCSSEEGIPRPTYLWEKLDNTLKLPPTATQDQVQGTVTIRNISALSSGLYQCVASNAIGTSTCLLDLQVISRAFFYWRSKNKEEEEEEIPNEIREDDLPPKCSSAKAFHTEISSSDNNTLTSSNAYNSRYWSNNPKVHRNTESVSHFSDLGQSFSFHSGNANIPSIYANGTHLVPGQHKTLVVTANRGSSPQVMSRSNGSVSRKPRPPHTHSYTISHATLERIGAVPVMVPAQSRAGSLV

SEQ ID NO: 6837 - protein, 33 aa, Homo sapiens
MVTPLSNANQPEQVILYQGGQMFDGAPRFHGRV

SEQ ID NO: 6838 - protein, 59 aa, Homo sapiens
MVTPLSNANQPEQVILYQGGQMFDGAPRFHGRVGFTGTMPATNVSIFINNTQLSDTGTY

SEQ ID NO: 6839 - protein, 467 aa, Homo sapiens
MRTAPSLRRCVCLLLAAILDLARGYLTVNIEPLPPVVAGDAVTLKCNFKTDGRMREIVWYRVTDGGTIKQKIFTFDAMFSTNYSHMENYRKREDLVYQSTVRLPEVRISDNGPYECHVGIYDRATREKVVLASGNIFLNVMAPPTSIEVVAADTPAPFSRYQAQNFTLVCIVSGGKPAPMVYFKRDGEPIDAVPLSEPPAASSGPLQDSRPFRSLLHRDLDDTKMQKSLSLLDAENRGGRPYTERPSRGLTPDPNILLQPTTENIPETVVSREFPRWVHSAEPTYFLRHSRTPSSDGTVEVRALLTWTLNPQIDNEALFSCEVKHPALSMPMQAEVTLVAPKGPKIVMTPSRARVGDTVRILVHGFQNEVFPEPMFTWTRVGSRLLDGSAEFDGKELVLERVPAELNGSMYRCTAQNPLGSTDTHTRLIVFENPNIPRGTEDSNGSIGPTGARLTLVLALTVILELT

SEQ ID NO: 6840 - protein, 613 aa, Homo sapiens
MGALRPTLLPPSLPLLLLLMLGMGCWAREVLVPEGPLYRVAGTAVSISCNVTGYEGPAQQNFEWFLYRPEAPDTALGIVSTKDTQFSYAVFKSRVVAGEVQVQRLQGDAVVLKIARLQAQDAGIYECHTPSTDTRYLGSYSGKVELRVLPDVLQVSAAPPGPRGRQAPTSPPRMTVHEGQELALGCLARTSTQKHTHLAVSFGRSVPEAPVGRSTLQEVVGIRSDLAVEAGAPYAERLAAGELRLGKEGTDRYRMVVGGAQAGDAGTYHCTAAEWIQDPDGSWAQIAEKRAVLAHVDVQTLSSQLAVTVGPGERRIGPGEPLELLCNVSGALPPAGRHAAYSVGWEMAPAGAPGPGRLVAQLDTEGVGSLGPGYEGRHIAMEKVASRTYRLRLEAARPGDAGTYRCLAKAYVRGSGTRLREAASARSRPLPVHVREEGVVLEAVAWLAGGTVYRGETASLLCNISVRGGPPGLRLAASWWVERPEDGELSSVPAQLVGGVGQDGVAELGVRPGGGPVSVELVGPRSHRLRLHSLGPEDEGVYHCAPSAWVQHADYSWYQAGSARSGPVTVYPYMHALDTLFVPLLVGTGVALVTGATVLGTITCCFMKRLRKR

SEQ ID NO: 6841 - protein, 613 aa, Homo sapiens; identical to SEQ ID NO: 6840

SEQ ID NO: 6842 - protein, 301 aa, Homo sapiens
MGALRPTLLPPSLPLLLLLMLGMGCWAREVLVPEGPLYRVAGTAVSISCNVTGYEGPAQQNFEWFLYRPEAPDTALGIVSTKDTQFSYAVFKSRVVAGEVQVQRLQGDAVVLKIARLQAQDAGIYECHTPSTDTRYLGSYSGKVELRVLPDVLQVSAAPPGPRGRQAPTSPPRMTVHEGQELALGCLARTSTQKHTHLAVSFGRSVPEAPVGRSTLQEVVGIRSDLAVEAGAPYAERLAAGELRLGKEGTDRYRMVVGGAQAGDAGTYHCTAAEWIQDPDGSWAQIAEKRAVLAHVDVQTL

SEQ ID NO: 6843 - protein, 613 aa, Homo sapiens; identical to SEQ ID NO: 6840

SEQ ID NO: 6844 - protein, 1163 aa, Homo sapiens
MVWCLGLAVLSLVISQGADGRGKPEVVSVVGRAGESVVLGCDLLPPAGRPPLHVIEWLRFGFLLPIFIQFGLYSPRIDPDYVGRVRLQKGASLQIEGLRVEDQGWYECRVFFLDQHIPEDDFANGSWVHLTVNSPPQFQETPPAVLEVQELEPVTLRCVARGSPLPHVTWKLRGKDLGQGQGQVQVQNGTLRIRRVERGSSGVYTCQASSTEGSATHATQLLVLGPPVIVVPPKNSTVNASQDVSLACHAEAYPANLTYSWFQDNINVFHISRLQPRVRILVDGSLRLLATQPDDAGCYTCVPSNGLLHPPSASAYLTVLCMPGVIRCPVRANPPLLFVSWTKDGKALQLDKFPGWSQGTEGSLIIALGNEDALGEYSCTPYNSLGTAGPSPVTRVLLKAPPAFIERPKEEYFQEVGRELLIPCSAQGDPPPVVSWTKVGRGLQGQAQVDSNSSLILRPLTKEAHGHWECSASNAVARVATSTNVYVLGTSPHVVTNVSVVALPKGANVSWEPGFDGGYLQRFSVWYTPLAKRPDRMHHDWVSLAVPVGAAHLLVPGLQPHTQYQFSVLAQNKLGSGPFSEIVLSAPEGLPTTPAAPGLPPTEIPPPLSPPRGLVAVRTPRGVLLHWDPPELVPKRLDGYVLEGRQGSQGWEVLDPAVAGTETELLVPGLIKDVLYEFRLVAFAGSFVSDPSNTANVSTSGLEVYPSRTQLPGLLPQPVLAGVVGGVCFLGVAVLVSILAGCLLNRRRAARRRRKRLRQDPPLIFSPTGKSAAPSALGSGSPDSVAKLKLQGSPVPSLRQSLLWGDPAGTPSPHPDPPSSRGPLPLEPICRGPDGRFVMGPTVAAPQERSGREQAEPRTPAQRLARSFDCSSSSPSGAPQPLCIEDISPVAPPPAAPPSPLPGPGPLLQYLSLPFFREMNVDGDWPPLEEPSPAAPPDYMDTRRCPTSSFLRSPETPPVSPRESLPGAVVGAGATAEPPYTALADWTLRERLLPGLLPAAPRGSLTSQSSGRGSASFLRPPSTAPSAGGSYLSPAPGDTSSWASGPERWPRREHVVTVSKRRNTSVDENYEWDSEFPGDMELLETLHLGLASSRLRPEAEPELGVKTPEEGCLLNTAHVTGPEARCAALREEFLAFRRRRDATRARLPAYRQPVPHPEQATLL

SEQ ID NO: 6845 - protein, 1179 aa, Homo sapiens
MVWCLGLAVLSLVISQGADGRGKPEVVSVVGRAGESVVLGCDLLPPAGRPPLHVIEWLRFGFLLPIFIQFGLYSPRIDPDYVGRVRLQKGASLQIEGLRVEDQGWYECRVFFLDQHIPEDDFANGSWVHLTVNSPPQFQETPPAVLEVQELEPVTLRCVARGSPLPHVTWKLRGKDLGQGQGQVQVQNGTLRIRRVERGSSGVYTCQASSTEGSATHATQLLVLGPPVIVVPPKNSTVNASQDVSLACHAEAYPANLTYSWFQDNINVFHISRLQPRVRILVDGSLRLLATQPDDAGCYTCVPSNGLLHPPSASAYLTVLYPAQVTAMPPETPLPIGMPGVIRCPVRANPPLLFVSWTKDGKALQLDKFPGWSQGTEGSLIIALGNEDALGEYSCTPYNSLGTAGPSPVTRVLLKAPPAFIERPKEEYFQEVGRELLIPCSAQGDPPPVVSWTKVGRGLQGQAQVDSNSSLILRPLTKEAHGHWECSASNAVARVATSTNVYVLGTSPHVVTNVSVVALPKGANVSWEPGFDGGYLQRFSVWYTPLAKRPDRMHHDWVSLAVPVGAAHLLVPGLQPHTQYQFSVLAQNKLGSGPFSEIVLSAPEGLPTTPAAPGLPPTEIPPPLSPPRGLVAVRTPRGVLLHWDPPELVPKRLDGYVLEGRQGSQGWEVLDPAVAGTETELLVPGLIKDVLYEFRLVAFAGSFVSDPSNTANVSTSGLEVYPSRTQLPGLLPQPVLAGVVGGVCFLGVAVLVSILAGCLLNRRRAARRRRKRLRQDPPLIFSPTGKSAAPSALGSGSPDSVAKLKLQGSPVPSLRQSLLWGDPAGTPSPHPDPPSSRGPLPLEPICRGPDGRFVMGPTVAAPQERSGREQAEPRTPAQRLARSFDCSSSSPSGAPQPLCIEDISPVAPPPAAPPSPLPGPGPLLQYLSLPFFREMNVDGDWPPLEEPSPAAPPDYMDTRRCPTSSFLRSPETPPVSPRESLPGAVVGAGATAEPPYTALADWTLRERLLPGLLPAAPRGSLTSQSSGRGSASFLRPPSTAPSAGGSYLSPAPGDTSSWASGPERWPRREHVVTVSKRRNTSVDENYEWDSEFPGDMELLETLHLGLASSRLRPEAEPELGVKTPEEGCLLNTAHVTGPEARCAALREEFLAFRRRRDATRARLPAYRQPVPHPEQATLL

SEQ ID NO: 6846 - protein, 717 aa, Homo sapiens
MVWCLGLAVLSLVISQGADGRGKPEVVSVVGRAGESVVLGCDLLPPAGRPPLHVIEWLRFGFLLPIFIQFGLYSPRIDPDYVGRVRLQKGASLQIEGLRVEDQGWYECRVFFLDQHIPEDDFANGSWVHLTVNSPPQFQETPPAVLEVQELEPVTLRCVARGSPLPHVTWKLRGKDLGQGQGQVQVQNGTLRIRRVERGSSGVYTCQASSTEGSATHATQLLVLGPPVIVVPPKNSTVNASQDVSLACHAEAYPANLTYSWFQDNINVFHISRLQPRVRILVDGSLRLLATQPDDAGCYTCVPSNGLLHPPSASAYLTVLYPAQVTAMPPETPLPIGMPGVIRCPVRANPPLLFVSWTKDGKALQLDKFPGWSQGTEGSLIIALGNEDALGEYSCTPYNSLGTAGPSPVTRVLLKAPPAFIERPKEEYFQEVGRELLIPCSAQGDPPPAAPPSPLPGPGPLLQYLSLPFFREMNVDGDWPPLEEPSPAAPPDYMDTRRCPTSSFLRSPETPPVSPRESLPGAVVGAGATAEPPYTALADWTLRERLLPGLLPAAPRGSLTSQSSGRGSASFLRPPSTAPSAGGSYLSPAPGDTSSWASGPERWPRREHVVTVSKRRNTSVDENYEWDSEFPGDMELLETLHLGLASSRLRPEAEPELGVKTPEEGCLLNTAHVTGPEARCAALREEFLAFRRRRDATRARLPAYRQPVPHPEQATLL

SEQ ID NO: 6847 - protein, 411 aa, Homo sapiens
MSPARLRPRLHFCLVLLLLLVVPAAWGCGPGRVVGSRRRPPRKLVPLAYKQFSPNVPEKTLGASGRYEGKIARSSERFKELTPNYNPDIIFKDEENTGADRLMTQRCKDRLNSLAISVMNQWPGVKLRVTEGWDEDGHHSEESLHYEGRAVDITTSDRDRNKYGLLARLAVEAGFDWVYYESKAHVHCSVKSEHSAAAKTGGCFPAGAQVRLESGARVALSAVRPGDRVLAMGEDGSPTFSDVLIFLDREPHRLRAFQVIETQDPPRRLALTPAHLLFTADNHTEPAARFRATFASHVQPGQYVLVAGVPGLQPARVAAVSTHVALGAYAPLTKHGTLVVEDVVASCFAAVADHHLAQLAFWPLRLFHSLAWGSWTPGEGVHWYPQLLYRLGRLLLEEGSFHPLGMSGAGS

SEQ ID NO: 6848 - protein, 178 aa, Homo sapiens
MHSSALLCCLVLLTGVRASPGQGTQSENSCTHFPGNLPNMLRDLRDAFSRVKTFFQMKDQLDNLLLKESLLEDFKGYLGCQALSEMIQFYLEEVMPQAENQDPDIKAHVNSLGENLKTLRLRLRRCHRFLPCENKSKAVEQVKNAFNKLQEKGIYKAMSEFDIFINYIEAYMTMKIRN

SEQ ID NO: 6849 - protein, 74 aa, Homo sapiens
MIQFYLEEVMPQAENQDPDIKAHVNSLGENLKTLRLRLRRCHRFLPCENKSKAVEQVKNAFNKLQEKGIYKAMS

SEQ ID NO: 6850 - protein, 199 aa, Homo sapiens
MNCVCRLVLVVLSLWPDTAVAPGPPPGPPRVSPDPRAELDSTVLLTRSLLADTRQLAAQLRDKFPADGDHNLDSLPTLAMSAGALGALQLPGVLTRLRADLLSYLRHVQWLRRAGGSSLKTLEPELGTLQARLDRLLRRLQLLMSRLALPQPPPDPPAPPLAPPSSAWGGIRAAHAILGGLHLTLDWAVRGLLLLKTRL

SEQ ID NO: 6851 - protein, 199 aa, Homo sapiens; identical to SEQ ID NO: 6850

SEQ ID NO: 6852 - protein, 40 aa, Homo sapiens
MSAGALGALQLPGVLTRLRADLLSYLRHVQWLRRAGGSSL

SEQ ID NO: 6853 - protein, 120 aa, Homo sapiens
MSAGALGALQLPGVLTRLRADLLSYLRHVQWLRRAGGSSLKTLEPELGTLQARLDRLLRRLQLLMSRLALPQPPPDPPAPPLAPPSSAWGGIRAAHAILGGLHLTLDWAVRGLLLLKTRL

SEQ ID NO: 6854 - protein, 152 aa, Homo sapiens
MSSSCSGLSRVLVAVATALVSASSPCPQAWGPPDPPARPVVSCQAADYENFSCTWSPSQISGLPTRYLTSYRKKTVLGADSQRRSPSTGPWPCPQDPLGAARCVVHGAEFWSQYRINVTEVNPLGASTRLLDVSLQSILRPDPPQGLRVESV

SEQ ID NO: 6855 - protein, 54 aa, Homo sapiens
MSSSCSGLSRVLVAVATALVSASSPCPQAWGPPGTQCPGFGMGSQSCSRDLTLG

SEQ ID NO: 6856 - protein, 139 aa, Homo sapiens
MSSSCSGLSRVLVAVATALVSASSPCPQAWGPPGVQYGQPGRSVKLCCPGVTAGDPVSWFRDGEPKLLQGPDSGLGHELVLAQADSTDEGTYICQTLDGALGGTVTLQLGYPPARPVVSCQAADYENFSCTWSPSQISG

SEQ ID NO: 6857 - protein, 167 aa, Homo sapiens
MSSSCSGLSRVLVAVATALVSASSPCPQAWGPPGVQYGQPGRSVKLCCPGVTAGDPVSWFRDGEPKLLQGPDSGLGHELVLAQADSTDEGTYICQTLDGALGGTVTLQLGYPPARPVVSCQAADYENFSCTWSPSQISGLPTRYLTSYRKKTVLGADSQRRSPSTGP

SEQ ID NO: 6858 - protein, 422 aa, Homo sapiens
MSSSCSGLSRVLVAVATALVSASSPCPQAWGPPGVQYGQPGRSVKLCCPGVTAGDPVSWFRDGEPKLLQGPDSGLGHELVLAQADSTDEGTYICQTLDGALGGTVTLQLGYPPARPVVSCQAADYENFSCTWSPSQISGLPTRYLTSYRKKTVLGADSQRRSPSTGPWPCPQDPLGAARCVVHGAEFWSQYRINVTEVNPLGASTRLLDVSLQSILRPDPPQGLRVESVPGYPRRLRASWTYPASWPCQPHFLLKFRLQYRPAQHPAWSTVEPAGLEEVITDAVAGLPHAVRVSARDFLDAGTWSTWSPEAWGTPSTGTIPKEIPAWGQLHTQPEVEPQVDSPAPPRPSLQPHPRLLDHRDSVEQVAVLASLGILSFLGLVAGALALGLWLRLRRGGKDGSPKPGFLASVIPVDRRPGAPNL

SEQ ID NO: 6859 - protein, 422 aa, Homo sapiens; identical to SEQ ID NO: 6858

SEQ ID NO: 6860 - protein, 270 aa, Homo sapiens
MSSSCSGLSRVLVAVATALVSASSPCPQAWGPPGVQYGQPGRSVKLCCPGVTAGDPVSWFRDGEPKLLQGPDSGLGHELVLAQADSTDEGTYICQTLDGALGGTVTLQLGYPPARPVVSCQAADYENFSCTWSPSQISGLPTRYLTSYRKKTVLGADSQRRSPSTGPWPCPQDPLGAARCVVHGAEFWSQYRINVTEVNPLGASTRLLDVSLQSILRPDPPQGLRVESVPGYPRRLRASWTYPASWPCQPHFLLKFRLQYRPAQHPAWST

SEQ ID NO: 6861 - protein, 390 aa, Homo sapiens
MSSSCSGLSRVLVAVATALVSASSPCPQAWGPPGVQYGQPGRSVKLCCPGVTAGDPVSWFRDGEPKLLQGPDSGLGHELVLAQADSTDEGTYICQTLDGALGGTVTLQLGYPPARPVVSCQAADYENFSCTWSPSQISGLPTRYLTSYRKKTVLGADSQRRSPSTGPWPCPQDPLGAARCVVHGAEFWSQYRINVTEVNPLGASTRLLDVSLQSILRPDPPQGLRVESVPGYPRRLRASWTYPASWPCQPHFLLKFRLQYRPAQHPAWSTVEPAGLEEVITDAVAGLPHAVRVSARDFLDAGTWSTWSPEAWGTPSTGTIPKEIPAWGQLHTQPEVEPQVDSPAPPRPSLQPHPRLLDHRDSVEQVAVLASLGILSFLGLVAGALALGLW

SEQ ID NO: 6862 - protein, 422 aa, Homo sapiens; identical to SEQ ID NO: 6858

SEQ ID NO: 6863 - protein, 68 aa, Homo sapiens
MSSSCSGLSRVLVAVATALVSASSPCPQAWGPPGVQYGQPGRSVKLCCPGVTAGPSSPPCCLLPSSRL

SEQ ID NO: 6864 - protein, 77 aa, Homo sapiens
  SITE 1: note = misc_feature - Xaa can be any naturally occurring amino acid
XTPSTGTIPKEIPAWGQLHTQPEVEPQVDSPAPPRPSLQPHPRLLDHRDSVEQVAVLASLGILSFLGLVAGALALGL

SEQ ID NO: 6865 - protein, 328 aa, Homo sapiens
MCHQQLVISWFSLVFLASPLVAIWELKKDVYVVELDWYPDAPGEMVVLTCDTPEEDGITWTLDQSSEVLGSGKTLTIQVKEFGDAGQYTCHKGGEVLSHSLLLLHKKEDGIWSTDILKDQKEPKNKTFLRCEAKNYSGRFTCWWLTTISTDLTFSVKSSRGSSDPQGVTCGAATLSAERVRGDNKEYEYSVECQEDSACPAAEESLPIEVMVDAVHKLKYENYTSSFFIRDIIKPDPPKNLQLKPLKNSRQVEVSWEYPDTWSTPHSYFSLTFCVQVQGKSKREKKDRVFTDKTSATVICRKNASISVRAQDRYYSSSWSEWASVPCS

SEQ ID NO: 6866 - protein, 51 aa, Homo sapiens
MEPLVTWVVPLLFLFLLSRQGAACRTSECCFQDPPYPDADSGSASGPRDLR

SEQ ID NO: 6867 - protein, 67 aa, Homo sapiens
MEPLVTWVVPLLFLFLLSRQGAACRTSECCFQDPPYPDADSGSASGPRDLRCYRISSDRYECSWQYE

SEQ ID NO: 6868 - protein, 381 aa, Homo sapiens
MEPLVTWVVPLLFLFLLSRQGAACRTSECCFQDPPYPDADSGSASGPRDLRCYRISSDRYECSWQYEGPTAGVSHFLRCCLSSGRCCYFAAGSATRLQFSDQAGVSVLYTVTLWVESWARNQTEKSPEVTLQLYNSVKYEPPLGDIKVSKLAGQLRMEWETPDNQVGAEVQFRHRTPSSPWKLGDCGPQDDDTESCLCPLEMNVAQEFQLRRRQLGSQGSSWSKWSSPVCVPPENPPQPQVRFSVEQLGQDGRRRLTLKEQPTQLELPEGCQGLAPGTEVTYRLQLHMLSCPCKAKATRTLHLGKMPYLSGAAYNVAVISSNQFGPGLNQTWHIPADTHTDGMISAHCNLRLPDSRDSPASASRVAGITGICHHTRLILYF

SEQ ID NO: 6869 - protein, 662 aa, Homo sapiens
MEPLVTWVVPLLFLFLLSRQGAACRTSECCFQDPPYPDADSGSASGPRDLRCYRISSDRYECSWQYEGPTAGVSHFLRCCLSSGRCCYFAAGSATRLQFSDQAGVSVLYTVTLWVESWARNQTEKSPEVTLQLYNSVKYEPPLGDIKVSKLAGQLRMEWETPDNQVGAEVQFRHRTPSSPWKLGDCGPQDDDTESCLCPLEMNVAQEFQLRRRQLGSQGSSWSKWSSPVCVPPENPPQPQVRFSVEQLGQDGRRRLTLKEQPTQLELPEGCQGLAPGTEVTYRLQLHMLSCPCKAKATRTLHLGKMPYLSGAAYNVAVISSNQFGPGLNQTWHIPADTHTEPVALNISVGTNGTTMYWPARAQSMTYCIEWQPVGQDGGLATCSLTAPQDPDPAGMATYSWSRESGAMGQEKCYYITIFASAHPEKLTLWSTVLSTYHFGGNASAAGTPHHVSVKNHSLDSVSVDWAPSLLSTCPGVLKEYVVRCRDEDSKQVSEHPVQPTETQVTLSGLRAGVAYTVQVRADTAWLRGVWSQPQRFSIEVQVSDWLIFFASLGSFLSILLVGVLGYLGLNRAARHLCPPLPTPCASSAIEFPGGKETWQWINPVDFQEEASLQEALVVEMSWDKGERTEPLEKTELPEGAPELALDTELSLEDGDRCKAKM

SEQ ID NO: 6870 - protein, 662 aa, Homo sapiens; identical to SEQ ID NO: 6869

SEQ ID NO: 6871 - protein, 118 aa, Homo sapiens
MEPLVTWVVPLLFLFLLSRQGAACRTSECCFQDPPYPDADSGSLPGSASGPRDLRCYRISSDRYECSWQYEGPTAGVSHFLRCCLSSGRCCYFAAGSATRLQFSDQAGVSVLYTVTLW

SEQ ID NO: 6872 - protein, 862 aa, Homo sapiens
MAHTFRGCSLAFMFIITWLLIKAKIDACKRGDVTVKPSHVILLGSTVNITCSLKPRQGCFHYSRRNKLILYKFDRRINFHHGHSLNSQVTGLPLGTTLFVCKLACINSDEIQICGAEIFVGVAPEQPQNLSCIQKGEQGTVACTWERGRDTHLYTEYTLQLSGPKNLTWQKQCKDIYCDYLDFGINLTPESPESNFTAKVTAVNSLGSSSSLPSTFTFLDIVRPLPPWDIRIKFQKASVSRCTLYWRDEGLVLLNRLRYRPSNSRLWNMVNVTKAKGRHDLLDLKPFTEYEFQISSKLHLYKGSWSDWSESLRAQTPEEEPTGMLDVWYMKRHIDYSRQQISLFWKNLSVSEARGKILHYQVTLQELTGGKAMTQNITGHTSWTTVIPRTGNWAVAVSAANSKGSSLPTRINIMNLCEAGLLAPRQVSANSEGMDNILVTWQPPRKDPSAVQEYVVEWRELHPGGDTQVPLNWLRSRPYNVSALISENIKSYICYEIRVYALSGDQGGCSSILGNSKHKAPLSGPHINAITEEKGSILISWNSIPVQEQMGCLLHYRIYWKERDSNSQPQLCEIPYRVSQNSHPINSLQPRVTYVLWMTALTAAGESSHGNEREFCLQGKANWMAFVAPSICIAIIMVGIFSTHYFQQKVFVLLAALRPQWCSREIPDPANSTCAKKYPIAEEKTQLPLDRLLIDWPTPEDPEPLVISEVLHQVTPVFRHPPCSNWPQREKGIQGHQASEKDMMHSASSPPPPRALQAESRQLVDLYKVLESRGSDPKPENPACPWTVLPAGDLPTHDGYLPSNIDDLPSHEAPLADSLEELEPQHISLSVFPSSSLHPLTFSCGDKLTLDQLKMRCDSLML

SEQ ID NO: 6873 - protein, 659 aa, Homo sapiens
MAHTFRGCSLAFMFIITWLLIKAKIDACKRGDVTVKPSHVILLGSTVNITCSLKPRQGCFHYSRRNKLILYKFDRRINFHHGHSLNSQVTGLPLGTTLFVCKLACINSDEIQICGAEIFVGVAPEQPQNLSCIQKGEQGTVACTWERGRDTHLYTEYTLQLSGPKNLTWQKQCKDIYCDYLDFGINLTPESPESNFTAKVTAVNSLGSSSSLPSTFTFLDIVRPLPPWDIRIKFQKASVSRCTLYWRDEGLVLLNRLRYRPSNSRLWNMVNVTKAKGRHDLLDLKPFTEYEFQISSKLHLYKGSWSDWSESLRAQTPEEEPTGMLDVWYMKRHIDYSRQQISLFWKNLSVSEARGKILHYQVTLQELTGGKAMTQNITGHTSWTTVIPRTGNWAVAVSAANSKGSSLPTRINIMNLCEAGLLAPRQVSANSEGMDNILVTWQPPRKDPSAVQEYVVEWRELHPGGDTQVPLNWLRSRPYNVSALISENIKSYICYEIRVYALSGDQGGCSSILGNSKHKAPLSGPHINAITEEKGSILISWNSIPVQEQMGCLLHYRIYWKERDSNSQPQLCEIPYRVSQNSHPINSLQPRVTYVLWMTALTAAGESSHGNEREFCLQGKANWMAFVAPSICIAIIMVGIFSTHYFQQKRRHSCPWTGS

SEQ ID NO: 6874 - protein, 635 aa, Homo sapiens
MAHTFRGCSLAFMFIITWLLIKAKIDACKRGDVTVKPSHVILLGSTVNITCSLKPRQGCFHYSRRNKLILYKFDRRINFHHGHSLNSQVTGLPLGTTLFVCKLACINSDEIQICGAEIFVGVAPEQPQNLSCIQKGEQGTVACTWERGRDTHLYTEYTLQLSGPKNLTWQKQCKDIYCDYLDFGINLTPESPESNFTAKVTAVNSLGSSSSLPSTFTFLDIVRPLPPWDIRIKFQKASVSRCTLYWRDEGLVLLNRLRYRPSNSRLWNMVNVTKAKGRHDLLDLKPFTEYEFQISSKLHLYKGSWSDWSESLRAQTPEEEPTGMLDVWYMKRHIDYSRQQISLFWKNLSVSEARGKILHYQVTLQELTGGKAMTQNITGHTSWTTVIPRTGNWAVAVSAANSKGSSLPTRINIMNLCEAGLLAPRQVSANSEGMDNILVTWQPPRKDPSAVQEYVVEWRELHPGGDTQVPLNWLRSRPYNVSALISENIKSYICYEIRVYALSGDQGGCSSILGNSKHKAPLSGPHINAITEEKGSILISWNSIPVQEQMGCLLHYRIYWKERDSNSQPQLCEIPYRVSQNSHPINSLQPRVTYVLWMTALTAAGESSHGNEREFCLQGEDTAALGQAPDRLAHA

SEQ ID NO: 6875 - protein, 776 aa, Homo sapiens
MAHTFRGCSLAFMFIITWLLIKAKIDACKRGDVTVKPSHVILLGSTVNITCSLKPRQGCFHYSRRNKLILYKFDRRINFHHGHSLNSQVTGLPLGTTLFVCKLACINSDEIQICGAEIFVGVAPEQPQNLSCIQKGEQGTVACTWERGRDTHLYTEYTLQLSGPKNLTWQKQCKDIYCDYLDFGINLTPESPESNFTAKVTAVNSLGSSSSLPSTFTFLDIVRPLPPWDIRIKFQKASVSRCTLYWRDEGLVLLNRLRYRPSNSRLWNMVNVTKAKGRHDLLDLKPFTEYEFQISSKLHLYKGSWSDWSESLRAQTPEEEPTGMLDVWYMKRHIDYSRQQISLFWKNLSVSEARGKILHYQVTLQELTGGKAMTQNITGHTSWTTVIPRTGNWAVAVSAANSKGSSLPTRINIMNLCEAGLLAPRQVSANSEGMDNILVTWQPPRKDPSAVQEYVVEWRELHPGGDTQVPLNWLRSRPYNVSALISEIPYRVSQNSHPINSLQPRVTYVLWMTALTAAGESSHGNEREFCLQGKANWMAFVAPSICIAIIMVGIFSTHYFQQKVFVLLAALRPQWCSREIPDPANSTCAKKYPIAEEKTQLPLDRLLIDWPTPEDPEPLVISEVLHQVTPVFRHPPCSNWPQREKGIQGHQASEKDMMHSASSPPPPRALQAESRQLVDLYKVLESRGSDPKPENPACPWTVLPAGDLPTHDGYLPSNIDDLPSHEAPLADSLEELEPQHISLSVFPSSSLHPLTFSCGDKLTLDQLKMRCDSLML

SEQ ID NO: 6876 - protein, 230 aa, Homo sapiens
  SITE 1: note = misc_feature - Xaa can be any naturally occurring amino acid
XQKGEQGTVACTWERGRDTHLYTEYTLQLSGPKNLTWQKQCKDIYCDYLDFGINLTPESPESNFTAKVTAVNSLGSSSSLPSTFTFLDIVRPLPPWDIRIKFQKASVSRCTLYWRDEGLVLLNRLRYRPSNSRLWNMVNVTKAKGRHDLLDLKPFTEYEFQISSKLHLYKGSWSDWSESLRAQTPEEEPTGMLDVWYMKRHIDYSRQQISLFWKVSFKRQLKTQGNKTEG

SEQ ID NO: 6877 - protein, 144 aa, Homo sapiens
MALLLTTVIALTCLGGFASPGPVPPSTALRELIEELVNITQNQKAPLCNGSMVWSINLTAGMYCAALESLINVSGCSAIEKTQRMLSGFCPHKVSAGQFSSLHVRDTKIEVAQFVKDLLLHLKKLFREGQFNNFESIIICRDRT

SEQ ID NO: 6878 - protein, 146 aa, Homo sapiens
MHPLLNPLLLALGLMALLLTTVIALTCLGGFASPGPVPPSTALRELIEELVNITQNQKAPLCNGSMVWSINLTAGMYCAALESLINVSGCSAIEKTQRMLSGFCPHKVSAGQFSSLHVRDTKIEVAQFVKDLLLHLKKLFREGQFN

SEQ ID NO: 6879 - protein, 279 aa, Homo sapiens
MEWPARLCGLWALLLCAGGGGGGGGAAPTETQPPVTNLSVSVENLCTVIWTWNPPEGASSNCSLWYFSHFGDKQDKKIAPETRRSIEVPLNERICLQVGSQCSTNESEKPSILVEKCISPPEGDPESAVTELQCIWHNLSYMKCSWLPGRNTSPDTNYTLYYWHRSLEKIHQCENIFREGQYFGCSFDLTKVKDSSFEQHSVQIMVKDNAGKIKPSFNIVPLTSRVKPDPPHIKNLSFHNDDLYVQWENPQNFISRCLFYEVEVNNSQTETHNVFYVRF

SEQ ID NO: 6880 - protein, 427 aa, Homo sapiens
MEWPARLCGLWALLLCAGGGGGGGGAAPTETQPPVTNLSVSVENLCTVIWTWNPPEGASSNCSLWYFSHFGDKQDKKIAPETRRSIEVPLNERICLQVGSQCSTNESEKPSILVEKCISPPEGDPESAVTELQCIWHNLSYMKCSWLPGRNTSPDTNYTLYYWHRSLEKIHQCENIFREGQYFGCSFDLTKVKDSSFEQHSVQIMVKDNAGKIKPSFNIVPLTSRVKPDPPHIKNLSFHNDDLYVQWENPQNFISRCLFYEVEVNNSQTETHNVFYVQEAKCENPEFERNVENTSCFMVPGVLPDTLNTVRIRVKTNKLCYEDDKLWSNWSQEMSIGKKRNSTLYITMLLIVPVIVAGAIIVLLLYLKRLKIIIFPPIPDPGKIFKEMFGDQNDDTLHWKKYDIYEKQTKEETDSVVLIENLKKASQ

SEQ ID NO: 6881 - protein, 308 aa, Homo sapiens
MAPRRARGCRTLGLPALLLLLLLRPPATRDARDRLAVLAGRSRISESFNHEVQTHEACVRLRTMENCPQCHHHRTSRQQAGITCPPPMSVEHADIWVKSYSLYSRERYICNSGFKRKAGTSSLTECVLNKATNVAHWTTPSLKCIRDPALVHQRPAPPSTVTTAGVTPQPESLSPSGKEPAASSPSSNNTAATTAAIVPGSQLMPSKSPSTGTTEISSHESSHGTPSQTTAKNWELTASASHQPPGVYPQGHSDTTVAISTSTVLLCGLSAVSLLACYLKSSLDAFIKIRGGFSTWLLGLPHSTVGSG

SEQ ID NO: 6882 - protein, 346 aa, Homo sapiens
MAPRRARGCRTLGLPALLLLLLLRPPATRDARDRLAVLAGRSRISESFNHEVQTHEACVRLRTMENCPQCHHHRTSRQQAGITCPPPMSVEHADIWVKSYSLYSRERYICNSGFKRKAGTSSLTECVLNKATNVAHWTTPSLKCIRDPALVHQRPAPPSTVTTAGVTPQPESLSPSGKEPAASSPSSNNTAATTAAIVPGSQLMPSKSPSTGTTEISSHESSHGTPSQTTAKNWELTASASHQPPGVYPQGHSDTTVAISTSTVLLCGLSAVSLLACYLKSSSHSRELTLLTLKWPKELLLLRRDISPALVEGAGQMPRASAPRQLQTGQPRMTSVLPRLCLSFGS

SEQ ID NO: 6883 - protein, 305 aa, Homo sapiens
MAPRRARGCRTLGLPALLLLLLLRPPATRDARDRLAVLAGRSRISESFNHEVQTHEACVRLRTMENCPQCHHHRTSRQQAGITCPPPMSVEHADIWVKSYSLYSRERYICNSGFKRKAGTSSLTECVLNKATNVAHWTTPSLKCIRDPALVHQRPAPPSTVTTAGVTPQPESLSPSGKEPAASSPSSNNTAATTAAIVPGSQLMPSKSPSTGTTEISSHESSHGTPSQTTAKNWELTASASHQPPGVYPQGHSDTTGRKQHLLPDFQASFQRDCINKHIEDKECWTVASFLLFCTMFVSTCWYTL

SEQ ID NO: 6884 - protein, 331 aa, Homo sapiens
MAPRRARGCRTLGLPALLLLLLLRPPATRDARDRLAVLAGRSRISESFNHEVQTHEACVRLRTMENCPQCHHHRTSRQQAGITCPPPMSVEHADIWVKSYSLYSRERYICNSGFKRKAGTSSLTECVLNKATNVAHWTTPSLKCIRDPALVHQRPAPPSTVTTAGVTPQPESLSPSGKEPAASSPSSNNTAATTAAIVPGSQLMPSKSPSTGTTEISSHESSHGTPSQTTAKNWELTASASHQPPGVYPQGHSDTTVAISTSTVLLCGLSAVSLLACYLKSRWLAKRSLPGDAEAPNMSRGGRNAWEQLSRAPATSLLRTPVESALSASRP

SEQ ID NO: 6885 - protein, 154 aa, Homo sapiens
MAPRRARGCRTLGLPALLLLLLLRPPATREPAASSPSSNNTAATTAAIVPGSQLMPSKSPSTGTTEISSHESSHGTPSQTTAKNWELTASASHQPPGVYPQGHSDTTVAISTSTVLLCGLSAVSLLACYLKSRASVCSCHPRSAGHTCSVGSVC

SEQ ID NO: 6886 - protein, 169 aa, Homo sapiens
MAPRRARGCRTLGLPALLLLLLLRPPATREPAASSPSSNNTAATTAAIVPGSQLMPSKSPSTGTTEISSHESSHGTPSQTTAKNWELTASASHQPPGVYPQGHSDTTVAISTSTVLLCGLSAVSLLACYLKSRQTPPLASVEMEAMEALPVTWGTSSRDEDLENCSHHL

SEQ ID NO: 6887 - protein, 172 aa, Homo sapiens
MAPRRARGCRTLGLPALLLLLLLRPPATRGITCPPPMSVEHADIWVKSYSLYSRERYICNSGFKRKAGTSSLTECVLNKATNVAHWTTPSLKCIKPAASSPSSNNTAATTAAIVPGSQLMPSKSPSTGTTEISSHESSHGTPSQTTAKNWELTASASHQPPGVYPQGHSDTT

SEQ ID NO: 6888 - protein, 219 aa, Homo sapiens
MAPRRARGCRTLGLPALLLLLLLRPPATRGITCPPPMSVEHADIWVKSYSLYSRERYICNSGFKRKAGTSSLTECVLNKATNVAHWTTPSLKCIKPAASSPSSNNTAATTAAIVPGSQLMPSKSPSTGTTEISSHESSHGTPSQTTAKNWELTASASHQPPGVYPQGHSDTTVAISTSTVLLCGLSAVSLLACYLKSRASVCSCHPRSAGHTCSVGSVC

SEQ ID NO: 6889 - protein, 234 aa, Homo sapiens
MAPRRARGCRTLGLPALLLLLLLRPPATRGITCPPPMSVEHADIWVKSYSLYSRERYICNSGFKRKAGTSSLTECVLNKATNVAHWTTPSLKCIKPAASSPSSNNTAATTAAIVPGSQLMPSKSPSTGTTEISSHESSHGTPSQTTAKNWELTASASHQPPGVYPQGHSDTTVAISTSTVLLCGLSAVSLLACYLKSRQTPPLASVEMEAMEALPVTWGTSSRDEDLENCSHHL

SEQ ID NO: 6890 - protein, 252 aa, Homo sapiens
MAPRRARGCRTLGLPALLLLLLLRPPATRGITCPPPMSVEHADIWVKSYSLYSRERYICNSGFKRKAGTSSLTECVLNKATNVAHWTTPSLKCIRDPALVHQRPAPPSTVTTAGVTPQPESLSPSGKEPAASSPSSNNTAATTAAIVPGSQLMPSKSPSTGTTEISSHESSHGTPSQTTAKNWELTASASHQPPGVYPQGHSDTTVAISTSTVLLCGLSAVSLLACYLKSRASVCSCHPRSAGHTCSVGSVC

SEQ ID NO: 6891 - protein, 267 aa, Homo sapiens
MAPRRARGCRTLGLPALLLLLLLRPPATRGITCPPPMSVEHADIWVKSYSLYSRERYICNSGFKRKAGTSSLTECVLNKATNVAHWTTPSLKCIRDPALVHQRPAPPSTVTTAGVTPQPESLSPSGKEPAASSPSSNNTAATTAAIVPGSQLMPSKSPSTGTTEISSHESSHGTPSQTTAKNWELTASASHQPPGVYPQGHSDTTVAISTSTVLLCGLSAVSLLACYLKSRQTPPLASVEMEAMEALPVTWGTSSRDEDLENCSHHL

SEQ ID NO: 6892 - protein, 353 aa, Homo sapiens
MRLAGRQVPEQRSPPPPGLGSARPGSPAVSCGAAAMAPRRARGCRTLGLPALLLLLLLRPPATRDARDRLAVLAGRSRISESFNHEVQTHEACVRLRTMENCPQCHHHRTSRQQAGITCPPPMSVEHADIWVKSYSLYSRERYICNSGFKRKAGTSSLTECVLNKATNVAHWTTPSLKCIRDPALVHQRPAPPSTVTTAGVTPQPESLSPSGKEPAASSPSSNNTAATTAAIVPGSQLMPSKSPSTGTTEISSHESSHGTPSQTTAKNWELTASASHQPPGVYPQGHSDTTVAISTSTVLLCGLSAVSLLACYLKSRQTPPLASVEMEAMEALPVTWGTSSRDEDLENCSHHL

SEQ ID NO: 6893 - protein, 172 aa, Homo sapiens
MSVEHADIWVKSYSLYSRERYICNSGFKRKAGTSSLTECVLNKATNVAHWTTPSLKCIKPAASSPSSNNTAATTAAIVPGSQLMPSKSPSTGTTEISSHESSHGTPSQTTAKNWELTASASHQPPGVYPQGHSDTTVAISTSTVLLCGLSAVSLLACYLKSRQTPPLASVEM

SEQ ID NO: 6894 - protein, 148 aa, Homo sapiens
MSVEHADIWVKSYSLYSRERYICNSGFKRKAGTSSLTECVLNKATNVAHWTTPSLKCINPALVHQRPAPPSTVTTAGVTPQPESLSPSGKEPAASSPSSNNTAATTAAIVPGSQLMPSKSPSTGTTEISSHESSHGTPSQTTAKNWEL

SEQ ID NO: 6895 - protein, 231 aa, Homo sapiens
MSVEHADIWVKSYSLYSRERYICNSGFKRKAGTSSLTECVLNKATNVAHWTTPSLKCIRDPALVHQRPAPPSTVTTAGVTPQPESLSPSGKEPAASSPSSNNTAATTAAIVPGSQLMPSKSPSTGTTEISSHESSHGTPSQTTAKNWELTASASHQPPGVYPQGHSDTTVAISTSTVLLCGLSAVSLLACYLKSRQTPPLASVEMEAMEALPVTWGTSSRDEDLENCSHHL

SEQ ID NO: 6896 - protein, 209 aa, Homo sapiens
  SITE 1: note = misc_feature - Xaa can be any naturally occurring amino acid
XITCPPPMSVEHADIWVKSYSLYSRERYICNSGFKRKAGTSSLTECVLNKATNVAHWTTPSLKCIRTTEISSHESSHGTPSQTTAKNWELTASASHQPPGVYPQGHSDTTGRKQHLLPDFQASFQRDCINKHIEDKECWTVASFLLFLAISTSTVLLCGLSAVSLLACYLKSRQTPPLASVEMEAMEALPVTWGTSSRDEDLENCSHHL

SEQ ID NO: 6897 - protein, 155 aa, Homo sapiens
  SITE 1: note = misc_feature - Xaa can be any naturally occurring amino acid
XLVHQRPAPPSTVTTAGVTPQPESLSPSGKEPAASSPSSNNTAATTAAIVPGSQLMPSKSPSTGTTEISSHESSHGTPSQTTAKNWELTASASHQPPGVYPQGHSDTTVAISTSTVLLCGLSAVSLLACYLKSRASVCSCHPRSAGHTCSVGSVC

SEQ ID NO: 6898 - protein, 198 aa, Homo sapiens
  SITE 1: note = misc_feature - Xaa can be any naturally occurring amino acid
XPAASSPSSNNTAATTAAIVPGSQLMPSKSPSTGTTEISSHESSHGTPSQTTAKNWELTASASHQPPGVYPQGHSDTTVAISTSTVLLCGLSAVSLLACYLKSSSQRKVTYLRLSVNYKAPPGVGDVYREDTSVWAPPNDPVSSCAARTDREPEKVEEMLSPVNPLHRRIQEEENSSQRHFTYICIYTSLSVISTHYI

SEQ ID NO: 6899 - protein, 155 aa, Homo sapiens
MTPGKTSLVSLLLLLSLEAIVKAGITIPRNPGCPNSEDKNFPRTVMVNLNIHNRNTNTNPKRSSDYYNRSTSPWNLHRNEDPERYPSVIWEAKCRHLGCINADGNVDYHMNSVPIQQEILVLRREPPHCPNSFRLEKILVSVGCTCVTPIVHHVA

SEQ ID NO: 6900 - protein, 180 aa, Homo sapiens
MDWPHNLLFLLTISIFLGLGQPRSPKSKRKGQGRPGPLAPGPHQVPLDLVSRMKPYARMEEYERNIEEMVAQLRNSSELAQRKCEVNLQLWMSNKRSLSPWGYSINHDPSRIPVDLPEARCLCLGCVNPFTMQEDRSMVSVPVFSQVPVRRRLCPPPPRTGPCRQRAVMETIAVGCTCIF

SEQ ID NO: 6901 - protein, 197 aa, Homo sapiens
MTLLPGLLFLTWLHTCLAHHDPSLRGHPHSHGTPHCYSAEELPLGQAPPHLLARGAKWGQALPVALVSSLEAASHRGRHERPSATTQCPVLRPEEVLEADTHQRSISPWRYRVDTDEDRYPQKLAFAECLCRGCIDARTGRETAALNSVRLLQSLLVLRRRPCSRDGSGLPTPGAFAFHTEFIHVPVGCTCVLPRSV

SEQ ID NO: 6902 - protein, 35 aa, Homo sapiens
MLGALVWMLVAGFLLALPPSWAAGAPRAGRRPARP

SEQ ID NO: 6903 - protein, 202 aa, Homo sapiens
MLVAGFLLALPPSWAAGAPRAGRRPARPRGCADRPEELLEQLYGRLAAGVLSAFHHTLQLGPREQARNASCPAGGRPADRRFRPPTNLRSVSPWAYRISYDPARYPRYLPEAYCLCRGCLTGLFGEEDVRFRSAPVYMPTVVLRRTPACAGGRSVYTEAYVTIPVGCTCVPEPEKDADSINSSIDKQGAKLLLGPNDAPAGP

SEQ ID NO: 6904 - protein, 90 aa, Homo sapiens
  SITE 1: note = misc_feature - Xaa can be any naturally occurring amino acid
XRPRGCADRPEELLEQLYGRLAAGVLSAFHHTLQLGPREQARNASCPAGGRPADRRFRPPTNLRSVSPWAYSSVSITSNHPWRTRPLFLD

SEQ ID NO: 6905 - protein, 163 aa, Homo sapiens
MTVKTLHGPAMVKYLLLSILGLAFLSEAAARKIPKVGHTFFQKPESCPPVPGGSMKLDIGIINENQRVSMSRNIESRSTSPWNYTVTWDPNRYPSEVVQAQCRNLGCINAQGKEDISMNSVPIQQETLVVRRKHQGCSVSFQLEKVLVTVGCTCVTPVIHHVQ

SEQ ID NO: 6906 - protein, 866 aa, Homo sapiens
MGAARSPPSAVPGPLLGLLLLLLGVLAPGGASLRLLDHRALVCSQPGLNCTVKNSTCLDDSWIHPRNLTPSSPKDLQIQLHFAHTQQGDLFPVAHIEWTLQTDASILYLEGAELSVLQLNTNERLCVRFEFLSKLRHHHRRWRFTFSHFVVDPDQEYEVTVHHLPKPIPDGDPNHQSKNFLVPDCEHARMKVTTPCMSSGSLWDPNITVETLEAHQLRVSFTLWNESTHYQILLTSFPHMENHSCFEHMHHIPAPRPEEFHQRSNVTLTLRNLKGCCRHQVQIQPFFSSCLNDCLRHSATVSCPEMPDTPEPIPDYMPLWVYWFITGISILLVGSVILLIVCMTWRLAGPGSEKYSDDTKYTDGLPAADLIPPPLKPRKVWIIYSADHPLYVDVVLKFAQFLLTACGTEVALDLLEEQAISEAGVMTWVGRQKQEMVESNSKIIVLCSRGTRAKWQALLGRGAPVRLRCDHGKPVGDLFTAAMNMILPDFKRPACFGTYVVCYFSEVSCDGDVPDLFGAAPRYPLMDRFEEVYFRIQDLEMFQPGRMHRVGELSGDNYLRSPGGRQLRAALDRFRDWQVRCPDWFECENLYSADDQDAPSLDEEVFEEPLLPPGTGIVKRAPLVREPGSQACLAIDPLVGEEGGAAVAKLEPHLQPRGQPAPQPLHTLVLAAEEGALVAAVEPGPLADGAAVRLALAGEGEACPLLGSPGAGRNSVLFLPVDPEDSPLGSSTPMASPDLLPEDVREHLEGLMLSLFEQSLSCQAQGGCSRPAMVLTDPHTPYEEEQRQSVQSDQGYISRSSPQPPEGLTEMEEEEEEEQDPGKPALPLSPEDLESLRSLQRQLLFRQLQKNSGWDTMGSESEGPSA

SEQ ID NO: 6907 - protein, 832 aa, Homo sapiens
MGAARSPPSAVPGPLLGLLLLLLGVLAPGGASLRLLDHRALVCSQPGLNCTVKNSTCLDDSWIHPRNLTPSSPKDLQIQLHFAHTQQGDLFPVAHIEWTLQTDASILYLEGAELSVLQLNTNERLCVRFEFLSKLRHHHRRWRFTFSHFVVDPDQEYEVTVHHLPKPIPDGDPNHQSKNFLVPDCEHARMKVTTPCMSSGSLWDPNITVETLEAHQLRVSFTLWNESTHYQILLTSFPHMENHSCFEHMHHIPAPRPEEFHQRSNVTLTLRNLKGCCRHQVQIQPFFSSCLNDCLRHSATVSCPEMPDTPEPIPGPGSEKYSDDTKYTDGLPAADLIPPPLKPRKVWIIYSADHPLYVDVVLKFAQFLLTACGTEVALDLLEEQAISEAGVMTWVGRQKQEMVESNSKIIVLCSRGTRAKWQALLGRGAPVRLRCDHGKPVGDLFTAAMNMILPDFKRPACFGTYVVCYFSEVSCDGDVPDLFGAAPRYPLMDRFEEVYFRIQDLEMFQPGRMHRVGELSGDNYLRSPGGRQLRAALDRFRDWQVRCPDWFECENLYSADDQDAPSLDEEVFEEPLLPPGTGIVKRAPLVREPGSQACLAIDPLVGEEGGAAVAKLEPHLQPRGQPAPQPLHTLVLAAEEGALVAAVEPGPLADGAAVRLALAGEGEACPLLGSPGAGRNSVLFLPVDPEDSPLGSSTPMASPDLLPEDVREHLEGLMLSLFEQSLSCQAQGGCSRPAMVLTDPHTPYEEEQRQSVQSDQGYISRSSPQPPEGLTEMEEEEEEEQDPGKPALPLSPEDLESLRSLQRQLLFRQLQKNSGWDTMGSESEGPSA

SEQ ID NO: 6908 - protein, 330 aa, Homo sapiens
MPVPWFLLSLALGRSPVVLSLERLVGPQDATHCSPGLSCRLWDSDILCLPGDIVPAPGPVLAPTHLQTELVLRCQKETDCDLCLRVAVHLAVHASLQAQVVLSFQAYPTARCVLLEVQVPAALVQFGQSVGSVVYDCFEAALGSEVRIWSYTQPRYEKELNHTQQLPALPWLNVSADGDNVHLVLNVSEEQHFGLSLYWNQVQGPPKPRWHKNLTGPQIITLNHTDLVPCLCIQVWPLEPDSVRTNICPFREDPRAHQNLWQAARLQLLTLQSWLLDAPCSLPAEAALCWRAPGGDPCQPLVPPLSWENVTVDKVLEFPLLKGHPNLCVQ

SEQ ID NO: 6909 - protein, 242 aa, Homo sapiens
MPVPWFLLSLALGRSPVVLSLERLVGPQDATHCSPGLSCRLWDSDILCLPGDIVPAPGPVLAPTHLQTELVLRCQKETDCDLCLRVAVHLAVHASLQAQVVLSFQAYPTARCVLLEVQVPAALVQFGQSVGSVVYDCFEAALGSEVRIWSYTQPRYEKELNHTQQLPALPWLNVSADGDNVHLVLNVSEEQHFGLSLYWNQVQGPPKPRWHKNLVRPPPSQVHSHCRPMPVQRTQCHIREDP

SEQ ID NO: 6910 - protein, 416 aa, Homo sapiens
MPVPWFLLSLALGRSPVVLSLERLVGPQDATHCSPGLSCRLWDSDILCLPGDIVPAPGPVLAPTHLQTELVLRCQKETDCDLCLRVAVHLAVHASLQAQVVLSFQAYPTARCVLLEVQVPAALVQFGQSVGSVVYDCFEAALGSEVRIWSYTQPRYEKELNHTQQLPDCRGLEVWNSIPSCWALPWLNVSADGDNVHLVLNVSEEQHFGLSLYWNQVQGPPKPRWHKNLTGPQIITLNHTDLVPCLCIQVWPLEPDSVRTNICPFREDPRAHQNLWQAARLQLLTLQSWLLDAPCSLPAEAALCWRAPGGDPCQPLVPPLSWENVTVDKVLEFPLLKGHPNLCVQVNSSEKLQLQECLWADSLGPLKDDVLLLETRGPQDNRSLCALEPSGCTSLPSKASTRAARLGEYLLQDLQS

SEQ ID NO: 6911 - protein, 99 aa, Homo sapiens
MPVPWFLLSLALGRSPVVLSLERLVGPQDATHCSPGLSCRLWDSDILCLPGDIVPAPGPVLAPTHLQTELVLRCQKETDCDLCLRVAVHLAVHGEQVIL

SEQ ID NO: 6912 - protein, 156 aa, Homo sapiens
MPVPWFLLSLALGRSPVVLSLERLVGPQDATHCSPGLSCRLWDSDILCLPGDIVPAPGPVLAPTHLQTELVLRCQKETDCDLCLRVAVHLAVHGHWEEPEDEEKFGGAADSGVEEPRNASLQAQVVLSFQAYPTARCVLLEVQVPAALVQFGLCGI

SEQ ID NO: 6913 - protein, 705 aa, Homo sapiens
MPVPWFLLSLALGRSPVVLSLERLVGPQDATHCSPGLSCRLWDSDILCLPGDIVPAPGPVLAPTHLQTELVLRCQKETDCDLCLRVAVHLAVHGHWEEPEDEEKFGGAADSGVEEPRNASLQAQVVLSFQAYPTARCVLLEVQVPAALVQFGQSVGSVVYDCFEAALGSEVRIWSYTQPRYEKELNHTQQLPALPWLNVSADGDNVHLVLNVSEEQHFGLSLYWNQVQGPPKPRWHKNLTGPQIITLNHTDLVPCLCIQVWPLEPDSVRTNICPFREDPRAHQNLWQAARLQLLTLQSWLLDAPCSLPAEAALCWRAPGGDPCQPLVPPLSWENVTVDKVLEFPLLKGHPNLCVQVNSSEKLQLQECLWADSLGPLKDDVLLLETRGPQDNRSLCALEPSGCTSLPSKASTRAARLGEYLLQDLQSGQCLQLWDDDLGALWACPMDKYIHKRWALVWLACLLFAAALSLILLLKKDHAKGWLRLLKQDVRSGAAARGRAALLLYSADDSGFERLVGALASALCQLPLRVAVDLWSRRELSAQGPVAWFHAQRRQTLQEGGVVVLLFSPGAVALCSEWLQDGVSGPGAHGPHDAFRASLSCVLPDFLQGRAPGSYVGACFDRLLHPDAVPALFRTVPVFTLPSQLPDFLGALQQPRAPRSGRLQERAEQVSRALQPALDSYFHPPGTPAPGRGVGPGAGPGAGDGT

SEQ ID NO: 6914 - protein, 688 aa, Homo sapiens
MPVPWFLLSLALGRSPVVLSLERLVGPQDATHCSPGLSCRLWDSDILCLPGDIVPAPGPVLAPTHLQTELVLRCQKETDCDLCLRVAVHLAVHGHWEEPEDEEKFGGAADSGVEEPRNASLQAQVVLSFQAYPTARCVLLEVQVPAALVQFGQSVGSVVYDCFEAALGSEVRIWSYTQPRYEKELNHTQQLPALPWLNVSADGDNVHLVLNVSEEQHFGLSLYWNQVQGPPKPRWHKNLTGPQIITLNHTDLVPCLCIQVWPLEPDSVRTNICPFREDPRAHQNLWQAARLQLLTLQSWLLDAPCSLPAEAALCWRAPGGDPCQPLVPPLSWENVTVDVNSSEKLQLQECLWADSLGPLKDDVLLLETRGPQDNRSLCALEPSGCTSLPSKASTRAARLGEYLLQDLQSGQCLQLWDDDLGALWACPMDKYIHKRWALVWLACLLFAAALSLILLLKKDHAKGWLRLLKQDVRSGAAARGRAALLLYSADDSGFERLVGALASALCQLPLRVAVDLWSRRELSAQGPVAWFHAQRRQTLQEGGVVVLLFSPGAVALCSEWLQDGVSGPGAHGPHDAFRASLSCVLPDFLQGRAPGSYVGACFDRLLHPDAVPALFRTVPVFTLPSQLPDFLGALQQPRAPRSGRLQERAEQVSRALQPALDSYFHPPGTPAPGRGVGPGAGPGAGDGT

SEQ ID NO: 6915 - protein, 690 aa, Homo sapiens
MPVPWFLLSLALGRSPVVLSLERLVGPQDATHCSPGLSCRLWDSDILCLPGDIVPAPGPVLAPTHLQTELVLRCQKETDCDLCLRVAVHLAVHGHWEEPEDEEKFGGAADSGVEEPRNASLQAQVVLSFQAYPTARCVLLEVQVPAALVQFGQSVGSVVYDCFEAALGSEVRIWSYTQPRYEKELNHTQQLPDCRGLEVWNSIPSCWALPWLNVSADGDNVHLVLNVSEEQHFGLSLYWNQVQGPPKPRWHKNLTGPQIITLNHTDLVPCLCIQVWPLEPDSVRTNICPFREDPRAHQNLWQAARLQLLTLQSWLLDAPCSLPAEAALCWRAPGGDPCQPLVPPLSWENVTVDVNSSEKLQLQECLWADSLGPLKDDVLLLETRGPQDNRSLCALEPSGCTSLPSKASTRAARLGEYLLQDLQSGQCLQLWDDDLGALWACPMDKYIHKRWALVWLACLLFAAALSLILLLKKDHAKAAARGRAALLLYSADDSGFERLVGALASALCQLPLRVAVDLWSRRELSAQGPVAWFHAQRRQTLQEGGVVVLLFSPGAVALCSEWLQDGVSGPGAHGPHDAFRASLSCVLPDFLQGRAPGSYVGACFDRLLHPDAVPALFRTVPVFTLPSQLPDFLGALQQPRAPRSGRLQERAEQVSRALQPALDSYFHPPGTPAPGRGVGPGAGPGAGDGT

SEQ ID NO: 6916 - protein, 720 aa, Homo sapiens
MPVPWFLLSLALGRSPVVLSLERLVGPQDATHCSPGLSCRLWDSDILCLPGDIVPAPGPVLAPTHLQTELVLRCQKETDCDLCLRVAVHLAVHGHWEEPEDEEKFGGAADSGVEEPRNASLQAQVVLSFQAYPTARCVLLEVQVPAALVQFGQSVGSVVYDCFEAALGSEVRIWSYTQPRYEKELNHTQQLPDCRGLEVWNSIPSCWALPWLNVSADGDNVHLVLNVSEEQHFGLSLYWNQVQGPPKPRWHKNLTGPQIITLNHTDLVPCLCIQVWPLEPDSVRTNICPFREDPRAHQNLWQAARLQLLTLQSWLLDAPCSLPAEAALCWRAPGGDPCQPLVPPLSWENVTVDKVLEFPLLKGHPNLCVQVNSSEKLQLQECLWADSLGPLKDDVLLLETRGPQDNRSLCALEPSGCTSLPSKASTRAARLGEYLLQDLQSGQCLQLWDDDLGALWACPMDKYIHKRWALVWLACLLFAAALSLILLLKKDHAKGWLRLLKQDVRSGAAARGRAALLLYSADDSGFERLVGALASALCQLPLRVAVDLWSRRELSAQGPVAWFHAQRRQTLQEGGVVVLLFSPGAVALCSEWLQDGVSGPGAHGPHDAFRASLSCVLPDFLQGRAPGSYVGACFDRLLHPDAVPALFRTVPVFTLPSQLPDFLGALQQPRAPRSGRLQERAEQVSRALQPALDSYFHPPGTPAPGRGVGPGAGPGAGDGT

SEQ ID NO: 6917 - protein, 707 aa, Homo sapiens
MPVPWFLLSLALGRSPVVLSLERLVGPQDATHCSPGLSCRLWDSDILCLPGDIVPAPGPVLAPTHLQTELVLRCQKETDCDLCLRVAVHLAVHGHWEEPEDEEKFGGAADSGVEEPRNASLQAQVVLSFQAYPTARCVLLEVQVPAALVQFGQSVGSVVYDCFEAALGSEVRIWSYTQPRYEKELNHTQQLPDCRGLEVWNSIPSCWALPWLNVSADGDNVHLVLNVSEEQHFGLSLYWNQVQGPPKPRWHKNLTGPQIITLNHTDLVPCLCIQVWPLEPDSVRTNICPFREDPRAHQNLWQAARLQLLTLQSWLLDAPCSLPAEAALCWRAPGGDPCQPLVPPLSWENVTVDKVLEFPLLKGHPNLCVQVNSSEKLQLQECLWADSLGPLKDDVLLLETRGPQDNRSLCALEPSGCTSLPSKASTRAARLGEYLLQDLQSGQCLQLWDDDLGALWACPMDKYIHKRWALVWLACLLFAAALSLILLLKKDHAKAAARGRAALLLYSADDSGFERLVGALASALCQLPLRVAVDLWSRRELSAQGPVAWFHAQRRQTLQEGGVVVLLFSPGAVALCSEWLQDGVSGPGAHGPHDAFRASLSCVLPDFLQGRAPGSYVGACFDRLLHPDAVPALFRTVPVFTLPSQLPDFLGALQQPRAPRSGRLQERAEQVSRALQPALDSYFHPPGTPAPGRGVGPGAGPGAGDGT

SEQ ID NO: 6918 - protein, 98 aa, Homo sapiens
MPVPWFLLSLALGRSPVVLSLERLVGPQDATHCSPGLSCRLWDSDILCLPGDIVPAPGPVLAPTHLQTELVLRCQKETDCDLCLRVAVHLAVHGLCGI

SEQ ID NO: 6919 - protein, 123 aa, Homo sapiens
MPVPWFLLSLALGRSPVVLSLERLVGPQDATHCSPGLSCRLWDSDILCLPGDIVPAPGPVLAPTHLQTELVLRCQKETDCDLCLRVAVHLAVHGLPYCPLRPAGGASACCPCAVWSVCGLCGI

SEQ ID NO: 6920 - protein, 91 aa, Homo sapiens
MPVPWFLLSLALGRSPVVLSLERLVGPQDATHCSPGLSCRLWGATKFWAWNSFSSHPLLHTQTVTYSACLGTSCLLRAPCWRLRTCRQSWC

SEQ ID NO: 6921 - protein, 70 aa, Homo sapiens
MPVPWFLLSLALGRSPVVLSLERLVGPQDATHCSPGLSCRLWVTYSACLGTSCLLRAPCWRLRTCRQSWC

SEQ ID NO: 6922 - protein, 44 aa, Homo sapiens
MPVPWFLLSLALGRSPVVLSLERLVGPQDATHCSPNCPVWSVWC

SEQ ID NO: 6923 - protein, 791 aa, Homo sapiens
MPVPWFLLSLALGRSPVVLSLERLVGPQDATHCSPVSLEPWGDEERLRVQFLAQQSLSLAPVTAATARTALSGLSGADGRREERGRGKSWVCLSLGGSGNTEPQKKGLSCRLWDSDILCLPGDIVPAPGPVLAPTHLQTELVLRCQKETDCDLCLRVAVHLAVHGHWEEPEDEEKFGGAADSGVEEPRNASLQAQVVLSFQAYPTARCVLLEVQVPAALVQFGQSVGSVVYDCFEAALGSEVRIWSYTQPRYEKELNHTQQLPDCRGLEVWNSIPSCWALPWLNVSADGDNVHLVLNVSEEQHFGLSLYWNQVQGPPKPRWHKNLTGPQIITLNHTDLVPCLCIQVWPLEPDSVRTNICPFREDPRAHQNLWQAARLQLLTLQSWLLDAPCSLPAEAALCWRAPGGDPCQPLVPPLSWENVTVDKVLEFPLLKGHPNLCVQVNSSEKLQLQECLWADSLGPLKDDVLLLETRGPQDNRSLCALEPSGCTSLPSKASTRAARLGEYLLQDLQSGQCLQLWDDDLGALWACPMDKYIHKRWALVWLACLLFAAALSLILLLKKDHAKGWLRLLKQDVRSGAAARGRAALLLYSADDSGFERLVGALASALCQLPLRVAVDLWSRRELSAQGPVAWFHAQRRQTLQEGGVVVLLFSPGAVALCSEWLQDGVSGPGAHGPHDAFRASLSCVLPDFLQGRAPGSYVGACFDRLLHPDAVPALFRTVPVFTLPSQLPDFLGALQQPRAPRSGRLQERAEQVSRALQPALDSYFHPPGTPAPGRGVGPGAGPGAGDGT

SEQ ID NO: 6924 - protein, 173 aa, Homo sapiens
MGSSRLAALLLPLLLIVIDLSDSAGIGFRHLPHWNTRCPLASHTDDSFTGLQRGLFHLLVQKSKKSSTFKFYRRHKMPAPAQRKLLPRRHLSEKSHHISIPSPDISHKGLRSKRTQPSDPETWESLPRLDSQRHGGPEFSFDLLPEARAIRVTISSGPEVSVRLCHQWALECE

SEQ ID NO: 6925 - protein, 667 aa, Homo sapiens
MGSSRLAALLLPLLLIVIDLSDSAGIGFRHLPHWNTRCPLASHTDDSFTGSSAYIPCRTWWALFSTKPWCVRVWHCSRCLCQHLLSGGSGLQRGLFHLLVQKSKKSSTFKFYRRHKMPAPAQRKLLPRRHLSEKSHHISIPSPDISHKGLRSKRTQPSDPETWESLPRLDSQRHGGPEFSFDLLPEARAIRVTISSGPEVSVRLCHQWALECEELSSPYDVQKIVSGGHTVELPYEFLLPCLCIEASYLQEDTVRRKKCPFQSWPEAYGSDFWKSVHFTDYSQHTQMVMALTLRCPLKLEAALCQRHDWHTLCKDLPNATARESDGWYVLEKVDLHPQLCFKFSFGNSSHVECPHQTGSLTSWNVSMDTQAQQLILHFSSRMHATFSAAWSLPGLGQDTLVPPVYTVSQARGSSPVSLDLIIPFLRPGCCVLVWRSDVQFAWKHLLCPDVSYRHLGLLILALLALLTLLGVVLALTCRRPQSGPGPARPVLLLHAADSEAQRRLVGALAELLRAALGGGRDVIVDLWEGRHVARVGPLPWLWAARTRVAREQGTVLLLWSGADLRPVSGPDPRAAPLLALLHAAPRPLLLLAYFSRLCAKGDIPPPLRALPRYRLLRDLPRLLRALDARPFAEATSWGRLGARQRRQSRLELCSRLEREAARLADLG

SEQ ID NO: 6926 - protein, 533 aa, Homo sapiens
MGSSRLAALLLPLLLIVIDLSDSAGIGFRHLPHWNTRCPLASHTDDSFTGSSAYIPCRTWWALFSTKPWCVRVWHCSRCLCQHLLSGGSGLQRGLFHLLVQKSKKSSTFKFYRRHKMPAPAQRKLLPRRHLSEKSHHISIPSPDISHKGLRSKRTQPSDPETWESLPRLDSQRHGGPEFSFDLLPEARAIRVTISSGPEVSVRLCHQWALECEELSSPYDVQKIVSGGHTVELPYEFLLPCLCIEASYLQEDTVRRKKCPFQSWPEAYGSDFWKSVHFTDYSQHTQMVMALTLRCPLKLEAALCQRHDWHTLCKDLPNATARESDGWYVLEKVDLHPQLCFKFSFGNSSHVECPHQTGSLTSWNVSMDTQAQQLILHFSSRMHATFSAAWSLPGLGQDTLVPPVYTVSQARGSSPVSLDLIIPFLRPGCCVLLHASLSSPGGEDAWLIGVGGSVPSGVAVRCPVCLEAPLVSGCLLQTPGALDPGTAGPPHPTGCCSGPHLPAPTVRPGPSAASAPPARGGLGGAAAPGGSAG

SEQ ID NO: 6927 - protein, 186 aa, Homo sapiens
MGSSRLAALLLPLLLIVIDLSDSAGIGFRHLPHWNTRCPLASHTEVLPISLAAPGGPSSPQSLGVCESGTVPAVCASICCQVAQVFNGASSTSWCRNPKSLPHSSSIGDTRCQHLLRGSCCLVVTCLRRAITFPSPPQTSPTRDFALKGPNLRIQRHGKVFPDWTHKGMEDPSSPLICCLRPGLFG

SEQ ID NO: 6928 - protein, 190 aa, Homo sapiens
MGSSRLAALLLPLLLIVIDLSDSAGIGFRHLPHWNTRCPLASHTRKLLPRRHLSEKSHHISIPSPDISHKGLRSKRTQPSDPETWESLPRLDSQRHGGPEFSFDLLPEARAIRVTISSGPEVSVRLCHQWALECEELSSPYDVQKIVSGGHTVELPYEFLLPCLCIEMARTSGSQCTSLTTASTLRWSWP

SEQ ID NO: 6929 - protein, 146 aa, Homo sapiens
MGSSRLAALLLPLLLIVIDLSDSAGIGFRHLPHWNTRCPLASHTVFNGASSTSWCRNPKSLPHSSSIGDTRCQHLLRGSCCLVVTCLRRAITFPSPPQTSPTRDFALKGPNLRIQRHGKVFPDWTHKGMEDPSSPLICCLRPGLFG

SEQ ID NO: 6930 - protein, 700 aa, Homo sapiens
MLAPFLLLLTHSRSPLSFRPCSHVPGALIAQKPMGSSRLAALLLPLLLIVIDLSDSAGIGFRHLPHWNTRCPLASHTDDSFTGSSAYIPCRTWWALFSTKPWCVRVWHCSRCLCQHLLSGGSGLQRGLFHLLVQKSKKSSTFKFYRRHKMPAPAQRKLLPRRHLSEKSHHISIPSPDISHKGLRSKRTQPSDPETWESLPRLDSQRHGGPEFSFDLLPEARAIRVTISSGPEVSVRLCHQWALECEELSSPYDVQKIVSGGHTVELPYEFLLPCLCIEASYLQEDTVRRKKCPFQSWPEAYGSDFWKSVHFTDYSQHTQMVMALTLRCPLKLEAALCQRHDWHTLCKDLPNATARESDGWYVLEKVDLHPQLCFKFSFGNSSHVECPHQTGSLTSWNVSMDTQAQQLILHFSSRMHATFSAAWSLPGLGQDTLVPPVYTVSQARGSSPVSLDLIIPFLRPGCCVLVWRSDVQFAWKHLLCPDVSYRHLGLLILALLALLTLLGVVLALTCRRPQSGPGPARPVLLLHAADSEAQRRLVGALAELLRAALGGGRDVIVDLWEGRHVARVGPLPWLWAARTRVAREQGTVLLLWSGADLRPVSGPDPRAAPLLALLHAAPRPLLLLAYFSRLCAKGDIPPPLRALPRYRLLRDLPRLLRALDARPFAEATSWGRLGARQRRQSRLELCSRLEREAARLADLG

SEQ ID NO: 6931 - protein, 194 aa, Homo sapiens
MTMRHNWTPDLSPLWVLLLCAHVVTLLVRATPVSQTTTAATASVRSTKDPCPSQPPVFPAAKQCPALEVTWPEVEVPLNGTLSLSCVACSRFPNFSILYWLGNGSFIEHLPGRLWEGSTSRERGSTGTQLCKALVLEQLTPALHSTNFSCVLVDPEQVVQRHVVLAQLWAGLRATLPPTQEALPSSHSSPQQQG

SEQ ID NO: 6932 - protein, 194 aa, Homo sapiens; identical to SEQ ID NO: 6931

SEQ ID NO: 6933 - protein, 194 aa, Homo sapiens; identical to SEQ ID NO: 6931

SEQ ID NO: 6934 - protein, 194 aa, Homo sapiens; identical to SEQ ID NO: 6931

SEQ ID NO: 6935 - protein, 194 aa, Homo sapiens; identical to SEQ ID NO: 6931

SEQ ID NO: 6936 - protein, 194 aa, Homo sapiens; identical to SEQ ID NO: 6931

SEQ ID NO: 6937 - protein, 199 aa, Homo sapiens
MTMRHNWTPDLSPLWVLLLCAHVVTLLVRATPVSQTTTAATASVRSTKDPCPSQPPVFPAAKQCPALEVTWPEVEVPLNGTLSLSCVACSRFPNFSILYWLGNGSFIEHLPGRLWEGSTSRERGSTGTQLCKALVLEQLTPALHSTNFSCVLVDPEQVVQRHVVLAQLWVRSPRRGLQEQEELCFHMWGGKGGLCQSSL

SEQ ID NO: 6938 - protein, 199 aa, Homo sapiens; identical to SEQ ID NO: 6937

SEQ ID NO: 6939 - protein, 163 aa, Homo sapiens
MTMRHNWTPDLSPLWVLLLCAHVVTLLVRATPVSQTTTAATASVRSTKDPCPSQPPVFPAAKQCPALEVTWPEVEVPLNGTLSLSCVACSRFPNFSILYWLGNGSFIEHLPGRLWEGSTSRERGSTGWAEGNLAPHPRSPALQPQQSTAAGLRLSTGPAAAQP

SEQ ID NO: 6940 - protein, 163 aa, Homo sapiens; identical to SEQ ID NO: 6939

SEQ ID NO: 6941 - protein, 115 aa, Homo sapiens
MTMRHNWTPDLSPLWVLLLCAHVVTLLVRATPVSQTTTAATASVRSTKDPCPSQPPVFPAAKQCPALEVTWPEVEVPLSWAEGNLAPHPRSPALQPQQSTAAGLRLSTGPAAAQP

SEQ ID NO: 6942 - protein, 170 aa, Homo sapiens
MNCRELPLTLWVLISVSTAESCTSRPHITVVEGEPFYLKHCSCSLAHEIETTTKSWYKSSGSQEHVELNPRSSSRIALHDCVLEFWPVELNDTGSYFFQMKNYTQKWKLNVIRRNKHSCFTERQVTSKIVEVKKFFQITCENSYYQTLVNSTSLYKIGPPICRKTSSGLH

SEQ ID NO: 6943 - protein, 541 aa, Homo sapiens
MNCRELPLTLWVLISVSTAESCTSRPHITVVEGEPFYLKHCSCSLAHEIETTTKSWYKSSGSQEHVELNPRSSSRIALHDCVLEFWPVELNDTGSYFFQMKNYTQKWKLNVIRRNKHSCFTERQVTSKIVEVKKFFQITCENSYYQTLVNSTSLYKNCKKLLLENNKNPTIKKNAEFEDQGYYSCVHFLHHNGKLFNITKTFNITIVEDRSNIVPVLLGPKLNHVAVELGKNVRLNCSALLNEEDVIYWMFGEENGSDPNIHEEKEMRIMTPEGKWHASKVLRIENIGESNLNVLYNCTVASTGGTDTKSFILVRKADMADIPGHVFTRGMIIAVLILVAVVCLVTVCVIYRVDLVLFYRHLTRRDETLTDGKTYDAFVSYLKECRPENGEEHTFAVEILPRVLEKHFGYKLCIFERDVVPGGAVVDEIHSLIEKSRRLIIVLSKSYMSNEVRYELESGLHEALVERKIKIILIEFTPVTDFTFLPQSLKLLKSHRVLKWKADKSLSYNSRFWKNLLYLMPAKTVKPGRDEPEVLPVLSES

SEQ ID NO: 6944 - protein, 541 aa, Homo sapiens; identical to SEQ ID NO: 6943

SEQ ID NO: 6945 - protein, 541 aa, Homo sapiens; identical to SEQ ID NO: 6943

SEQ ID NO: 6946 - protein, 457 aa, Homo sapiens
MILEVKPQTNASCEYSASHKQDLLLGSTGSISCPSLSCQSDAQSPAVTWYKNGKLLSVERSNRIVVDEVYDYHQGTYVCDYTQSDTVSSWTVRAVVQVRTIVGDTKLKPDILDPVEDTLEVELGKPLTISCKARFGFERVFNPVIKWYIKDSDLEWEVSVPEAKSIKSTLKDEIIERNIILEKVTQRDLRRKFVCFVQNSIGNTTQSVQLKEKRGVVLLYILLGTIGTLVAVLAASALLYRHWIEIVLLYRTYQSKDQTLGDKKDFDAFVSYAKWSSFPSEATSSLSEEHLALSLFPDVLENKYGYSLCLLERDVAPGGVYAEDIVSIIKRSRRGIFILSPNYVNGPSIFELQAAVNLALDDQTLKLILIKFCYFQEPESLPHLVKKALRVLPTVTWRGLKSVPPNSRFWAKMRYHMPVKNSQGFTWNQLRITSRIFQWKGLSRTETTGRSSQPKEW

SEQ ID NO: 6947 - protein, 44 aa, Homo sapiens
MLCLGWIFLWLVAGERIKGFNISGCSTKKLLWTYSTRSEEEFVL

SEQ ID NO: 6948 - protein, 599 aa, Homo sapiens
MLCLGWIFLWLVAGERIKGFNISGCSTKKLLWTYSTRSEEEFVLFCDLPEPQKSHFCHRNRLSPKQVPEHLPFMGSNDLSDVQWYQQPSNGDPLEDIRKSYPHIIQDKCTLHFLTPGVNNSGSYICRPKMIKSPYDVACCVKMILEVKPQTNASCEYSASHKQDLLLGSTGSISCPSLSCQSDAQSPAVTWYKNGKLLSVERSNRIVVDEVYDYHQGTYVCDYTQSDTVSSWTVRAVVQVRTIVGDTKLKPDILDPVEDTLEVELGKPLTISCKARFGFERVFNPVIKWYIKDSDLEWEVSVPEAKSIKSTLKDEIIERNIILEKVTQRDLRRKFVCFVQNSIGNTTQSVQLKEKRGVVLLYILLGTIGTLVAVLAASALLYRHWIEIVLLYRTYQSKDQTLGDKKDFDAFVSYAKWSSFPSEATSSLSEEHLALSLFPDVLENKYGYSLCLLERDVAPGGVYAEDIVSIIKRSRRGIFILSPNYVNGPSIFELQAAVNLALDDQTLKLILIKFCYFQEPESLPHLVKKALRVLPTVTWRGLKSVPPNSRFWAKMRYHMPVKNSQGFTWNQLRITSRIFQWKGLSRTETTGRSSQPKEW

SEQ ID NO: 6949 - protein, 215 aa, Homo sapiens
MCTEGAFPHRSACSLPLTHVHTHIHVCVPVLWGSVPRGMKLQCVSLWLLGTILILCSVDNHGLRRCLISTDMHHIEESFQEIKRAIQAKDTFPNVTILSTLETLQIIKPLDVCCVTKNLLAFYVDRVFKDHQEPNPKILRKISSIANSFLYMQKTLRQCQEQRQCHCRQEATNATRVIHDNYDQLEVHAAAIKSLGELDVFLAWINKNHEVMFSA

SEQ ID NO: 6950 - protein, 177 aa, Homo sapiens
MKLQCVSLWLLGTILILCSVDNHGLRRCLISTDMHHIEESFQEIKRAIQAKDTFPNVTILSTLETLQIIKPLDVCCVTKNLLAFYVDRVFKDHQEPNPKILRKISSIANSFLYMQKTLRQCQEQRQCHCRQEATNATRVIHDNYDQLEVHAAAIKSLGELDVFLAWINKNHEVMFSA

SEQ ID NO: 6951 - protein, 177 aa, Homo sapiens; identical to SEQ ID NO: 6950

SEQ ID NO: 6952 - protein, 298 aa, Homo sapiens
MEFFKNENNELPKLQWYKDCKPLLLDNIHFSGVKDRLIVMNVAEKHRGNYTCHASYTYLGKQYPITRVIEFITLEENKPTRPVIVSPANETMEVDLGSQIQLICNVTGQLSDIAYWKWNGSVIDEDDPVLGEDYYSVENPANKRRSTLITVLNISEIESRFYKHPFTCFAKNTHGIDAAYIQLIYPVTNFQKHMIGICVTLTVIIVCSVFIYKIFKIDIVLWYRDSCYDFLPIKASDGKTYDAYILYPKTVGEGSTSDCDIFVFKVLPEVLEKQCGYKLFIYGRDDYVGEDIVEVINE

SEQ ID NO: 6953 - protein, 80 aa, Homo sapiens
MKVLLRLICFIALLISSLEADKCKEREEKIILVSSANEIDVRPCPLNPNEHKGTITWYKDDSKTPVSTEQASRIHQHKEK

SEQ ID NO: 6954 - protein, 119 aa, Homo sapiens
MKVLLRLICFIALLISSLEADKCKEREEKIILVSSANEIDVRPCPLNPNEHKGTITWYKDDSKTPVSTEQASRIHQHKEKLWFVPAKVEDSGHYYCVVRIANLYFLTIYTLVESKIGSS

SEQ ID NO: 6955 - protein, 106 aa, Homo sapiens
MKVLLRLICFIALLISSLEADKCKEREEKIILVSSANEIDVRPCPLNPNEHKGTITWYKDDSKTPVSTEQASRIHQHKEKLWFVPAKVEDSGHYYCVVRNSSYCLR

SEQ ID NO: 6956 - protein, 114 aa, Homo sapiens
MKVLLRLICFIALLISSLEADKCKEREEKIILVSSANEIDVRPCPLNPNEHKGTITWYKDDSKTPVSTEQASRIHQHKEKLWFVPAKVEDSGHYYCVVRNSSYCLRIKISAKFV

SEQ ID NO: 6957 - protein, 182 aa, Homo sapiens
MKVLLRLICFIALLISSLEADKCKEREEKIILVSSANEIDVRPCPLNPNEHKGTITWYKDDSKTPVSTEQASRIHQHKEKLWFVPAKVEDSGHYYCVVRNSSYCLRIKISAKFVENEPNLCYNAQAIFKQKLPVAGDGGLVCPYMEFFKNENNELPKLQWYKDCKPLLLDNIHFSGVKDRLI

SEQ ID NO: 6958 - protein, 447 aa, Homo sapiens
MKVLLRLICFIALLISSLEADKCKEREEKIILVSSANEIDVRPCPLNPNEHKGTITWYKDDSKTPVSTEQASRIHQHKEKLWFVPAKVEDSGHYYCVVRNSSYCLRIKISAKFVENEPNLCYNAQAIFKQKLPVAGDGGLVCPYMEFFKNENNELPKLQWYKDCKPLLLDNIHFSGVKDRLIVMNVAEKHRGNYTCHASYTYLGKQYPITRVIEFITLEENKPTRPVIVSPANETMEVDLGSQIQLICNVTGQLSDIAYWKWNGSVIDEDDPVLGEDYYSVENPANKRRSTLITVLNISEIESRFYKHPFTCFAKNTHGIDAAYIQLIYPVTNFQKHMIGICVTLTVIIVCSVFIYKIFKIDIVLWYRDSCYDFLPIKASDGKTYDAYILYPKTVGEGSTSDCDIFVFKVLPEVLEKQCGYKLFIYGRDDYVGEGMCVMEQSKGLLL

SEQ ID NO: 6959 - protein, 447 aa, Homo sapiens; identical to SEQ ID NO: 6958

SEQ ID NO: 6960 - protein, 538 aa, Homo sapiens
MKVLLRLICFIALLISSLEADKCKEREEKIILVSSANEIDVRPCPLNPNEHKGTITWYKDDSKTPVSTEQASRIHQHKEKLWFVPAKVEDSGHYYCVVRNSSYCLRIKISAKFVENEPNLCYNAQAIFKQKLPVAGDGGLVCPYMEFFKNENNELPKLQWYKDCKPLLLDNIHFSGVKDRLIVMNVAEKHRGNYTCHASYTYLGKQYPITRVIEFITLEENKPTRPVIVSPANETMEVDLGSQIQLICNVTGQLSDIAYWKWNGSVIDEDDPVLGEDYYSVENPANKRRSTLITVLNISEIESRFYKHPFTCFAKNTHGIDAAYIQLIYPVTNFQKHMIGICVTLTVIIVCSVFIYKIFKIDIVLWYRDSCYDFLPIKVLPEVLEKQCGYKLFIYGRDDYVGEDIVEVINENVKKSRRLIIILVRETSGFSWLGGSSEEQIAMYNALVQDGIKVVLLELEKIQDYEKMPESIKFIKQKHGAIRWSGDFTQGPQSAKTRFWKNVRYHMPVQRRSPSSKHQLLSPATKEKLQREAHVPLG

SEQ ID NO: 6961 - protein, 447 aa, Homo sapiens; identical to SEQ ID NO: 6958

SEQ ID NO: 6962 - protein, 569 aa, Homo sapiens
MKVLLRLICFIALLISSLEADKCKEREEKIILVSSANEIDVRPCPLNPNEHKGTITWYKDDSKTPVSTEQASRIHQHKEKLWFVPAKVEDSGHYYCVVRNSSYCLRIKISAKFVENEPNLCYNAQAIFKQKLPVAGDGGLVCPYMEFFKNENNELPKLQWYKDCKPLLLDNIHFSGVKDRLIVMNVAEKHRGNYTCHASYTYLGKQYPITRVIEFITLEENKPTRPVIVSPANETMEVDLGSQIQLICNVTGQLSDIAYWKWNGSVIDEDDPVLGEDYYSVENPANKRRSTLITVLNISEIESRFYKHPFTCFAKNTHGIDAAYIQLIYPVTNFQKHMIGICVTLTVIIVCSVFIYKIFKIDIVLWYRDSCYDFLPIKASDGKTYDAYILYPKTVGEGSTSDCDIFVFKVLPEVLEKQCGYKLFIYGRDDYVGEDIVEVINENVKKSRRLIIILVRETSGFSWLGGSSEEQIAMYNALVQDGIKVVLLELEKIQDYEKMPESIKFIKQKHGAIRWSGDFTQGPQSAKTRFWKNVRYHMPVQRRSPSSKHQLLSPATKEKLQREAHVPLG

SEQ ID NO: 6963 - protein, 173 aa, Homo sapiens
MKVLLRLICFIALLISSLEADKCKEREEKIILVSSANEIDVRPCPLNPNEHKGTITWYKDDSKTPVSTEQASRIHQHKEKLWFVPAKVEDSGHYYCVVRNSSYCLRIKISAKFVENEPNLCYNAQAIFKQKLPVAGDGGLVCPYMEFFKNENNELPKLQWYKVAVSRVWATAL

SEQ ID NO: 6964 - protein, 124 aa, Homo sapiens
  SITE 1: note = misc_feature - Xaa can be any naturally occurring amino acid
XKCKEREEKIILVSSANEIDVRPCPLNPNEHKGTITWYKDDSKTPVSTEQASRIHQHKEKLWFVPAKVEDSGHYYCVETEDLCALIWSFLKMKIMSYLNYSGIRIANLYFLTIYTLVESKIGSS

SEQ ID NO: 6965 - protein, 229 aa, Homo sapiens
MLRLYVLVMGVSAFTLQPAAHTGAARSCRFRGRHYKREFRLEGEPVALRCPQVPYWLWASVSPRINLTWHKNDSARTVPGEEETRMWAQDGALWLLPALQEDSGTYVCTTRNASYCDKMSIELRVFENTDAFLPFISYPQILTLSTSGVLVCPDLSEFTRDKTDVKIQWYKDSLLLDKDNEKFLSVRGTTHLLVHDVALEDAGYYRCVLTFAHEGQQYNITRSIELRIK

SEQ ID NO: 6966 - protein, 398 aa, Homo sapiens
MLRLYVLVMGVSAFTLQPAAHTGAARSCRFRGRHYKREFRLEGEPVALRCPQVPYWLWASVSPRINLTWHKNDSARTVPGEEETRMWAQDGALWLLPALQEDSGTYVCTTRNASYCDKMSIELRVFENTDAFLPFISYPQILTLSTSGVLVCPDLSEFTRDKTDVKIQWYKDSLLLDKDNEKFLSVRGTTHLLVHDVALEDAGYYRCVLTFAHEGQQYNITRSIELRIKKKKEETIPVIISPLKTISASLGSRLTIPCKVFLGTGTPLTTMLWWTANDTHIESAYPGGRVTEGPRQEYSENNENYIEVPLIFDPVTREDLHMDFKCVVHNTLSFQTLRTTVKEASSTFSWGIVLAPLSLAFLVLGGIWMHRRCKHRTGKADGLTVLWPHHQDFQSYPK

SEQ ID NO: 6967 - protein, 398 aa, Homo sapiens; identical to SEQ ID NO: 6966

SEQ ID NO: 6968 - protein, 296 aa, Homo sapiens
MLRLYVLVMGVSAFTLQPAAHTGAARSCRFRGRHYKREFRLEGEPVALRCPQVPYWLWASVSPRINLTWHKNDSARTVPGEEETRMWAQDGALWLLPALQEDSGTYVCTTRNASYCDKMSIELRVFENTDAFLPFISYPQILTLSTSGVLVCPDLSEFTRDKTDVKIQWYKDSLLLDKDNEKFLSVRGTTHLLVHDVALEDAGYYRCVLTFAHEGQQYNITRSIELRIKKKKEETIPVIISPLKTISASLGSRLTIPCKVFLGTGTPLTTMLWWTANDTHIESAYPGGRVTEGPRQ

SEQ ID NO: 6969 - protein, 215 aa, Homo sapiens
MKLPVHKLYIEYGIQRITCPNVDGYFPSSVKPTITWYMGCYKIQNFNNVIPEGMNLSFLIALISNNGNYTCVVTYPENGRTFHLTRTLTVKVVGSPKNAVPPVIHSPNDHVVYEKEPGEELLIPCTVYFSFLMDSRNEVWWTIDGKKPDDITIDVTINESISHSRTEDETRTQILSIKKVTSEDLKRSYVCHARSAKGEVAKAAKVKQKGNRCGQ

SEQ ID NO: 6970 - protein, 113 aa, Homo sapiens
MTLLWCVVSLYFYGILQSDASERCDDWGLDTMRQIQVFEDEPARIKCPLFEHFLKFNYSTAHSAGLTLIWYWTRQDRDLEEPINFRLPENRISKEKDVLWFRPTLLNDTGNYT

SEQ ID NO: 6971 - protein, 145 aa, Homo sapiens
MTLLWCVVSLYFYGILQSDASERCDDWGLDTMRQIQVFEDEPARIKCPLFEHFLKFNYSTAHSAGLTLIWYWTRQDRDLEEPINFRLPENRISKEKDVLWFRPTLLNDTGNYTCMLRNTTYCSKVAFPLEVVQKDSCFNSPMKLP

SEQ ID NO: 6972 - protein, 570 aa, Homo sapiens
MTLLWCVVSLYFYGILQSDASERCDDWGLDTMRQIQVFEDEPARIKCPLFEHFLKFNYSTAHSAGLTLIWYWTRQDRDLEEPINFRLPENRISKEKDVLWFRPTLLNDTGNYTCMLRNTTYCSKVAFPLEVVQKDSCFNSPMKLPVHKLYIEYGIQRITCPNVDGYFPSSVKPTITWYMGCYKIQNFNNVIPEGMNLSFLIALISNNGNYTCVVTYPENGRTFHLTRTLTVKVVGSPKNAVPPVIHSPNDHVVYEKEPGEELLIPCTVYFSFLMDSRNEVWWTIDGKKPDDITIDVTINESISHSRTEDETRTQILSIKKVTSEDLKRSYVCHARSAKGEVAKAAKVKQKVPAPRYTVELACGFGATVLLVVILIVVYHVYWLEMVLFYRAHFGTDETILDGKEYDIYVSYARNAEEEEFVLLTLRGVLENEFGYKLCIFDRDSLPGGIVTDETLSFIQKSRRLLVVLSPNYVLQGTQALLELKAGLENMASRGNINVILVQYKAVKETKVKELKRAKTVLTVIKWKGEKSKYPQGRFWKQLQVAMPVKKSPRRSSSDEQGLSYSSLKNV

SEQ ID NO: 6973 - protein, 346 aa, Homo sapiens
MTLLWCVVSLYFYGILQSDASERCDDWGLDTMRQIQVFEDEPARIKCPLFEHFLKFNYSTAHSAGLTLIWYWTRQDRDLEEPINFRLPENRISKEKDVLWFRPTLLNDTGNYTCMLRNTTYCSKVAFPLEVVQKDSCFNSPMKLPVHKLYIEYGIQRITCPNVDGYFPSSVKPTITWYMGCYKIQNFNNVIPEGMNLSFLIALISNNGNYTCVVTYPENGRTFHLTRTLTVKVVGSPKNAVPPVIHSPNDHVVYEKEPGEELLIPCTVYFSFLMDSRNEVWWTIDGKKPDDITIDVTINESASSKIHSGTGLWFWSHSPASGDSHCCLPCLLARDGPILPGSFWNR

SEQ ID NO: 6974 - protein, 687 aa, Homo sapiens
MTLLWCVVSLYFYGILQSDASERCDDWGLDTMRQIQVFEDEPARIKCPLFEHFLKFNYSTAHSAGLTLIWYWTRQDRDLEEPINFRLPENRISKEKDVLWFRPTLLNDTGNYTCMLRNTTYCSKVAFPLEVVQKDSCFNSPMKLPVHKLYIEYGIQRITCPNVDGYFPSSVKPTITWYMGCYKIQNFNNVIPEGMNLSFLIALISNNGNYTCVVTYPENGRTFHLTRTLTVKVVGSPKNAVPPVIHSPNDHVVYEKEPGEELLIPCTVYFSFLMDSRNEVWWTIDGKKPDDITIDVTINESISHSRTEDETRTQILSIKKVTSEDLKRSYVCHARSAKGEVAKAAKVKQKVPAPRYTVELACGFGATVLLVVILIVVYHVYWLEMVLFYRAHFGTDETILDGKEYDIYVSYARNAEEEEFVLLTLRGVLENEFGYKLCIFDRDSLPGGNTVEAVFDFIQRSRRMIVVLSPDYVTEKSISMLEFKLGVMCQNSIATKLIVVEYRPLEHPHPGILQLKESVSFVSWKGEKSKHSGSKFWKALRLALPLRSLSASSGWNESCSSQSDISLDHVQRRRSRLKEPPELQSSERAAGSPPAPGTMSKHRGKSSATCRCCVTYCEGENHLRNKSRAEIHNQPQWETHLCKPVPQESETQWIQNGTRLEPPAPQISALALHHFTDLSNNNDFYIL

SEQ ID NO: 6975 - protein, 570 aa, Homo sapiens; identical to SEQ ID NO: 6972

SEQ ID NO: 6976 - protein, 687 aa, Homo sapiens; identical to SEQ ID NO: 6974

SEQ ID NO: 6977 - protein, 356 aa, Homo sapiens
MTLLWCVVSLYFYGILQSDASERCDDWGLDTMRQIQVFEDEPARIKCPLFEHFLKFNYSTAHSAGLTLIWYWTRQDRDLEEPINFRLPENRISKEKDVLWFRPTLLNDTGNYTCMLRNTTYCSKVAFPLEVVQKDSCFNSPMKLPVHKLYIEYGIQRITCPNVDGYFPSSVKPTITWYMGCYKIQNFNNVIPEGMNLSFLIALISNNGNYTCVVTYPENGRTFHLTRTLTVKVVGSPKNAVPPVIHSPNDHVVYEKEPGEELLIPCTVYFSFLMDSRNEVWWTIDGKKPDDITIDVTINESISHSRTEDETRTQILSIKKVTSEDLKRSYVCHARSAKGEVAKAAKVKQKGNRCGQ

SEQ ID NO: 6978 - protein, 356 aa, Homo sapiens; identical to SEQ ID NO: 6977

SEQ ID NO: 6979 - protein, 346 aa, Homo sapiens; identical to SEQ ID NO: 6973

SEQ ID NO: 6980 - protein, 570 aa, Homo sapiens; identical to SEQ ID NO: 6972

SEQ ID NO: 6981 - protein, 570 aa, Homo sapiens; identical to SEQ ID NO: 6972

SEQ ID NO: 6982 - protein, 193 aa, Homo sapiens
  SITE 1: note = misc_feature - Xaa can be any naturally occurring amino acid
XFIHIGTSKHIEVKTQGCYKIQNFNNVIPEGMNLSFLIALISNNGNYTCVVTYPENGRTFHLTRTLTVKVVGSPKNAVPPVIHSPNDHVVYEKEPGEELLIPCTVYFSFLMDSRNEVWWTIDGKKPDDITIDVTINESISHSRTEDETRTQILSIKKVTSEDLKRSYVCHARSAKGEVAKAAKVKQKGNRCGQ

SEQ ID NO: 6983 - protein, 38 aa, Homo sapiens
MGFWILAILTILMYSTAAKFSKQSWGLENEALIVRCPR

SEQ ID NO: 6984 - protein, 556 aa, Homo sapiens
MGFWILAILTILMYSTAAKFSKQSWGLENEALIVRCPRQGKPSYTVDWYYSQTNKSIPTQERNRVFASGQLLKFLPAAVADSGIYTCIVRSPTFNRTGYANVTIYKKQSDCNVPDYLMYSTVSGSEKNSKIYCPTIDLYNWTAPLEWFKNCQALQGSRYRAHKSFLVIDNVMTEDAGDYTCKFIHNENGANYSVTATRSFTVKDEQGFSLFPVIGAPAQNEIKEVEIGKNANLTCSACFGKGTQFLAAVLWQLNGTKITDFGEPRIQQEEGQNQSFSNGLACLDMVLRIADVKEEDLLLQYDCLALNLHGLRRHTVRLSRKNPIDHHSIYCIIAVCSVFLMLINVLVIILKMFWIEATLLWRDIAKPYKTRNDGKLYDAYVVYPRNYKSSTDGASRVEHFVHQILPDVLENKCGYTLCIYGRDMLPGEDVVTAVETNIRKSRRHIFILTPQITHNKEFAYEQEVALHCALIQNDAKVILIEMEALSELDMLQAEALQDSLQHLMKVQGTIKWREDHIANKRSLNSKFWKHVRYQMPVPSKIPRKASSLTPLAAQKQ

SEQ ID NO: 6985 - protein, 328 aa, Homo sapiens
MGFWILAILTILMYSTAAKFSKQSWGLENEALIVRCPRQGKPSYTVDWYYSQTNKSIPTQERNRVFASGQLLKFLPAAVADSGIYTCIVRSPTFNRTGYANVTIYKKQSDCNVPDYLMYSTVSGSEKNSKIYCPTIDLYNWTAPLEWFKNCQALQGSRYRAHKSFLVIDNVMTEDAGDYTCKFIHNENGANYSVTATRSFTVKDEQGFSLFPVIGAPAQNEIKEVEIGKNANLTCSACFGKGTQFLAAVLWQLNGTKITDFGEPRIQQEEGQNQSFSNGLACLDMVLRIADVKEEDLLLQYDCLALNLHGLRRHTVRLSRKNPSKECF

SEQ ID NO: 6986 - protein, 314 aa, Homo sapiens
MGFWILAILTILMYSTAAKFSKQSWGLENEALIVRCPRQGKPSYTVDWYYSQTNKSIPTQERNRVFASGQLLKFLPAAVADSGIYTCIVRSPTFNRTGYANVTIYKKQSDCNVPDYLMYSTVSGSEKNSKIYCPTIDLYNWTAPLEWFKNCQALQGSRYRAHKSFLVIDNVMTEDAGDYTCKFIHNENGANYSVTATRSFTVKDEQGFSLFPVIGAPAQNEIKEVEIGTQFLAAVLWQLNGTKITDFGEPRIQQEEGQNQSFSNGLACLDMVLRIADVKEEDLLLQYDCLALNLHGLRRHTVRLSRKNPSKECF

SEQ ID NO: 6987 - protein, 259 aa, Homo sapiens
MGFWILAILTILMYSTAAKFSKQSWGLENEALIVRCPRQGKPSYTVDWYYSQTNKSIPTQERNRVFASGQLLKFLPAAVADSGIYTCIVRSPTFNRTGYANVTIYKKQSDCNVPDYLMYSTVSGSEKNSKIYCPTIDLYNWTAPLEWFKNCQALQGSRYRAHKSFLVIDNVMTEDAGDYTCKFIHNENGANYSVTATRSFTVKVWCQSFCKLKKSLIFSNTHWIQSLMRGFVMVYYGVHKCCRVVFNLCLQYFQHHQWP

SEQ ID NO: 6988 - protein, 211 aa, Homo sapiens
MYSTVSGSEKNSKIYCPTIDLYNWTAPLEWFKNCQALQGSRYRAHKSFLVIDNVMTEDAGDYTCKFIHNENGANYSVTATRSFTVKDEQGFSLFPVIGAPAQNEIKEVEIGKNANLTCSACFGKGTQFLAAVLWQLNGTKITDFGEPRIQQEEGQNQSFSNGLACLDMVLRIADVKEEDLLLQYDCLALNLHGLRRHTVRLSRKNPSKECF

SEQ ID NO: 6989 - protein, 457 aa, Homo sapiens
MTGLVSLSYFPLSTRSCALQSCSPVWGCGPCCSAGCPSPFHCLSQQDCNEIKGERFTVLETRLLVSNVSAEDRGNYACQAILTHSGKQYEVLNGITVSIKRAGYGGSVPKIIYPKNHSIEVQLGTTLIVDCNVTDTKDNTNLRCWRVNNTLVDDYYDESKRIREGVETHVSFREHNLYTVNITFLEVKMEDYGLPFMCHAGVSTAYIILQLPAPDFRAYLIGGLIALVAVAVSVVYIYNIFKIDIVLWYRSAFHSTETIVDGKLYDAYVLYPKPHKESQRHAVDALVLNILPEVLERQCGYKLFIFGRDEFPGQAVANVIDENVKLCRRLIVIVVPESLGFGLLKNLSEEQIAVYSALIQDGMKVILIELEKIEDYTVMPESIQYIKQKHGAIRWHGDFTEQSQCMKTKFWKTVRYHMPPRRCRPFPPVQLLQHTPCYRTAGPELGSRRKKCTLTTG

SEQ ID NO: 6990 - protein, 172 aa, Homo sapiens
MWSLLLCGLSIALPLSVTADGCKDIFMKNEILSASQPFAFNCTFPPITSGEVSVTWYKNSSKIPVSKIIQSRIHQDETWILFLPMEWGDSGVYQCVIKGRDSCHRIHVNLTVFEKHWCDTSIGGLPNLSDEYKQILHLGKDDSLTCHLHFPKSCVLGPIKWYKDCNEIKGER

SEQ ID NO: 6991 - protein, 575 aa, Homo sapiens
MWSLLLCGLSIALPLSVTADGCKDIFMKNEILSASQPFAFNCTFPPITSGEVSVTWYKNSSKIPVSKIIQSRIHQDETWILFLPMEWGDSGVYQCVIKGRDSCHRIHVNLTVFEKHWCDTSIGGLPNLSDEYKQILHLGKDDSLTCHLHFPKSCVLGPIKWYKDCNEIKGERFTVLETRLLVSNVSAEDRGNYACQAILTHSGKQYEVLNGITVSITERAGYGGSVPKIIYPKNHSIEVQLGTTLIVDCNVTDTKDNTNLRCWRVNNTLVDDYYDESKRIREGVETHVSFREHNLYTVNITFLEVKMEDYGLPFMCHAGVSTAYIILQLPAPDFRAYLIGGLIALVAVAVSVVYIYNIFKIDIVLWYRSAFHSTETIVDGKLYDAYVLYPKPHKESQRHAVDALVLNILPEVLERQCGYKLFIFGRDEFPGQAVANVIDENVKLCRRLIVIVVPESLGFGLLKNLSEEQIAVYSALIQDGMKVILIELEKIEDYTVMPESIQYIKQKHGAIRWHGDFTEQSQCMKTKFWKTVRYHMPPRRCRPFPPVQLLQHTPCYRTAGPELGSRRKKCTLTTG

SEQ ID NO: 6992 - protein, 180 aa, Homo sapiens
MALADLYEEGGGGGGEGEDNADSKETICRPSGRKSSKMQAFRIWDVNQKTFYLRNNQLVAGYLQGPNVNLEEKIDVVPIEPHALFLGIHGGKMCLSCVKSGDETRLQLEAVNITDLSENRKQDKRFAFIRSDSGPTTSFESAACPGWFLCTAMEADQPVSLTNMPDEGVMVTKFYFQEDE

SEQ ID NO: 6993 - protein, 159 aa, Homo sapiens
MALETICRPSGRKSSKMQAFRIWDVNQKTFYLRNNQLVAGYLQGPNVNLEEKIDVVPIEPHALFLGIHGGKMCLSCVKSGDETRLQLEAVNITDLSENRKQDKRFAFIRSDSGPTTSFESAACPGWFLCTAMEADQPVSLTNMPDEGVMVTKFYFQEDE

SEQ ID NO: 6994 - protein, 177 aa, Homo sapiens
MEICRGLRSHLITLLLFLFHSETICRPSGRKSSKMQAFRIWDVNQKTFYLRNNQLVAGYLQGPNVNLEEKIDVVPIEPHALFLGIHGGKMCLSCVKSGDETRLQLEAVNITDLSENRKQDKRFAFIRSDSGPTTSFESAACPGWFLCTAMEADQPVSLTNMPDEGVMVTKFYFQEDE

SEQ ID NO: 6995 - protein, 143 aa, Homo sapiens
MQAFRIWDVNQKTFYLRNNQLVAGYLQGPNVNLEEKIDVVPIEPHALFLGIHGGKMCLSCVKSGDETRLQLEAVNITDLSENRKQDKRFAFIRSDSGPTTSFESAACPGWFLCTAMEADQPVSLTNMPDEGVMVTKFYFQEDE

SEQ ID NO: 6996 - protein, 143 aa, Homo sapiens; identical to SEQ ID NO: 6995

SEQ ID NO: 6997 - protein, 153 aa, Homo sapiens
MYRMQLLSCIALSLALVTNSAPTSSSTKKTQLQLEHLLLDLQMILNGINNYKNPKLTRMLTFKFYMPKKATELKHLQCLEEELKPLEEVLNLAQSKNFHLRPRDLISNINVIVLELKGSETTFMCEYADETATIVEFLNRWITFCQSIISTLT

SEQ ID NO: 6998 - protein, 176 aa, Homo sapiens
MKASSLAFSLLSAAFYLLWTPSTGLKTLNLGSCVIATNLQEIRNGFSEIRGSVQAKDGNIDIRILRRTESLQDTKPANRCCLLRHLLRLYLDRVFKNYQTPDHYTLRKISSLANSFLTIKKDLRLCHAHMTCHCGEEAMKKYSQILSHFEKLEPQAAVVKALGELDILLQWMEETE

SEQ ID NO: 6999 - protein, 176 aa, Homo sapiens; identical to SEQ ID NO: 6998

SEQ ID NO: 7000 - protein, 151 aa, Homo sapiens
MKASSLAFSLLSAAFYLLWTPSTGLKTLNLGSCVIATNLQEIRNGFSEIRGSVQAKDGNIDIRILRRTESLQDTKPANRCCLLRHLLRLYLDRVFKNYQTPDHYTLRKISSLANSFLTIKKDLRLCLEPQAAVVKALGELDILLQWMEETE

SEQ ID NO: 7001 - protein, 504 aa, Homo sapiens
MKNVLQWTPPEGLQGVKVTYTVQYFIYGQKKWLNKSECRNINRTYCDLSAETSDYEHQYYAKVKAIWGTKCSKWAESGRFYPFLETQIGPPEVALTTDEKSISVVLTAPEKWKRNPEDLPVSMQQIYSNLKYNVSVLNTKSNRTWSQCVTNHTLVLTWLEPNTLYCVHVESFVPGPPRRAQPSEKQCARTLKDQSSEFKAKIIFWYVLPVSITVFLFSVMGYSIYRYIHVGKEKHPANLILIYGNEFDKRFFVPAEKIVINFITLNISDDSKISHQDMSLLGKSSDVSSLNDPQPSGNLRPPQEEEEVKHLGYASHLMEIFCDSEENTEGTSLTQQESLSRTIPPDKTVIEYEYDVRTTDICAGPEEQELSLQEEVSTQGTLLESQAALAVLGPQTLQYSYTPQLQDLDPLAQEHTDSEEGPEEEPSTTLVDWDPQTGRLCIPSLSSFDQDSEGCEPSEGDGLGEEGLLSRLYEEPAPDRPPGENETYLMQFMEEWGLYVQMEN

SEQ ID NO: 7002 - protein, 42 aa, Homo sapiens
MRAPGRPALRPLPLPPLLLLLLAAPWGRAGYSRPLLGLWAKV

SEQ ID NO: 7003 - protein, 209 aa, Homo sapiens
MRAPGRPALRPLPLPPLLLLLLAAPWGRAVPCVSGGLPKPANITFLSINMKNVLQWTPPEGLQGVKVTYTVQYFIYGQKKWLNKSECRNINRTYCDLSAETSDYEHQYYAKVKAIWGTKCSKWAESGRFYPFLETQIGPPEVALTTDEKSISVVLTAPEKWKRNPEDLPVSMQQIYSNLKYNVSVLNTKSNRTVSLKWNGAYIHVPLCS

SEQ ID NO: 7004 - protein, 553 aa, Homo sapiens
MRAPGRPALRPLPLPPLLLLLLAAPWGRAVPCVSGGLPKPANITFLSINMKNVLQWTPPEGLQGVKVTYTVQYFIYGQKKWLNKSECRNINRTYCDLSAETSDYEHQYYAKVKAIWGTKCSKWAESGRFYPFLETQIGPPEVALTTDEKSISVVLTAPEKWKRNPEDLPVSMQQIYSNLKYNVSVLNTKSNRTWSQCVTNHTLVLTWLEPNTLYCVHVESFVPGPPRRAQPSEKQCARTLKDQSSEFKAKIIFWYVLPVSITVFLFSVMGYSIYRYIHVGKEKHPANLILIYGNEFDKRFFVPAEKIVINFITLNISDDSKISHQDMSLLGKSSDVSSLNDPQPSGNLRPPQEEEEVKHLGYASHLMEIFCDSEENTEGTSLTQQESLSRTIPPDKTVIEYEYDVRTTDICAGPEEQELSLQEEVSTQGTLLESQAALAVLGPQTLQYSYTPQLQDLDPLAQEHTDSEEGPEEEPSTTLVDWDPQTGRLCIPSLSSFDQDSEGCEPSEGDGLGEEGLLSRLYEEPAPDRPPGENETYLMQFMEEWGLYVQMEN

SEQ ID NO: 7005 - protein, 89 aa, Homo sapiens
MSYNGLHQRVFKELKLLTLCSISSPEKWKRNPEDLPVSMQQIYSNLKYNVSVLNTKSNRTWSQCVTNHTLVLTWLEPNTLYCVHVESFV

SEQ ID NO: 7006 - protein, 177 aa, Homo sapiens
MSYNGLHQRVFKELKLLTLCSISSQIGPPEVALTTDEKSISVVLTAPEKWKRNPEDLPVSMQQIYSNLKYNVSVLNTKSNRTWSQCVTNHTLVLTWLEPNTLYCVHVESFVPGPPRRAQPSEKQCARTLKDQSSEFKAKIIFWYVLPVSITVFLFSVMGYSIYRYIHVGKEKHPANL

SEQ ID NO: 7007 - protein, 442 aa, Homo sapiens
MSYNGLHQRVFKELKLLTLCSISSQIGPPEVALTTDEKSISVVLTAPEKWKRNPEDLPVSMQQIYSNLKYNVSVLNTKSNRTWSQCVTNHTLVLTWLEPNTLYCVHVESFVPGPPRRAQPSEKQCARTLKDQSSEFKAKIIFWYVLPVSITVFLFSVMGYSIYRYIHVGKEKHPANLILIYGNEFDKRFFVPAEKIVINFITLNISDDSKISHQDMSLLGKSSDVSSLNDPQPSGNLRPPQEEEEVKHLGYASHLMEIFCDSEENTEGTSLTQQESLSRTIPPDKTVIEYEYDVRTTDICAGPEEQELSLQEEVSTQGTLLESQAALAVLGPQTLQYSYTPQLQDLDPLAQEHTDSEEGPEEEPSTTLVDWDPQTGRLCIPSLSSFDQDSEGCEPSEGDGLGEEGLLSRLYEEPAPDRPPGENETYLMQFMEEWGLYVQMEN

SEQ ID NO: 7008 - protein, 162 aa, Homo sapiens
MRSSPGNMERIVICLMVIFLGTLVHKSSSQGQDRHMIRMRQLIDIVDQLKNYVNDLVPEFLPAPEDVETNCEWSAFSCFQKAQLKSANTGNNERIINVSIKKLKRKPPSTNAGRRQKHRLTCPSCDSYEKKPPKEFLERFKSLLQKMIHQHLSSRTHGSEDS

SEQ ID NO: 7009 - protein, 153 aa, Homo sapiens
MRSSPGNMERIVICLMVIFLGTLVHKSSSQGQDRHMIRMRQLIDIVDQLKNYVNDLVPEFLPAPEDVETNCEWSAFSCFQKAQLKSANTGNNERIINVSIKKLKRKPPSTNAGRRQKHRLTCPSCDSYEKKPPKEFLERFKSLLQKVSTLSFI

SEQ ID NO: 7010 - protein, 179 aa, Homo sapiens
MAALQKSVSSFLMGTLATSCLLLLALLVQGGAAAPISSHCRLDKSNFQQPYITNRTFMLAKEASLADNNTDVRLIGEKLFHGVSMSERCYLMKQVLNFTLEEVLFPQSDRFQPYMQEVVPFLARLSNRLSTCHIEGDDLHIQRNVQKLKDTVKKLGESGEIKAIGELDLLFMSLRNACI

SEQ ID NO: 7011 - protein, 179 aa, Homo sapiens; identical to SEQ ID NO: 7010

SEQ ID NO: 7012 - protein, 263 aa, Homo sapiens
MMPKHCFLGFLISFFLTGVAGTQSTHESLKPQRVQFQSRNFHNILQWQPGRALTGNSSVYFVQYKIMFSCSMKSSHQKPSGCWQHISCNFPGCRTLAKYGQRQWKNKEDCWGTQELSCDLTSETSDIQEPYYGRVRAASAGSYSEWSMTPRFTPWWETKIDPPVMNITQVNGSLLVILHAPNLPYRYQKEKNVSIEDYYELLYRVFIINNSLEKEQKVYEGAHRAVEIEALTPHSSYCVVAEIYQPMLDRRSQRSEERCVEIP

SEQ ID NO: 7013 - protein, 130 aa, Homo sapiens
MMPKHCFLGFLISFFLTGVAGTQSTHESLKPQRVQFQSRNFHNILQWQPGRALTGNSSVYFVQYKIYGQRQWKNKEDCWGTQELSCDLTSETSDIQEPYYGRVRAASAGSYSEWSMTPRFTPWWERAKGL

SEQ ID NO: 7014 - protein, 231 aa, Homo sapiens
MMPKHCFLGFLISFFLTGVAGTQSTHESLKPQRVQFQSRNFHNILQWQPGRALTGNSSVYFVQYKIYGQRQWKNKEDCWGTQELSCDLTSETSDIQEPYYGRVRAASAGSYSEWSMTPRFTPWWETKIDPPVMNITQVNGSLLVILHAPNLPYRYQKEKNVSIEDYYELLYRVFIINNSLEKEQKVYEGAHRAVEIEALTPHSSYCVVAEIYQPMLDRRSQRSEERCVEIP

SEQ ID NO: 7015 - protein, 189 aa, Homo sapiens
MLGSRAVMLLLLLPWTAQGRAVPGGSSPAWTQCQQLSQKLCTLAWSAHPLVGHMDLREEGDEETTNDVPHIQCGDGCDPQGLRDNSQFCLQRIHQGLIFYEKLLGSDIFTGEPSLLPDSPVGQLHASLLGLSQLLQPEGHHWETQQIPSLSPSQPWQRLLLRFKILRSLQAFVAVAARVFAHGAATLSP

SEQ ID NO: 7016 - protein, 206 aa, Homo sapiens
MNFQQRLQSLWTLARPFCPPLLATASQMQMVVLPCLGFTLLLWSQVSGAQGQEFHFGPCQVKGVVPQKLWEAFWAVKDTMQAQDNITSARLLQQEVLQNVSDAESCYLVHTLLEFYLKTVFKNYHNRTVEVRTLKSFSTLANNFVLIVSQLQPSQENEMFSIRDSAHRRFLLFRRAFKQLDVEAALTKALGEVDILLTWMQKFYKL

SEQ ID NO: 7017 - protein, 60 aa, Homo sapiens
MNFQQRLQSLWTLASKLRITSRVPGCCSRRFCRTSRKKMRCFPSETVHTGGFCYSGEHSN

SEQ ID NO: 7018 - protein, 63 aa, Homo sapiens
MNFQQRLQSLWTLASKLRITSRVPGCCSRRFCRTSRKKMRCFPSETVHTGGFCYSGEHSNSWT

SEQ ID NO: 7019 - protein, 51 aa, Homo sapiens
MNFQQRLQSLWTLASKLRITSRVPGCCSRRFCRTSRMLRAVTLSTPCWSST

SEQ ID NO: 7020 - protein, 207 aa, Homo sapiens
MNFQQRLQSLWTLASRPFCPPLLATASQMQMVVLPCLGFTLLLWSQVSGAQGQEFHFGPCQVKGVVPQKLWEAFWAVKDTMQAQDNITSARLLQQEVLQNVSDAESCYLVHTLLEFYLKTVFKNYHNRTVEVRTLKSFSTLANNFVLIVSQLQPSQENEMFSIRDSAHRRFLLFRRAFKQLDVEAALTKALGEVDILLTWMQKFYKL

SEQ ID NO: 7021 - protein, 154 aa, Homo sapiens
MNFQQRLQSLWTLASRPFCPPLLATASQMQMVVLPCLGFTLLLWSQVSGAQGQEFHFGPCQVKGVVPQKLWEAFWAVKDTMQAQDNITSARLLQQEVLQNVSQENEMFSIRDSAHRRFLLFRRAFKQLDVEAALTKALGEVDILLTWMQKFYKL

SEQ ID NO: 7022 - protein, 177 aa, Homo sapiens
MRERPRLGEDSSLISLFLQVVAFLAMVMGTHTYSHWPSCCPSKGQDTSEELLRWSTVPVPPLEPARPNRHPESCRASEDGPLNSRAISPWRYELDRDLNRLPQDLYHARCLCPHCVSLQTGSHMDPRGNSELLYHNQTVFYRRPCHGEKGTHKGYCLERRLYRVSLACVCVRPRVMG

SEQ ID NO: 7023 - protein, 161 aa, Homo sapiens
MYQVVAFLAMVMGTHTYSHWPSCCPSKGQDTSEELLRWSTVPVPPLEPARPNRHPESCRASEDGPLNSRAISPWRYELDRDLNRLPQDLYHARCLCPHCVSLQTGSHMDPRGNSELLYHNQTVFYRRPCHGEKGTHKGYCLERRLYRVSLACVCVRPRVMG

SEQ ID NO: 7024 - protein, 171 aa, Homo sapiens
MLVNFILRCGLLLVTLSLAIAKHKQSSFTKSCYPRGTLSQAVDALYIKAAWLKATIPEDRIKNIRLLKKKTKKQFMKNCQFQEQLLSFFMEDVFGQLQLQGCKKIRFVEDFHSLRQKLSHCISCASSAREMKSITRMKRIFYRIGNKGIYKAISELDILLSWIKKLLESSQ

SEQ ID NO: 7025 - protein, 24 aa, Homo sapiens
MERMQLWAMRLDLRDLQRHLRFQV

SEQ ID NO: 7026 - protein, 243 aa, Homo sapiens
MGQTAGDLGWRLSLLLLPLLLVQAGVWGFPRPPGRPQLSLQELRREFTVSLHLARKLLSEVRGQAHRFAESHLPGVNLYLLPLGEQLPDVSLTFQAWRRLSDPERLCFISTTLQPFHALLGGLGTQGRWTNMERMQLWAMRLDLRDLQRHLRFQVLAAGFNLPEEEEEEEEEEEEERKGLLPGALGSALQGPAQVSWPQLLSTYRLLHSLELVLSRAVRELLLLSKAGHSVWPLGFPTLSPQP

SEQ ID NO: 7027 - protein, 88 aa, Homo sapiens
MAAPALSWRLPLLILLLPLATSWASAAVNGTSQFTCFYNSRANISCVWSQDGALQDTSCQVHAWPDRRRWNQTCELLPVSQASWACNL

SEQ ID NO: 7028 - protein, 146 aa, Homo sapiens
MAAPALSWRLPLLILLLPLATSWASAAVNGTSQFTCFYNSRANISCVWSQDGALQDTSCQVHAWPDRRRWNQTCELLPVSQASWACNLILGAPDSQKLTTVDIVTLRVLCREGVRWRVMAIQDFKPFENLRLMAPISLQVVHVETH

SEQ ID NO: 7029 - protein, 188 aa, Homo sapiens
MAAPALSWRLPLLILLLPLATSWASAAVNGTSQFTCFYNSRANISCVWSQDGALQDTSCQVHAWPDRRRWNQTCELLPVSQASWACNLILGAPDSQKLTTVDIVTLRVLCREGVRWRVMAIQDFKPFENLRLMAPISLQVVHVETHRCNISWEISQASHYFERHLEFEARTLSPGHTWEEAPLLTLKQ

SEQ ID NO: 7030 - protein, 551 aa, Homo sapiens
MAAPALSWRLPLLILLLPLATSWASAAVNGTSQFTCFYNSRANISCVWSQDGALQDTSCQVHAWPDRRRWNQTCELLPVSQASWACNLILGAPDSQKLTTVDIVTLRVLCREGVRWRVMAIQDFKPFENLRLMAPISLQVVHVETHRCNISWEISQASHYFERHLEFEARTLSPGHTWEEAPLLTLKQKQEWICLETLTPDTQYEFQVRVKPLQGEFTTWSPWSQPLAFRTKPAALGKDTIPWLGHLLVGLSGAFGFIILVYLLINCRNTGPWLKKVLKCNTPDPSKFFSQLSSEHGGDVQKWLSSPFPSSSFSPGGLAPEISPLEVLERDKVTQLLLQQDKVPEPASLSSNHSLTSCFTNQGYFFFHLPDALEIEACQVYFTYDPYSEEDPDEGVAGAPTGSSPQPLQPLSGEDDAYCTFPSRDDLLLFSPSLLGGPSPPSTAPGGSGAGEERMPPSLQERVPRDWDPQPLGPPTPGVPDLVDFQPPPELVLREAGEEVPDAGPREGVSFPWSRPPGQGEFRALNARLPLNTDAYLSLQELQGQDPTHLV

SEQ ID NO: 7031 - protein, 105 aa, Homo sapiens
TCFYNSRANISCVWSQDGALQDTSCQVHAWPDRRSLQLPWDQAGMREQDKVPMREECHGASGGGSAPHSGWHRGPSLALLPGAILAAERSEKSPLGQLCGSFLFF

SEQ ID NO: 7032 - protein, 152 aa, Homo sapiens
MSRLPVLLLLQLLVRPGLQAPMTQTTPLKTSWVNCSNMIDEIITHLKQPPLPLLDFNNLNGEDQDILMENNLRRPNLEAFNRAVKSLQNASAIESILKNLLPCLPLATAAPTRHPIHIKDGDWNEFRRKLTFYLKTLENAQAQQTTLSLAIF

SEQ ID NO: 7033 - protein, 164 aa, Homo sapiens
MASHSGPSTSVLFLFCCLGGWLASHTLPVRLLRPSDDVQKIVEELQSLSKMLLKDVEEEKGVLVSQNYTLPCLSPDAQPPNNIHSPAIRAYLKTIRQLDNKSVIDEIIEHLDKLIFQDAPETNISVPTDTHECKRFILTISQQFSECMDLALKSLTSGAQQATT

SEQ ID NO: 7034 - protein, 582 aa, Homo sapiens
MCIRQLKFFTTACVCECPQNILSPQPSCVNLGMMWTWALWMLPSLCKFSLAALPAKPENISCVYYYRKNLTCTWSPGKETSYTQYTVKRTYAFGEKHDNCTTNSSTSENRASCSFFLPRITIPDNYTIEVEAENGDGVIKSHMTYWRLENIAKTEPPKIFRVKPVLGIKRMIQIEWIKPELAPVSSDLKYTLRFRTVNSTSWMEVNFAKNRKDKNQTYNLTGLQPFTEYVIALRCAVKESKFWSDWSQEKMGMTEEEAPCGLELWRVLKPAEADGRRPVRLLWKKARGAPVLEKTLGYNIWYYPESNTNLTETMNTTNQQLELHLGGESFWVSMISYNSLGKSPVATLRIPAIQEKSFQCIEVMQACVAEDQLVVKWQSSALDVNTWMIEWFPDVDSEPTTLSWESVSQATNWTIQQDKLKPFWCYNISVYPMLHDKVGEPYSIQAYAKEGVPSEGPETKVENIGVKTVTITWKEIPKSERKGIICNYTIFYQAEGGKGFCKHAHSEVEKNPKPQIDAMDRPVVGMAPPSHCDLQPGMNHLASLNLSENGAKSTHLLGFWGLNESEVTVPERRVLRKWKELL

SEQ ID NO: 7035 - protein, 681 aa, Homo sapiens
MCIRQLKFFTTACVCECPQNILSPQPSCVNLGMMWTWALWMLPSLCKFSLAALPAKPENISCVYYYRKNLTCTWSPGKETSYTQYTVKRTYAFGEKHDNCTTNSSTSENRASCSFFLPRITIPDNYTIEVEAENGDGVIKSHMTYWRLENIAKTEPPKIFRVKPVLGIKRMIQIEWIKPELAPVSSDLKYTLRFRTVNSTSWMEVNFAKNRKDKNQTYNLTGLQPFTEYVIALRCAVKESKFWSDWSQEKMGMTEEEAPCGLELWRVLKPAEADGRRPVRLLWKKARGAPVLEKTLGYNIWYYPESNTNLTETMNTTNQQLELHLGGESFWVSMISYNSLGKSPVATLRIPAIQEKSFQCIEVMQACVAEDQLVVKWQSSALDVNTWMIEWFPDVDSEPTTLSWESVSQATNWTIQQDKLKPFWCYNISVYPMLHDKVGEPYSIQAYAKEGVPSEGPETKVENIGVKTVTITWKEIPKSERKGIICNYTIFYQAEGGKGFSKTVNSSILQYGLESLKRKTSYIVQVMASTSAGGTNGTSINFKTLSFSVFEIILITSLIGGGLLILIILTVAYGLKKPNKLTHLCWPTVPNPAESSIATWHGDDFKDKLNLKESDDSVNTEDRILKPCSTPSDKLVIDKLVVNFGNVLQEIFTDEARTGQENNLGGEKNGTRILSSCPTSI

SEQ ID NO: 7036 - protein, 764 aa, Homo sapiens
MCIRQLKFFTTACVCECPQNILSPQPSCVNLGMMWTWALWMLPSLCKFSLAALPAKPENISCVYYYRKNLTCTWSPGKETSYTQYTVKRTYAFGEKHDNCTTNSSTSENRASCSFFLPRITIPDNYTIEVEAENGDGVIKSHMTYWRLENIAKTEPPKIFRVKPVLGIKRMIQIEWIKPELAPVSSDLKYTLRFRTVNSTSWMEVNFAKNRKDKNQTYNLTGLQPFTEYVIALRCAVKESKFWSDWSQEKMGMTEEEAPCGLELWRVLKPAEADGRRPVRLLWKKARGAPVLEKTLGYNIWYYPESNTNLTETMNTTNQQLELHLGGESFWVSMISYNSLGKSPVATLRIPAIQEKSFQCIEVMQACVAEDQLVVKWQSSALDVNTWMIEWFPDVDSEPTTLSWESVSQATNWTIQQDKLKPFWCYNISVYPMLHDKVGEPYSIQAYAKEGVPSEGPETKVENIGVKTVTITWKEIPKSERKGIICNYTIFYQAEGGKGFSKTVNSSILQYGLESLKRKTSYIVQVMASTSAGGTNGTSINFKTLSFSVFEIILITSLIGGGLLILIILTVAYGLKKPNKLTHLCWPTVPNPAESSIATWHGDDFKDKLNLKESDDSVNTEDRILKPCSTPSDKLVIDKLVVNFGNVLQEIFTDEARTGQENNLGGEKNGYVTCPFRPDCPLGKSFEELPVSPEIPPRKSQYLRSRMPEGTRPEAKEQLLFSGQSLVPDHLCEEGAPNPYLKNSVTAREFLVSEKLPEHTKGEV

SEQ ID NO: 7037 - protein, 745 aa, Homo sapiens
MKLSPQPSCVNLGMMWTWALWMLPSLCKFSLAALPAKPENISCVYYYRKNLTCTWSPGKETSYTQYTVKRTYAFGEKHDNCTTNSSTSENRASCSFFLPRITIPDNYTIEVEAENGDGVIKSHMTYWRLENIAKTEPPKIFRVKPVLGIKRMIQIEWIKPELAPVSSDLKYTLRFRTVNSTSWMEVNFAKNRKDKNQTYNLTGLQPFTEYVIALRCAVKESKFWSDWSQEKMGMTEEEAPCGLELWRVLKPAEADGRRPVRLLWKKARGAPVLEKTLGYNIWYYPESNTNLTETMNTTNQQLELHLGGESFWVSMISYNSLGKSPVATLRIPAIQEKSFQCIEVMQACVAEDQLVVKWQSSALDVNTWMIEWFPDVDSEPTTLSWESVSQATNWTIQQDKLKPFWCYNISVYPMLHDKVGEPYSIQAYAKEGVPSEGPETKVENIGVKTVTITWKEIPKSERKGIICNYTIFYQAEGGKGFSKTVNSSILQYGLESLKRKTSYIVQVMASTSAGGTNGTSINFKTLSFSVFEIILITSLIGGGLLILIILTVAYGLKKPNKLTHLCWPTVPNPAESSIATWHGDDFKDKLNLKESDDSVNTEDRILKPCSTPSDKLVIDKLVVNFGNVLQEIFTDEARTGQENNLGGEKNGYVTCPFRPDCPLGKSFEELPVSPEIPPRKSQYLRSRMPEGTRPEAKEQLLFSGQSLVPDHLCEEGAPNPYLKNSVTAREFLVSEKLPEHTKGEV

SEQ ID NO: 7038 - protein, 662 aa, Homo sapiens
MKLSPQPSCVNLGMMWTWALWMLPSLCKFSLAALPAKPENISCVYYYRKNLTCTWSPGKETSYTQYTVKRTYAFGEKHDNCTTNSSTSENRASCSFFLPRITIPDNYTIEVEAENGDGVIKSHMTYWRLENIAKTEPPKIFRVKPVLGIKRMIQIEWIKPELAPVSSDLKYTLRFRTVNSTSWMEVNFAKNRKDKNQTYNLTGLQPFTEYVIALRCAVKESKFWSDWSQEKMGMTEEEAPCGLELWRVLKPAEADGRRPVRLLWKKARGAPVLEKTLGYNIWYYPESNTNLTETMNTTNQQLELHLGGESFWVSMISYNSLGKSPVATLRIPAIQEKSFQCIEVMQACVAEDQLVVKWQSSALDVNTWMIEWFPDVDSEPTTLSWESVSQATNWTIQQDKLKPFWCYNISVYPMLHDKVGEPYSIQAYAKEGVPSEGPETKVENIGVKTVTITWKEIPKSERKGIICNYTIFYQAEGGKGFSKTVNSSILQYGLESLKRKTSYIVQVMASTSAGGTNGTSINFKTLSFSVFEIILITSLIGGGLLILIILTVAYGLKKPNKLTHLCWPTVPNPAESSIATWHGDDFKDKLNLKESDDSVNTEDRILKPCSTPSDKLVIDKLVVNFGNVLQEIFTDEARTGQENNLGGEKNGTRILSSCPTSI

SEQ ID NO: 7039 - protein, 662 aa, Homo sapiens; identical to SEQ ID NO: 7038

SEQ ID NO: 7040 - protein, 324 aa, Homo sapiens
MMWTWALWMLPSLCKFSLAALPAKPENISCVYYYRKNLTCTWSPGKETSYTQYTVKRTYAFGEKHDNCTTNSSTSENRASCSFFLPRITIPDNYTIEVEAENGDGVIKSHMTYWRLENIAKTEPPKIFRVKPVLGIKRMIQIEWIKPELAPVSSDLKYTLRFRTVNSTSWMEVNFAKNRKDKNQTYNLTGLQPFTEYVIALRCAVKESKFWSDWSQEKMGMTEEEAPCGLELWRVLKPAEADGRRPVRLLWKKARGAPVLEKTLGYNIWYYPESNTNLTETMNTTNQQLELHLGGESFWVSMISYNSLGKSPVATLRIPAIQEK

SEQ ID NO: 7041 - protein, 622 aa, Homo sapiens
MTYWRLENIAKTEPPKIFRVKPVLGIKRMIQIEWIKPELAPVSSDLKYTLRFRTVNSTSWMEVNFAKNRKDKNQTYNLTGLQPFTEYVIALRCAVKESKFWSDWSQEKMGMTEEEAPCGLELWRVLKPAEADGRRPVRLLWKKARGAPVLEKTLGYNIWYYPESNTNLTETMNTTNQQLELHLGGESFWVSMISYNSLGKSPVATLRIPAIQEKSFQCIEVMQACVAEDQLVVKWQSSALDVNTWMIEWFPDVDSEPTTLSWESVSQATNWTIQQDKLKPFWCYNISVYPMLHDKVGEPYSIQAYAKEGVPSEGPETKVENIGVKTVTITWKEIPKSERKGIICNYTIFYQAEGGKGFSKTVNSSILQYGLESLKRKTSYIVQVMASTSAGGTNGTSINFKTLSFSVFEIILITSLIGGGLLILIILTVAYGLKKPNKLTHLCWPTVPNPAESSIATWHGDDFKDKLNLKESDDSVNTEDRILKPCSTPSDKLVIDKLVVNFGNVLQEIFTDEARTGQENNLGGEKNGYVTCPFRPDCPLGKSFEELPVSPEIPPRKSQYLRSRMPEGTRPEAKEQLLFSGQSLVPDHLCEEGAPNPYLKNSVTAREFLVSEKLPEHTKGEV

SEQ ID NO: 7042 - protein, 212 aa, Homo sapiens
MCFPKGLGAWVSACDTEDTVGHLGPWRDKDPALWCQLCLSSQHQAIERFYDKMQNAESGRGQVMSSLAELEDDFKEGYLETVAAYYEEQHPELTPLLEKERDGLRCRGNRSPVPDVEDPATEEPGESFCDKVMRWFQAMLQRLQTWWHGVLAWVKEKVVALVHAVQALWKQFQSFCCSLSELFMSSFQSYGAPRGDKEELTPQKCSEPQSSK

SEQ ID NO: 7043 - protein, 131 aa, Homo sapiens
MCFPKVLSDDMKKLKARMDDFKEGYLETVAAYYEEQHPELTPLLEKERDGLRCRGNRSPVPDVEDPATEEPGESFCDKVMRWFQAMLQRLQTWWHGVLAWVKEKVVALVHAVQALWKQFQSFCCSLSELFM

SEQ ID NO: 7044 - protein, 179 aa, Homo sapiens
MCFPKVLSDDMKKLKARMHQAIERFYDKMQNAESGRGQDDFKEGYLETVAAYYEEQHPELTPLLEKERDGLRCRGNRSPVPDVEDPATEEPGESFCDKVMRWFQAMLQRLQTWWHGVLAWVKEKVVALVHAVQALWKQFQSFCCSLSELFMSSFQSYGAPRGDKEELTPQKCSEPQSSK

SEQ ID NO: 7045 - protein, 179 aa, Homo sapiens; identical to SEQ ID NO: 7044

SEQ ID NO: 7046 - protein, 131 aa, Homo sapiens
MCFPKVLSDDMKKLKARMHQAIERFYDKMQNAESGRGQVMSSLAELEDDFKEGYLETVAAYYEEQHPELTPLLEKERDGLRCRGNRSPVPDVEDPATEEPGESFCDKSYGAPRGDKEELTPQKCSEPQSSK

SEQ ID NO: 7047 - protein, 131 aa, Homo sapiens; identical to SEQ ID NO: 7046

SEQ ID NO: 7048 - protein, 131 aa, Homo sapiens; identical to SEQ ID NO: 7046

SEQ ID NO: 7049 - protein, 188 aa, Homo sapiens
MCFPKVLSDDMKKLKARMHQAIERFYDKMQNAESGRGQVMSSLAELEDDFKEGYLETVAAYYEEQHPELTPLLEKERDGLRCRGNRSPVPDVEDPATEEPGESFCDKVMRWFQAMLQRLQTWWHGVLAWVKEKVVALVHAVQALWKQFQSFCCSLSELFMSSFQSYGAPRGDKEELTPQKCSEPQSSK

SEQ ID NO: 7050 - protein, 188 aa, Homo sapiens; identical to SEQ ID NO: 7049

SEQ ID NO: 7051 - protein, 188 aa, Homo sapiens; identical to SEQ ID NO: 7049

SEQ ID NO: 7052 - protein, 188 aa, Homo sapiens; identical to SEQ ID NO: 7049

SEQ ID NO: 7053 - protein, 188 aa, Homo sapiens; identical to SEQ ID NO: 7049

SEQ ID NO: 7054 - protein, 188 aa, Homo sapiens; identical to SEQ ID NO: 7049

SEQ ID NO: 7055 - protein, 188 aa, Homo sapiens; identical to SEQ ID NO: 7049

SEQ ID NO: 7056 - protein, 188 aa, Homo sapiens; identical to SEQ ID NO: 7049

SEQ ID NO: 7057 - protein, 188 aa, Homo sapiens; identical to SEQ ID NO: 7049

SEQ ID NO: 7058 - protein, 188 aa, Homo sapiens; identical to SEQ ID NO: 7049

SEQ ID NO: 7059 - protein, 168 aa, Homo sapiens
MCFPKVLSDDMKKLKARMHQAIERFYDKMQNAESGRGQVMSSLAELEELTPLLEKERDGLRCRGNRSPVPDVEDPATEEPGESFCDKVMRWFQAMLQRLQTWWHGVLAWVKEKVVALVHAVQALWKQFQSFCCSLSELFMSSFQSYGAPRGDKEELTPQKCSEPQSSK

SEQ ID NO: 7060 - protein, 168 aa, Homo sapiens; identical to SEQ ID NO: 7059

SEQ ID NO: 7061 - protein, 225 aa, Homo sapiens
MCFPKVLSDDMKKLKARMVMLLPTSAQGLGAWVSACDTEDTVGHLGPWRDKDPALWCQLCLSSQHQAIERFYDKMQNAESGRGQDDFKEGYLETVAAYYEEQHPELTPLLEKERDGLRCRGNRSPVPDVEDPATEEPGESFCDKVMRWFQAMLQRLQTWWHGVLAWVKEKVVALVHAVQALWKQFQSFCCSLSELFMSSFQSYGAPRGDKEELTPQKCSEPQSSK

SEQ ID NO: 7062 - protein, 225 aa, Homo sapiens
MCFPKVLSDDMKKLKARMVMLLPTSAQGLGAWVSACDTEDTVGHLGPWRDKDPALWCQLCLSSQHQAIERFYDKMQNAESGRGQVMSSLAELEDDFKEGYLETVAAYYEEQHPELTPLLEKERDGLRCRGNRSPVPDVEDPATEEPGESFCDKVMRWFQAMLQRLQTWWHGVLAWVKEKVVALVHAVQALWKQFQSFCCSLSELFMSSFQSYGAPRGDKEELTPQ

SEQ ID NO: 7063 - protein, 234 aa, Homo sapiens
MCFPKVLSDDMKKLKARMVMLLPTSAQGLGAWVSACDTEDTVGHLGPWRDKDPALWCQLCLSSQHQAIERFYDKMQNAESGRGQVMSSLAELEDDFKEGYLETVAAYYEEQHPELTPLLEKERDGLRCRGNRSPVPDVEDPATEEPGESFCDKVMRWFQAMLQRLQTWWHGVLAWVKEKVVALVHAVQALWKQFQSFCCSLSELFMSSFQSYGAPRGDKEELTPQKCSEPQSSK

SEQ ID NO: 7064 - protein, 234 aa, Homo sapiens; identical to SEQ ID NO: 7063

SEQ ID NO: 7065 - protein, 234 aa, Homo sapiens; identical to SEQ ID NO: 7063

SEQ ID NO: 7066 - protein, 221 aa, Homo sapiens
MCFPKVLSDDMKKLKARMVMLLPTSAQGLGAWVSACDTEDTVGHLGPWRDKDPALWCQLCLSSQHQAIERFYDKMQNAESGRGQVMSSLAELEDDFKEGYLETVAAYYEEQHPELTPLLEKERDGLRCRGNRSPVPDVEDPATEEPGESFCDKVMRWFQAMLQRLQTWWHGVLAWVKEKVVALVHAVQALWKQFQSFCCSLSELFMSSFQSYGATRGARRS

SEQ ID NO: 7067 - protein, 168 aa, Homo sapiens
MCFPKVLSDDMKKLKARMVMSSLAELEDDFKEGYLETVAAYYEEQHPELTPLLEKERDGLRCRGNRSPVPDVEDPATEEPGESFCDKVMRWFQAMLQRLQTWWHGVLAWVKEKVVALVHAVQALWKQFQSFCCSLSELFMSSFQSYGAPRGDKEELTPQKCSEPQSSK

SEQ ID NO: 7068 - protein, 168 aa, Homo sapiens; identical to SEQ ID NO: 7067

SEQ ID NO: 7069 - protein, 168 aa, Homo sapiens; identical to SEQ ID NO: 7067

SEQ ID NO: 7070 - protein, 148 aa, Homo sapiens
MCFPKVLSDDMKKLKARMVMSSLAELEELTPLLEKERDGLRCRGNRSPVPDVEDPATEEPGESFCDKVMRWFQAMLQRLQTWWHGVLAWVKEKVVALVHAVQALWKQFQSFCCSLSELFMSSFQSYGAPRGDKEELTPQKCSEPQSSK

SEQ ID NO: 7071 - protein, 178 aa, Homo sapiens
MKKLKARMHQAIERFYDKMQNAESGRGQVMSSLAELEDDFKEGYLETVAAYYEEQHPELTPLLEKERDGLRCRGNRSPVPDVEDPATEEPGESFCDKVMRWFQAMLQRLQTWWHGVLAWVKEKVVALVHAVQALWKQFQSFCCSLSELFMSSFQSYGAPRGDKEELTPQKCSEPQSSK

SEQ ID NO: 7072 - protein, 54 aa, Homo sapiens
MPRGFTWLRYLGIFLGVALGNEPLEMWPLTQNEECTVTGFLRDKLQYRSRLQYM

SEQ ID NO: 7073 - protein, 242 aa, Homo sapiens
MPRGFTWLRYLGIFLGVALGNEPLEMWPLTQNEECTVTGFLRDKLQYRSRLQYMKHYFPINYKISVPYEGVFRIANVTRLQRAQVSERELRYLWVLVSLSATESVQDVLLEGHPSWKYLQEVETLLLNVQQGLTDVEVSPKVESVLSLLNAPGPNLKLVRPKALLDNCFRVMELLYCSCCKQSSVLNWQDCEVPSPQSCSPEPSLQYAATQLYPPPPWSPSSPPHSTGSVRPVRAQGEGLLP

SEQ ID NO: 7074 - protein, 242 aa, Homo sapiens; identical to SEQ ID NO: 7073

SEQ ID NO: 7075 - protein, 217 aa, Homo sapiens
MWPLTQNEECTVTGFLRDKLQYRSRLQYMKHYFPINYKISVPYEGVFRIANVTRLQRAQVSERELRYLWVLVSLSATESVQDVLLEGHPSWKYLQEVETLLLNVQQGLTDVEVSPKVESVLSLLNAPGPNLKLVRPKALLDNCFRVMELLYCSCCKQSSVLNWQDCEVPSPQSCSPEPSLQYAATQLYPPPPWSPSSPPHSTGSVRPVRAQGEGLLP

SEQ ID NO: 7076 - protein, 378 aa, Homo sapiens
MVLLWLTLLLIALPCLLQTKEDPNPPITNLRMKAKAQQLTWDLNRNVTDIECVKDADYSMPAVNNSYCQFGAISLCEVTNYTVRVANPPFSTWILFPENSGKPWAGAENLTCWIHDVDFLSCSWAVGPGAPADVQYDLYLNVANRRQQYECLHYKTDAQGTRIGCRFDDISRLSSGSQSSHILVRGRSAAFGIPCTDKFVVFSQIEILTPPNMTAKCNKTHSFMHWKMRSHFNRKFRYELQIQKRMQPVITEQVRDRTSFQLLNPGTYTVQIRARERVYEFLSAWSTPQRFECDQEEGANTRAWRTSLLIALGTLLALVCVFVICRRYLVMQRLFPRIPHMKDPIGDSFQNDKLVVWEAGKAGLEECLVTEVQVVQKT

SEQ ID NO: 7077 - protein, 164 aa, Homo sapiens
MVLLWLTLLLIALPCLLQTKEGGKPWAGAENLTCWIHDVDFLSCSWAVGPGAPADVQYDLYLNVANRRQQYECLHYKTDAQGTRIGCRFDDISRLSSGSQSSHILVRGRSAAFGIPCTDKFVVFSQIEILTPPNMTAKCNKTHSFMHWKMRSHFNRKFRYELQI

SEQ ID NO: 7078 - protein, 300 aa, Homo sapiens
MVLLWLTLLLIALPCLLQTKEGGKPWAGAENLTCWIHDVDFLSCSWAVGPGAPADVQYDLYLNVANRRQQYECLHYKTDAQGTRIGCRFDDISRLSSGSQSSHILVRGRSAAFGIPCTDKFVVFSQIEILTPPNMTAKCNKTHSFMHWKMRSHFNRKFRYELQIQKRMQPVITEQVRDRTSFQLLNPGTYTVQIRARERVYEFLSAWSTPQRFECDQEEGANTRAWRTSLLIALGTLLALVCVFVICRRYLVMQRLFPRIPHMKDPIGDSFQNDKLVVWEAGKAGLEECLVTEVQVVQKT

SEQ ID NO: 7079 - protein, 137 aa, Homo sapiens
MGLTSQLLPPLFFLLACAGNFVHGHKCDITLQEIIKTLNSLTEQKNTTEKETFCRAATVLRQFYSHHEKDTRCLGATAQQFHRHKQLIRFLKRLDRNLWGLAGLNSCPVKEANQSTLENFLERLKTIMREKYSKCSS

SEQ ID NO: 7080 - protein, 153 aa, Homo sapiens [sequence omitted]

SEQ ID NO: 7081 - protein, 136 aa, Homo sapiens
MGLTSQLLPPLFFLLACAGNFVHGHKCDITLQEIIKTLNSLTEQKTLCTELTVTDIFAASKQHACLPTSRHTGTICRPPSARVPSTSTRLQSPERTQLRRKPSAGLRLCSGSSTATMRRTLAAWVRLHSSSTGTSS

SEQ ID NO: 7082 - protein, 32 aa, Homo sapiens
MAPLALHLLVLVPILLSLVASQDWKAERSQDP

SEQ ID NO: 7083 - protein, 150 aa, Homo sapiens
MAPLALHLLVLVPILLSLVASQDWKAERSQDPFEKCMQDPDYEQLLKVTILEADNRIGGRIFTYRDQNTGWIGELGAMRMPSSHRILHKLCQGLGLNLTKFTQYDKNTWTEVHEVKLRNYVVEKVPEKLGYALRPQEKGHSPEDIYQMAL

SEQ ID NO: 7084 - protein, 71 aa, Homo sapiens
MAPLALHLLVLVPILLSLVASQDWKAERSQDPFEKCMQDPDYEQLLKVVTWGLNRTLKPQRVIVVGAGVAG

SEQ ID NO: 7085 - protein, 567 aa, Homo sapiens
MAPLALHLLVLVPILLSLVASQDWKAERSQDPFEKCMQDPDYEQLLKVVTWGLNRTLKPQRVIVVGAGVAGLVAAKVLSDAGHKVTILEADNRIGGRIFTYRDQNTGWIGELGAMRMPSSHRILHKLCQGLGLNLTKFTQYDKNTWTEVHEVKLRNYVVEKVPEKLGYALRPQEKGHSPEDIYQMALNQALKDLKALGCRKAMKKFERHTLLEYLLGEGNLSRPAVQLLGDVMSEDGFFYLSFAEALRAHSCLSDRLQYSRIVGGWDLLPRALLSSLSGLVLLNAPVVAMTQGPHDVHVQIETSPPARNLKVLKADVVLLTASGPAVKRITFSPPLPRHMQEALRRLHYVPATKVFLSFRRPFWREEHIEGGHSNTDRPSRMIFYPPPREGALLLASYTWSDAAAAFAGLSREEALRLALDDVAALHGPVVRQLWDGTGVVKRWAEDQHSQGGFVVQPPALWQTEKDDWTVPYGRIYFAGEHTAYPHGWVETAVKSALRAAIKINSRKGPASDTASPEGHASDMEGQGHVHGVASSPSHDLAKEEGSHPPVQGQLSLQNTTHTRTSH

SEQ ID NO: 7086 - protein, 82 aa, Homo sapiens
MPNDDFCPGLTIKAMGAERAPQRQPCNTISHRESWPHWPCTSSSSSPSSSAWWPPRTGRLNAAKTPSRNACRILTMSSCSRW

SEQ ID NO: 7087 - protein, 106 aa, Homo sapiens
MPNDDFCPGLTIKAMGAERAPQRQPCTLHLLVLVPILLSLVASQDWKAERSQDPFEKCMQDPDYEQLLKVVTWGLNRTLKPQRVIVVGAGVAGLVAAKVLSDAGHK

SEQ ID NO: 7088 - protein, 589 aa, Homo sapiens
MPNDDFCPGLTIKAMGAERAPQRQPCTLHLLVLVPILLSLVASQDWKAERSQDPFEKCMQDPDYEQLLKVVTWGLNRTLKPQRVIVVGAGVAGLVAAKVLSDAGHKVTILEADNRIGGRIFTYRDQNTGWIGELGAMRMPSSHRILHKLCQGLGLNLTKFTQYDKNTWTEVHEVKLRNYVVEKVPEKLGYALRPQEKGHSPEDIYQMALNQALKDLKALGCRKAMKKFERHTLLEYLLGEGNLSRPAVQLLGDVMSEDGFFYLSFAEALRAHSCLSDRLQYSRIVGGWDLLPRALLSSLSGLVLLNAPVVAMTQGPHDVHVQIETSPPARNLKVLKADVVLLTASGPAVKRITFSPPLPRHMQEALRRLHYVPATKVFLSFRRPFWREEHIEGGHSNTDRPSRMIFYPPPREGALLLASYTWSDAAAAFAGLSREEALRLALDDVAALHGPVVRQLWDGTGVVKRWAEDQHSQGGFVVQPPALWQTEKDDWTVPYGRIYFAGEHTAYPHGWVETAVKSALRAAIKINSRKGPASDTASPEGHASDMEGQGHVHGVASSPSHDLAKEEGSHPPVQGQLSLQNTTHTRTSH

SEQ ID NO: 7089 - protein, 589 aa, Homo sapiens; identical to SEQ ID NO: 7088

SEQ ID NO: 7090 - protein, 10 aa, Homo sapiens
MGWLCSGLLF

SEQ ID NO: 7091 - protein, 66 aa, Homo sapiens
MGWLCSGLLFPVSCLVLLQVASSGLFRMPCGERKRVEARRSGGRSGVEEMRGSGSLWEVDLRTDWN

SEQ ID NO: 7092 - protein, 66 aa, Homo sapiens; identical to SEQ ID NO: 7091

SEQ ID NO: 7093 - protein, 66 aa, Homo sapiens; identical to SEQ ID NO: 7091

SEQ ID NO: 7094 - protein, 64 aa, Homo sapiens
MGWLCSGLLFPVSCLVLLQVASSGNMKVLQEPTCVSDYMSISTCEWKMNGPTNCSTELRLLYQL

SEQ ID NO: 7095 - protein, 120 aa, Homo sapiens
MGWLCSGLLFPVSCLVLLQVASSGNMKVLQEPTCVSDYMSISTCEWKMNGPTNCSTELRLLYQLVFLLSEAHTCIPENNGGAGCVCHLLMDDVVSADNYTLDLWAGQQLLWKGSFKPSEH

SEQ ID NO: 7096 - protein, 120 aa, Homo sapiens; identical to SEQ ID NO: 7095

SEQ ID NO: 7097 - protein, 825 aa, Homo sapiens
MGWLCSGLLFPVSCLVLLQVASSGNMKVLQEPTCVSDYMSISTCEWKMNGPTNCSTELRLLYQLVFLLSEAHTCIPENNGGAGCVCHLLMDDVVSADNYTLDLWAGQQLLWKGSFKPSEHVKPRAPGNLTVHTNVSDTLLLTWSNPYPPDNYLYNHLTYAVNIWSENDPADFRIYNVTYLEPSLRIAASTLKSGISYRARVRAWAQCYNTTWSEWSPSTKWHNSYREPFEQHLLLGVSVSCIVILAVCLLCYVSITKIKKEWWDQIPNPARSRLVAIIIQDAQGSQWEKRSRGQEPAKCPHWKNCLTKLLPCFLEHNMKRDEDPHKAAKEMPFQGSGKSAWCPVEISKTVLWPESISVVRCVELFEAPVECEEEEEVEEEKGSFCASPESSRDDFQEGREGIVARLTESLFLDLLGEENGGFCQQDMGESCLLPPSGSTSAHMPWDEFPSAGPKEAPPWGKEQPLHLEPSPPASPTQSPDNLTCTETPLVIAGNPAYRSFSNSLSQSPCPRELGPDPLLARHLEEVEPEMPCVPQLSEPTTVPQPEPETWEQILRRNVLQHGAAAAPVSAPTSGYQEFVHAVEQGGTQASAVVGLGPPGEAGYKAFSSLLASSAVSPEKCGFGASSGEEGYKPFQDLIPGCPGDPAPVPVPLFTFGLDREPPRSPQSSHLPSSSPEHLGLEPGEKVEDMPKPPLPQEQATDPLVDSLGSGIVYSALTCHLCGHLKQCHGQEDGGQTPVMASPCCGCCCGDRSSPPTTPLRAPDPSPGGVPLEASLCPASLAPSGISEKSKSSSSFHPAPGNAQSSSQTPKIVNFVSVGPTYMRVS

SEQ ID NO: 7098 - protein, 825 aa, Homo sapiens; identical to SEQ ID NO: 7097

SEQ ID NO: 7099 - protein, 124 aa, Homo sapiens
MGWLCSGLLFPVSCLVLLQVASSGNMKVLQEPTCVSDYMSISTCEWKMNGPTNCSTELRLLYQLVFLLSEAHTCIPENNGGAGCVCHLLMDDVVSADNYTLDLWAGQQLLWKGSFKPSEHVQNL

SEQ ID NO: 7100 - protein, 810 aa, Homo sapiens
MQKDARREGNMKVLQEPTCVSDYMSISTCEWKMNGPTNCSTELRLLYQLVFLLSEAHTCIPENNGGAGCVCHLLMDDVVSADNYTLDLWAGQQLLWKGSFKPSEHVKPRAPGNLTVHTNVSDTLLLTWSNPYPPDNYLYNHLTYAVNIWSENDPADFRIYNVTYLEPSLRIAASTLKSGISYRARVRAWAQCYNTTWSEWSPSTKWHNSYREPFEQHLLLGVSVSCIVILAVCLLCYVSITKIKKEWWDQIPNPARSRLVAIIIQDAQGSQWEKRSRGQEPAKCPHWKNCLTKLLPCFLEHNMKRDEDPHKAAKEMPFQGSGKSAWCPVEISKTVLWPESISVVRCVELFEAPVECEEEEEVEEEKGSFCASPESSRDDFQEGREGIVARLTESLFLDLLGEENGGFCQQDMGESCLLPPSGSTSAHMPWDEFPSAGPKEAPPWGKEQPLHLEPSPPASPTQSPDNLTCTETPLVIAGNPAYRSFSNSLSQSPCPRELGPDPLLARHLEEVEPEMPCVPQLSEPTTVPQPEPETWEQILRRNVLQHGAAAAPVSAPTSGYQEFVHAVEQGGTQASAVVGLGPPGEAGYKAFSSLLASSAVSPEKCGFGASSGEEGYKPFQDLIPGCPGDPAPVPVPLFTFGLDREPPRSPQSSHLPSSSPEHLGLEPGEKVEDMPKPPLPQEQATDPLVDSLGSGIVYSALTCHLCGHLKQCHGQEDGGQTPVMASPCCGCCCGDRSSPPTTPLRAPDPSPGGVPLEASLCPASLAPSGISEKSKSSSSFHPAPGNAQSSSQTPKIVNFVSVGPTYMRVS

SEQ ID NO: 7101 - protein, 133 aa, Homo sapiens
PSTKWHNSYREPFEQHLLLGVSVSCIVILAVCLLCYVSITKIKKEWWDQIPNPARSRLVAIIIQDAQGSQWEKRSRGPWAPRLVNELLAAPSTASAADCPCCNCPRHVLPTRSWPTWRPTCLCLTELEAEPRN

SEQ ID NO: 7102 - protein, 49 aa, Homo sapiens
  SITE 1: note = misc_feature - Xaa can be any naturally occurring amino acid
XCVCHLLMDDVVSADNYTLDLWAGQQLLWKGSFKPSEHVLPPLKRSWSQ

SEQ ID NO: 7103 - protein, 193 aa, Homo sapiens
  SITE 1: note = misc_feature - Xaa can be any naturally occurring amino acid
XNVTYLEPSLRIAASTLKSGISYRARVRAWAQCYNTTWSEWSPSTKWHNSYREPFEQHLLLGVSVSCIVILAVCLLCYVSITKIKKEWWDQIPNPARSRLVAIIIQDAQGSQWEKRSRGQEPAKCPLQGTAGGGVFWKRGLLAKPPEFHWCVRHWKNCLTKLLPCFLEHNMKRDEDPHKAAKEMPFQGSGKSA

SEQ ID NO: 7104 - protein, 51 aa, Homo sapiens
MGVVVGWIGDPGSGTLRIPVPVHKNHQLCTEEIFQGIGTLESQTVQGGTVE

SEQ ID NO: 7105 - protein, 134 aa, Homo sapiens
MRMLLHLSLLALGAAYVYAIPTEIPTSALVKETLALLSTHRTLLIANETLRIPVPVHKNHQLCTEEIFQGIGTLESQTVQGGTVERLFKNLSLIKKYIDGQKKKCGEERRRVNQFLDYLQEFLGVMNTEWIIES

SEQ ID NO: 7106 - protein, 109 aa, Homo sapiens
MIIVAHVLLILLGATEILQADLLPDEKISLLPPVNFTIKVTGLAQVLLQWKPNPDQEQRNVNLEYQVKINAPKEDDYETRITESKCVTILHKGFSASVRTILQNDHSLL

SEQ ID NO: 7107 - protein, 196 aa, Homo sapiens
MIIVAHVLLILLGATEILQADLLPDEKISLLPPVNFTIKVTGLAQVLLQWKPNPDQEQRNVNLEYQVKINAPKEDDYETRITESKCVTILHKGFSASVRTILQNDHSLLASSWASAELHAPPGSPGTSIVNLTCTTNTTEDNYSRLRSYQVSLHCTWLVGTDAPEDTQYFLYYRYGSWTEECQEYSKDTLGRNIAC

SEQ ID NO: 7108 - protein, 420 aa, Homo sapiens
MIIVAHVLLILLGATEILQADLLPDEKISLLPPVNFTIKVTGLAQVLLQWKPNPDQEQRNVNLEYQVKINAPKEDDYETRITESKCVTILHKGFSASVRTILQNDHSLLASSWASAELHAPPGSPGTSIVNLTCTTNTTEDNYSRLRSYQVSLHCTWLVGTDAPEDTQYFLYYRYGSWTEECQEYSKDTLGRNIACWFPRTFILSKGRDWLAVLVNGSSKHSAIRPFDQLFALHAIDQINPPLNVTAEIEGTRLSIQWEKPVSAFPIHCFDYEVKIHNTRNGYLQIEKLMTNAFISIIDDLSKYDVQVRAAVSSMCREAGLWSEWSQPIYVGNDEHKPLREWFVIVIMATICFILLILSLICKICHLWIKLFPPIPAPKSNIKDLFVTTNYEKAGSSETEIEVICYIEKPGVETLEDSVF

SEQ ID NO: 7109 - protein, 335 aa, Homo sapiens
MIIVAHVLLILLGATEILQADLLPDEKISLLPPVNFTIKVTGLAQVLLQWKPNPDQEQRNVNLEYQVKINAPKEDDYETRITESKCVTILHKGFSASVRTILQNDHSLLASSWASAELHAPPGSPGTSIVNLTCTTNTTEDNYSRLRSYQVSLHCTWLVGTDAPEDTQYFLYYRYGSWTEECQEYSKDTLGRNIACWFPRTFILSKGRDWLAVLVNGSSKHSAIRPFDQLFALHAIDQINPPLNVTAEIEGTRLSIQWEKPVSAFPIHCFDYEVKIHNTRNGYLQIEKLMTNAFISIIDDLSKYDVQVRAAVSSMCREAGLWSEWSQPIYVGFSR

SEQ ID NO: 7110 - protein, 335 aa, Homo sapiens; identical to SEQ ID NO: 7109

SEQ ID NO: 7111 - protein, 333 aa, Homo sapiens
MIIVAHVLLILLGATEILQADLLPDEKISLLPPVNFTIKVTGLAQVLLQWKPNPDQEQRNVNLEYQVKINAPKEDDYETRITESKCVTILHKGFSASVRTILQNDHSLLASSWASAELHAPPGSPGTSIVNLTCTTNTTEDNYSRLRSYQVSLHCTWLVGTDAPEDTQYFLYYRYGSWTEECQEYSKDTLGRNIACWFPRTFILSKGRDWLAVLVNGSSKHSAIRPFDQLFALHAIDQINPPLNVTAEIEGTRLSIQWEKPVSAFPIHCFDYEVKIHNTRNGYLQIEKLMTNAFISIIDDLSKYDVQVRAAVSSMCREAGLWSEWSQPIYVGK

SEQ ID NO: 7112 - protein, 420 aa, Homo sapiens; identical to SEQ ID NO: 7108

SEQ ID NO: 7113 - protein, 378 aa, Homo sapiens
MIIVAHVLLILLGATEILQADLLPDEKISLLPPVNFTIKVTGLAQVLLQWKPNPDQEQRNVNLEYQVKINAPKEDDYETRITESKCVTILHKGFSASVRTILQNDHSLLASSWASAELHAPPGSPGTSIVNLTCTTNTTEDNYSRLRSYQVSLHCTWLVGTDAPEDTQYFLYYRYGSWTEECQEYSKDTLGRNIACWFPRTFILSKGRDWLAVLVNGSSKHSAIRPFDQLFALHAIDQINPPLNVTAEIEGTRLSIQWEKPVSAFPIHCFDYEVKIHNTRNGYLQIEKLMTNAFISIIDDLSKYDVQVRAAVSSMCREAGLWSEWSQPIYVGNDEHKPLREWFVIVIMATICFILLILSLICKIKLGPVRRKLKSSVI

SEQ ID NO: 7114 - protein, 333 aa, Homo sapiens; identical to SEQ ID NO: 7111

SEQ ID NO: 7115 - protein, 325 aa, Homo sapiens
MIIVAHVLLILLGATEILQADLLPDEKISLLPPVNFTIKVTGLAQVLLQWKPNPDQEQRNVNLEYQVKINAPKEDDYETRITESKCVTILHKGFSASVRTILQNDHSLLASSWASAELHAPPGSPGTSIVNLTCTTNTTEDNYSRLRSYQVSLHCTWLVGTDAPEDTQYFLYYRYGSWTEECQEYSKDTLGRNIACWFPRTFILSKGRDWLAVLVNGSSKHSAIRPFDQLFALHAIGNDEHKPLREWFVIVIMATICFILLILSLICKICHLWIKLFPPIPAPKSNIKDLFVTTNYEKAGSSETEIEVICYIEKPGVETLEDSVF

SEQ ID NO: 7116 - protein, 136 aa, Homo sapiens
MCESSKEALAENNLNLPKMAEKDGCFQSGFNEETCLVKIITGLLEFEVYLEYLQNRFESSEEQARAVQMSTKVLIQFLQKKAKNLDAITTPDPTTNASLLTKLQAQNQWLQDMTTHLILRSFKEFLQSSLRALRQM

SEQ ID NO: 7117 - protein, 122 aa, Homo sapiens
MCESSKEALAENNLNLPKMAEKDGCFQSGFNEETCLVKIITGLLEFEVYLEYLQNRFESSEEQARAVQMSTKVLIQFLQKKVGVSSFPQLGVGEDRLKDSVLDNSGMQCHFQKRRLHVNKRV

SEQ ID NO: 7118 - protein, 189 aa, Homo sapiens
MNSFSTIPPGEDSKDVAAPHRQPLTSSERIDKQIRYILDGISALRKETCNKSNMCESSKEALAENNLNLPKMAEKDGCFQSGFNEETCLVKIITGLLEFEVYLEYLQNRFESSEEQARAVQMSTKVLIQFLQKKAKNLDAITTPDPTTNASLLTKLQAQNQWLQDMTTHLILRSFKEFLQSSLRALRQM

SEQ ID NO: 7119 - protein, 152 aa, Homo sapiens
MNSFSTSAFGPVAFSLGLLLVLPAAFPAPVPPGEDSKDVAAPHRQPLTSSERIDKQIRYILDGISALRKETCNKSNMCESSKEALAENNLNLPKMAEKDGCFQSGFNEETCLVKIITGLLEFEVYLEYLQNRFESSEEQARAVQMSTKVLIQ

SEQ ID NO: 7120 - protein, 212 aa, Homo sapiens
MNSFSTSAFGPVAFSLGLLLVLPAAFPAPVPPGEDSKDVAAPHRQPLTSSERIDKQIRYILDGISALRKETCNKSNMCESSKEALAENNLNLPKMAEKDGCFQSGFNEETCLVKIITGLLEFEVYLEYLQNRFESSEEQARAVQMSTKVLIQFLQKKAKNLDAITTPDPTTNASLLTKLQAQNQWLQDMTTHLILRSFKEFLQSSLRALRQM

SEQ ID NO: 7121 - protein, 212 aa, Homo sapiens; identical to SEQ ID NO: 7120

SEQ ID NO: 7122 - protein, 198 aa, Homo sapiens
MNSFSTSAFGPVAFSLGLLLVLPAAFPAPVPPGEDSKDVAAPHRQPLTSSERIDKQIRYILDGISALRKETCNKSNMCESSKEALAENNLNLPKMAEKDGCFQSGFNEETCLVKIITGLLEFEVYLEYLQNRFESSEEQARAVQMSTKVLIQFLQKKVGVSSFPQLGVGEDRLKDSVLDNSGMQCHFQKRRLHVNKRV

SEQ ID NO: 7123 - protein, 171 aa, Homo sapiens [sequence omitted]

SEQ ID NO: 7124 - protein, 365 aa, Homo sapiens [sequence omitted]

SEQ ID NO: 7125 - protein, 468 aa, Homo sapiens
MLAVGCALLAALLAAPGAALAPRRCPAQEVARGVLTSLPGDSVTLTCPGVEPEDNATVHWVLRKPAAGSHPSRWAGMGRRLLLRSVQLHDSGNYSCYRAGRPAGTVHLLVDVPPEEPQLSCFRKSPLSNVVCEWGPRSTPSLTTKAVLLVRKFQNSPAEDFQEPCQYSQESQKFSCQLAVPEGDSSFYIVSMCVASSVGSKFSKTQTFQGCGILQPDPPANITVTAVARNPRWLSVTWQDPHSWNSSFYRLRFELRYRAERSKTFTTWMVKDLQHHCVIHDAWSGLRHVVQLRAQEEFGQGEWSEWSPEAMGTPWTESRSPPAENEVSTPMQALTTNKDDDNILFRDSANATSLPVQDSSSVPLPTFLVAGGSLAFGTLLCIAIVLRFKKTWKLRALKEGKTSMHPPYSLGQLVPERPRPTPVLVPLISPPVSPSSLGSDNTSSHNRPDARDPRSPYDISNTDYFFPR

SEQ ID NO: 7126 - protein, 352 aa, Homo sapiens
MLAVGCALLAALLAAPGAALAPRRCPAQEVARGVLTSLPGDSVTLTCPGVEPEDNATVHWVLRKPAAGSHPSRWAGMGRRLLLRSVQLHDSGNYSCYRAGRPAGTVHLLVDVPPEEPQLSCFRKSPLSNVVCEWGPRSTPSLTTKAVLLVRKFQNSPAEDFQEPCQYSQESQKFSCQLAVPEGDSSFYIVSMCVASSVGSKFSKTQTFQGCGILQPDPPANITVTAVARNPRWLSVTWQDPHSWNSSFYRLRFELRYRAERSKTFTTWMVKDLQHHCVIHDAWSGLRHVVQLRAQEEFGQGEWSEWSPEAMGTPWTDRLSPRCPGWSTAVQSQLTATSASWVQAILPPQPPK

SEQ ID NO: 7127 - protein, 190 aa, Homo sapiens
  SITE 1: note = misc_feature - Xaa can be any naturally occurring amino acid
XGSKFSKTQTFQGCGILQPDPPANITVTAVARNPRWLSVTWQDPHSWNSSFYRLRFELRYRAERSKTFTTWMVKDLQHHCVIHDAWSGLRHVVQLRAQEEFGQGEWSEWSPEAMGTPWTESRSPPAENEVSTPMQALTTNKDDDNILFRDSANATSLPVQDSSSVPLPTFLVAGGSLAFGTLLCIAIVLR

SEQ ID NO: 7128 - protein, 294 aa, Homo sapiens
  SITE 1: note = misc_feature - Xaa can be any naturally occurring amino acid
XRRLLLRSVQLHDSGNYSCYRAGRPAGTVHLLVDVPPEEPQLSCFRKSPLSNVVCEWGPRSTPSLTTKAVLLVRKFQNSPAEDFQEPCQYSQESQKFSCQLAVPEGDSSFYIVSMCVASSVGSKFSKTQTFQGCGILQPDPPANITVTAVARNPRWLSVTWQDPHSWNSSFYRLRFELRYRAERSKTFTTWMVKDLQHHCVIHDAWSGLRHVVQLRAQEEFGQGEWSEWSPEAMGTPWTGFSPQTIPGGIWDPAGESRSPPAENEVSTPMQALTTNKDDDNILFRDSANATSLP

SEQ ID NO: 7129 - protein, 66 aa, Homo sapiens
MLTLQTWLVQALFIFLTTESTELKNTSGLMFQILQRVILPSGHLTLLQGTILIQKIKCIQMAISLM

SEQ ID NO: 7130 - protein, 918 aa, Homo sapiens
MLTLQTWLVQALFIFLTTESTGELLDPCGYISPESPVVQLHSNFTAVCVLKEKCMDYFHVNANYIVWKTNHFTIPKEQYTIINRTASSVTFTDIASLNIQLTCNILTFGQLEQNVYGITIISGLPPEKPKNLSCIVNEGKKMRCEWDGGRETHLETNFTLKSEWATHKFADCKAKRDTPTSCTVDYSTVYFVNIEVWVEAENALGKVTSDHINFDPVYKVKPNPPHNLSVINSEELSSILKLTWTNPSIKSVIILKYNIQYRTKDASTWSQIPPEDTASTRSSFTVQDLKPFTEYVFRIRCMKEDGKGYWSDWSEEASGITYEDRPSKAPSFWYKIDPSHTQGYRTVQLVWKTLPPFEANGKILDYEVTLTRWKSHLQNYTVNATKLTVNLTNDRYLATLTVRNLVGKSDAAVLTIPACDFQATHPVMDLKAFPKDNMLWVEWTTPRESVKKYILEWCVLSDKAPCITDWQQEDGTVHRTYLRGNLAESKCYLITVTPVYADGPGSPESIKAYLKQAPPSKGPTVRTKKVGKNEAVLEWDQLPVDVQNGFIRNYTIFYRTIIGNETAVNVDSSHTEYTLSSLTSDTLYMVRMAAYTDEGGKDGPEFTFTTPKFAQGEIEAIVVPVCLAFLLTTLLGVLFCFNKRDLIKKHIWPNVPDPSKSHIAQWSPHTPPRHNFNSKDQMYSDGNFTDVSVVEIEANDKKPFPEDLKSLDLFKKEKINTEGHSSGIGGSSCMSSSRPSISSSDENESSQNTSSTVQYSTVVHSGYRHQVPSVQVFSRSESTQPLLDSEERPEDLQLVDHVDGGDGILPRQQYFKQNCSQHESSPDISHFERSKQVSSVNEEDFVRLKQQISDHISQSCGSGQMKMFQEVSAADAFGPGTEGQVERFETVGMEAATDEGMPKSYLPQTVRQGGYMPQ

SEQ ID NO: 7131 - protein, 918 aa, Homo sapiens; identical to SEQ ID NO: 7130

SEQ ID NO: 7132 - protein, 857 aa, Homo sapiens
MLTLQTWLVQALFIFLTTESTGELLDPCGYISPESPVVQLHSNFTAVCVLKEKCMDYFHVNANYIVWKTNHFTIPKEQYTIINRTASSVTFTDIASLNIQLTCNILTFGQLEQNVYGITIISGLPPEKPKNLSCIVNEGKKMRCEWDGGRETHLETNFTLKSEWATHKFADCKAKRDTPTSCTVDYSTVYFVNIEVWVEAENALGKVTSDHINFDPVYKVKPNPPHNLSVINSEELSSILKLTWTNPSIKSVIILKYNIQYRTKDASTWSQIPPEDTASTRSSFTVQDLKPFTEYVFRIRCMKEDGKGYWSDWSEEASGITYEDRPSKAPSFWYKIDPSHTQGYRTVQLVWKTLPPFEANGKILDYEVTLTRWKSHLQNYTVNATKLTVNLTNDRYLATLTVRNLVGKSDAAVLTIPACDFQGNLAESKCYLITVTPVYADGPGSPESIKAYLKQAPPSKGPTVRTKKVGKNEAVLEWDQLPVDVQNGFIRNYTIFYRTIIGNETAVNVDSSHTEYTLSSLTSDTLYMVRMAAYTDEGGKDGPEFTFTTPKFAQGEIEAIVVPVCLAFLLTTLLGVLFCFNKRDLIKKHIWPNVPDPSKSHIAQWSPHTPPRHNFNSKDQMYSDGNFTDVSVVEIEANDKKPFPEDLKSLDLFKKEKINTEGHSSGIGGSSCMSSSRPSISSSDENESSQNTSSTVQYSTVVHSGYRHQVPSVQVFSRSESTQPLLDSEERPEDLQLVDHVDGGDGILPRQQYFKQNCSQHESSPDISHFERSKQVSSVNEEDFVRLKQQISDHISQSCGSGQMKMFQEVSAADAFGPGTEGQVERFETVGMEAATDEGMPKSYLPQTVRQGGYMPQ

SEQ ID NO: 7133 - protein, 329 aa, Homo sapiens
MLTLQTWLVQALFIFLTTESTGELLDPCGYISPESPVVQLHSNFTAVCVLKEKCMDYFHVNANYIVWKTNHFTIPKEQYTIINRTASSVTFTDIASLNIQLTCNILTFGQLEQNVYGITIISGLPPEKPKNLSCIVNEGKKMRCEWDGGRETHLETNFTLKSEWATHKFADCKAKRDTPTSCTVDYSTVYFVNIEVWVEAENALGKVTSDHINFDPVYKVKPNPPHNLSVINSEELSSILKLTWTNPSIKSVIILKYNIQYRTKDASTWSQIPPEDTASTRSSFTVQDLKPFTEYVFRIRCMKEDGKGYWSDWSEEASGITYEDNIASF

SEQ ID NO: 7134 - protein, 918 aa, Homo sapiens; identical to SEQ ID NO: 7130

SEQ ID NO: 7135 - protein, 329 aa, Homo sapiens; identical to SEQ ID NO: 7133

SEQ ID NO: 7136 - protein, 333 aa, Homo sapiens
MLTLQTWLVQALFIFLTTESTGELLDPCGYISPESPVVQLHSNFTAVCVLKEKCMDYFHVNANYIVWKTNHFTIPKEQYTIINRTASSVTFTDIASLNIQLTCNILTFGQLEQNVYGITIISGLPPEKPKNLSCIVNEGKKMRCEWDGGRETHLETNFTLKSEWATHKFADCKAKRDTPTSCTVDYSTVYFVNIEVWVEAENALGKVTSDHINFDPVYKVKPNPPHNLSVINSEELSSILKLTWTNPSIKSVIILKYNIQYRTKDASTWSQIPPEDTASTRSSFTVQDLKPFTEYVFRIRCMKEDGKGYWSDWSEEASGITYEDTLDKPLGSG

SEQ ID NO: 7137 - protein, 203 aa, Homo sapiens
MLTLQTWLVQALFIFLTTESTGELLDPCGYISPESPVVQLHSNFTAVCVLKEKLKPNPPHNLSVINSEELSSILKLTWTNPSIKSVIILKYNIQYRTKDASTWSQIPPEDTASTRSSFTVQDLKPFTEYVFRIRCMKEDGKGYWSDWSEEASGITYEDKLKNTSGLMFQILQRVILPSGHLTLLQGTILIQKIKCIQMAISLM

SEQ ID NO: 7138 - protein, 55 aa, Homo sapiens
MLTLQTWLVQALFIFLTTESTGQHTSLLIAKQNVTPPPHALLIILLCILSTLKSG

SEQ ID NO: 7139 - protein, 115 aa, Homo sapiens
MFHVSFRYIFGLPPLILVLLPVASSDCDIEGKDGKQYESVLMVSIDQLLDSMKEIGSNCLNNEFNFFKRHICDANKEENKSLKEQKKLNDLCFLKRLLQEIKTCWNKILMGTKEH

SEQ ID NO: 7140 - protein, 159 aa, Homo sapiens
MFHVSFRYIFGLPPLILVLLPVASSDCDIEGKDGKQYESVLMVSIDQLLDSMKEIGSNCLNNEFNFFKRHICDANKEGMFLFRAARKLRQFLKMNSTGDFDLHLLKVSEGTTILLNCTGQEENKSLKEQKKLNDLCFLKRLLQEIKTCWNKILMGTKEH

SEQ ID NO: 7141 - protein, 177 aa, Homo sapiens
MFHVSFRYIFGLPPLILVLLPVASSDCDIEGKDGKQYESVLMVSIDQLLDSMKEIGSNCLNNEFNFFKRHICDANKEGMFLFRAARKLRQFLKMNSTGDFDLHLLKVSEGTTILLNCTGQVKGRKPAALGEAQPTKSLEENKSLKEQKKLNDLCFLKRLLQEIKTCWNKILMGTKEH

SEQ ID NO: 7142 - protein, 133 aa, Homo sapiens
MFHVSFRYIFGLPPLILVLLPVASSDCDIEGKDGKQYESVLMVSIDQLLDSMKEIGSNCLNNEFNFFKRHICDANKVKGRKPAALGEAQPTKSLEENKSLKEQKKLNDLCFLKRLLQEIKTCWNKILMGTKEH

SEQ ID NO: 7143 - protein, 71 aa, Homo sapiens
MFHVSFRYIFGLPPLILVLLPVASSDCDIEGKDGKQYESVLMVSIDQLLNQPYKKKEKRTERKQQSAMSNN

SEQ ID NO: 7144 - protein, 71 aa, Homo sapiens; identical to SEQ ID NO: 7143

SEQ ID NO: 7145 - protein, 37 aa, Homo sapiens
MFHVSFRYIFGLPPLILVLLPVASSDCDIEGQHERNW

SEQ ID NO: 7146 - protein, 37 aa, Homo sapiens; identical to SEQ ID NO: 7145

SEQ ID NO: 7147 - protein, 65 aa, Homo sapiens
AAMYEIKVRSIPDHYFKGFWSEWSPSYYFRTPEINNSSGLSLSYGPVSPIIRRLWNIFVRNQEKI

SEQ ID NO: 7148 - protein, 52 aa, Homo sapiens
MTILGTTFGMVFSLLQVVSGESGYAQNGDLEDAELDDYSFSCYSQLEVNGSQ

SEQ ID NO: 7149 - protein, 59 aa, Homo sapiens
MTILGTTFGMVFSLLQVVSGESGYAQNGDLEDAELDDYSFSCYSQLEVNGSQHSLTCAF

SEQ ID NO: 7150 - protein, 150 aa, Homo sapiens
MTILGTTFGMVFSLLQVVSGESGYAQNGDLEDAELDDYSFSCYSQLEVNGSQHSLTCAFEDPDVNITNLEFEICGALVEVKCLNFRKLQEIYFIETKKFLLIGKSNICVKVGEKSLTCKKIDLTTIGKKLYIKVWLSLLGYLKTLCLDIL

SEQ ID NO: 7151 - protein, 180 aa, Homo sapiens
MTILGTTFGMVFSLLQVVSGESGYAQNGDLEDAELDDYSFSCYSQLEVNGSQHSLTCAFEDPDVNITNLEFEICGALVEVKCLNFRKLQEIYFIETKKFLLIGKSNICVKVGEKSLTCKKIDLTTIVKPEAPFDLSVVYREGANDFVVTFNTSHLQKKYVKVLMHDVAYRQEKDENKWTD

SEQ ID NO: 7152 - protein, 459 aa, Homo sapiens
MTILGTTFGMVFSLLQVVSGESGYAQNGDLEDAELDDYSFSCYSQLEVNGSQHSLTCAFEDPDVNITNLEFEICGALVEVKCLNFRKLQEIYFIETKKFLLIGKSNICVKVGEKSLTCKKIDLTTIVKPEAPFDLSVVYREGANDFVVTFNTSHLQKKYVKVLMHDVAYRQEKDENKWTHVNLSSTKLTLLQRKLQPAAMYEIKVRSIPDHYFKGFWSEWSPSYYFRTPEINNSSGEMDPILLTISILSFFSVALLVILACVLWKKRIKPIVWPSLPDHKKTLEHLCKKPRKNLNVSFNPESFLDCQIHRVDDIQARDEVEGFLQDTFPQQLEESEKQRLGGDVQSPNCPSEDVVITPESFGRDSSLTCLAGNVSACDAPILSSSRSLDCRESGKNGPHVYQDLLLSLGTTNSTLPPPFSLQSGILTLNPVAQGQPILTSLGSNQEEAYVTMSSFYQNQ

SEQ ID NO: 7153 - protein, 261 aa, Homo sapiens
MTILGTTFGMVFSLLQVVSGESGYAQNGDLEDAELDDYSFSCYSQLEVNGSQHSLTCAFEDPDVNITNLEFEICGALVEVKCLNFRKLQEIYFIETKKFLLIGKSNICVKVGEKSLTCKKIDLTTIVKPEAPFDLSVVYREGANDFVVTFNTSHLQKKYVKVLMHDVAYRQEKDENKWTHVNLSSTKLTLLQRKLQPAAMYEIKVRSIPDHYFKGFWSEWSPSYYFRTPEINNSSGLSLSYGPVSPIIRRLWNIFVRNQEK

SEQ ID NO: 7154 - protein, 144 aa, Homo sapiens
MLLAMVLTSALLLCSVAGQGCPTLAGILDINFLINKMQEDPASKCHCSANVTSCLCLGIPSDNCTRPCFSERLSQMTNTTMQTRYPLIFSRVKKSVEVLKNNKCPYFSCEQPCNQTTAGNALTFLKSLLEIFQKEKMRGMRGKI

SEQ ID NO: 7155 - protein, 457 aa, Homo sapiens
MAWPKLPAPWLLLCTWLPAGCLSLLVTVQHTERYVTLFASIILKCDYTTSAQLQDVVVTWRFKSFCKDPIFDYYSASYQAALSLGQDPSNDCNDNQREVRIVAQRRGQNEPVLGVDYRQRKITIQNPLARHRYMKQAQALGPQMMGKPLYWGADRSSQVSSYPMHPLLQRDLSLPSSLPQMPMTQTTNQPPIANGVLEYLEKELRNLNLAQPLPPDLKGRFGHPCSMLSSLGSEVVERRIIHLPPLIRDLSSSRRTSDSLHQQWLTPIPSRPWDLREGRSHHHYPDFHQELQDRGPKSWALERRELDPSWSGRHRSSRLNGSPIHWSDRDSLSDVPSSSEARWRPSHPPFRSRCQERPRRPSPRESTQRHGRRRRHRSYSPPLPSGLSSWSSEEDKERQPQSWRAHRRGSHSPHWPEEKPPSYRSLDITPGKNSRKKGSVERRSEKDSSHSGRSVVI

SEQ ID NO: 7156 - protein, 546 aa, Homo sapiens
MAWPKLPAPWLLLCTWLPAGCLSLLVTVQHTERYVTLFASIILKCDYTTSAQLQDVVVTWRFKSFCKDPIFDYYSASYQAALSLGQDPSNDCNDNQREVRIVAQRRGQNEPVLGVDYRQRKITIQNRADLVINEVMWWDHGVYYCTIEAPGDTSGDPDKEVKLIVLHWLTVIFIILGALLLLLLIGVCWCQCCPQYCCCYIRCPCCPAHCCCPEEALARHRYMKQAQALGPQMMGKPLYWGADRSSQVSSYPMHPLLQRDLSLPSSLPQMPMTQTTNQPPIANGVLEYLEKELRNLNLAQPLPPDLKGRFGHPCSMLSSLGSEVVERRIIHLPPLIRDLSSSRRTSDSLHQQWLTPIPSRPWDLREGRSHHHYPDFHQELQDRGPKSWALERRELDPSWSGRHRSSRLNGSPIHWSDRDSLSDVPSSSEARWRPSHPPFRSRCQERPRRPSPRESTQRHGRRRRHRSYSPPLPSGLSSWSSEEDKERQPQSWRAHRRGSHSPHWPEEKPPSYRSLDITPGKNSRKKGSVERRSEKDSSHSGRSVVI

SEQ ID NO: 7157 - protein, 546 aa, Homo sapiens; identical to SEQ ID NO: 7156

SEQ ID NO: 7158 - protein, 265 aa, Homo sapiens
MAWPKLPAPWLLLCTWLPAGCLSLLVTVQHTERYVTLFASIILKCDYTTSAQLQDVVVTWRFKSFCKDPIFDYYSASYQAALSLGQDPSNDCNDNQREVRIVAQRRGQNEPVLGVDYRQRKITIQNRADLVINEVMWWDHGVYYCTIEAPGDTSGDPDKEVKLIVLHWLTVIFIILGALLLLLLIGVCWCQCCPQYCCCYIRCPCCPAHCCCPEEALARHRYMKQAQALGPQMMGKPLYWGADRSSQVSSYPMHPLLQRASRRCQ

SEQ ID NO: 7159 - protein, 502 aa, Homo sapiens
MAWPKLPAPWLLLCTWLPAGCLSLLVTVQHTERYVTLFASIILKCDYTTSAQLQDVVVTWRFKSFCKDPIFDYYSASYQAALSLGQDPSNDCNDNQREVRIVAQRRGQNEPVLGVDYRQRKITIQNRADLVINEVMWWDHGVYYCTIEAPGDTSGDPDKEVKLIVLHWLTVIFIILGALLLLLLIGVCWCQCCPQYCCCYIRCPCCPAHCCCPEEDLSLPSSLPQMPMTQTTNQPPIANGVLEYLEKELRNLNLAQPLPPDLKGRFGHPCSMLSSLGSEVVERRIIHLPPLIRDLSSSRRTSDSLHQQWLTPIPSRPWDLREGRSHHHYPDFHQELQDRGPKSWALERRELDPSWSGRHRSSRLNGSPIHWSDRDSLSDVPSSSEARWRPSHPPFRSRCQERPRRPSPRESTQRHGRRRRHRSYSPPLPSGLSSWSSEEDKERQPQSWRAHRRGSHSPHWPEEKPPSYRSLDITPGKNSRKKGSVERRSEKDSSHSGRSVVI

SEQ ID NO: 7160 - protein, 167 aa, Homo sapiens
MDRVLLRWISLFWLTAMVEGLQVTVPDKKKVAMLFQPTVLRCHFSTSSHQPAVVQWKFKSYCQDRMGESLGMSSTRAQSLSKRNLEWDPYLDCLDSRRTVRVVASKQGSTVTLGDFYRGREITIVHDADLQIGKLMWGDSGLYYCIITTPDDLEGKNEDSVELLVLE

SEQ ID NO: 7161 - protein, 620 aa, Homo sapiens
MDRVLLRWISLFWLTAMVEGLQVTVPDKKKVAMLFQPTVLRCHFSTSSHQPAVVQWKFKSYCQDRMGESLGMSSTRAQSLSKRNLEWDPYLDCLDSRRTVRVVASKQGSTVTLGDFYRGREITIVHDADLQIGKLMWGDSGLYYCIITTPDDLEGKNEDSVELLVLEWVFVGLVLLGVFLFFVLVGICWCQCCPHSCCCYVRCPCCPDSCCCPQALYEAGKAAKAGYPPSVSGVPGPYSIPSVPLGGAPSSGMLMDKPHPPPLAPSDSTGGSHSVRKGYRIQADKERDSMKVLYYVEKELAQFDPARRMRGRYNNTISELSSLHEEDSNFRQSFHQMRSKQFPVSGDLESNPDYWSGVMGGSSGASRGPSAMEYNKEDRESFRHSQPRSKSEMLSRKNFATGVPAVSMDELAAFADSYGQRPRRADGNSHEARGGSRFERSESRAHSGFYQDDSLEEYYGQRSRSREPLTDADRGWAFSPARRRPAEDAHLPRLVSRTPGTAPKYDHSYLGSARERQARPEGASRGGSLETPSKRSAQLGPRSASYYAWSPPGTYKAGSSQDDQEDASDDALPPYSELELTRGPSYRGRDLPYHSNSEKKRKKEPAKKTNDFPTRMSLVV

SEQ ID NO: 7162 - protein, 580 aa, Homo sapiens
MDRVLLRWISLFWLTAMVEGLQVTVPDKKKVAMLFQPTVLRCHFSTSSHQPAVVQWKFKSYCQDRMGESLGMSSTRAQSLSKRNLEWDPYLDCLDSRRTVRVVASKQGSTVTLGDFYRGREITIVHDADLQIGKLMWGDSGLYYCIITTPDDLEGKNEDSVELLVLGRTGLLADLLPSFAVEIMPEWVFVGLVLLGVFLFFVLVGICWCQCCPHSCCCYVRCPCCPDSCCCPQAFRKGYRIQADKERDSMKVLYYVEKELAQFDPARRMRGRYNNTISELSSLHEEDSNFRQSFHQMRSKQFPVSGDLESNPDYWSGVMGGSSGASRGPSAMEYNKEDRESFRHSQPRSKSEMLSRKNFATGVPAVSMDELAAFADSYGQRPRRADGNSHEARGGSRFERSESRAHSGFYQDDSLEEYYGQRSRSREPLTDADRGWAFSPARRRPAEDAHLPRLVSRTPGTAPKYDHSYLGSARERQARPEGASRGGSLETPSKRSAQLGPRSASYYAWSPPGTYKAGSSQDDQEDASDDALPPYSELELTRGPSYRGRDLPYHSNSEKKRKKEPAKKTNDFPTRMSLVV

SEQ ID NO: 7163 - protein, 639 aa, Homo sapiens
MDRVLLRWISLFWLTAMVEGLQVTVPDKKKVAMLFQPTVLRCHFSTSSHQPAVVQWKFKSYCQDRMGESLGMSSTRAQSLSKRNLEWDPYLDCLDSRRTVRVVASKQGSTVTLGDFYRGREITIVHDADLQIGKLMWGDSGLYYCIITTPDDLEGKNEDSVELLVLGRTGLLADLLPSFAVEIMPEWVFVGLVLLGVFLFFVLVGICWCQCCPHSCCCYVRCPCCPDSCCCPQALYEAGKAAKAGYPPSVSGVPGPYSIPSVPLGGAPSSGMLMDKPHPPPLAPSDSTGGSHSVRKGYRIQADKERDSMKVLYYVEKELAQFDPARRMRGRYNNTISELSSLHEEDSNFRQSFHQMRSKQFPVSGDLESNPDYWSGVMGGSSGASRGPSAMEYNKEDRESFRHSQPRSKSEMLSRKNFATGVPAVSMDELAAFADSYGQRPRRADGNSHEARGGSRFERSESRAHSGFYQDDSLEEYYGQRSRSREPLTDADRGWAFSPARRRPAEDAHLPRLVSRTPGTAPKYDHSYLGSARERQARPEGASRGGSLETPSKRSAQLGPRSASYYAWSPPGTYKAGSSQDDQEDASDDALPPYSELELTRGPSYRGRDLPYHSNSEKKRKKEPAKKTNDFPTRMSLVV

SEQ ID NO: 7164 - protein, 437 aa, Homo sapiens
MDRVLLRWISLFWLTAMVEGLQVTVPDKKKVAMLFQPTVLRCHFSTSSHQPAVVQWKFKSYCQDRMGESLGMSSTRAQSLSKRNLEWDPYLDCLDSRRTVRVVASKQGSTVTLGDFYRGREITIVHDADLQIGKLMWGDSGLYYCIITTPDDLEGKNEDSVELLVLGRTGLLADLLPSFAVEIMPEWVFVGLVLLGVFLFFVLVGICWCQCCPHSCCCYVRCPCCPDSCCCPQALYEAGKAAKAGYPPSVSGVPGPYSIPSVPLGGAPSSGMLMDKPHPPPLAPSDSTGGSHSVRKGYRIQADKERDSMKVLYYVEKELAQFDPARRMRGRYNNTISELSSLHEEDSNFRQSFHQMRSKQFPVSGDLESNPDYWSGVMGGSSGASRGPSAMEYNKEDRESFRHRMTFQPGCPLWSDVVNISLDNEKSDMDYGDKTQI

SEQ ID NO: 7165 - protein, 531 aa, Homo sapiens
MDRVLLRWISLFWLTAMVEGLQVTVPDKKKVAMLFQPTVLRCHFSTSSHQPAVVQWKFKSYCQDRMGESLGMSSTRAQSLSKRNLEWDPYLDCLDSRRTVRVVASKQGSTVTLGDFYRGREITIVHDADLQIGKLMWGDSGLYYCIITTPDDLEGKNEDSVELLVLGRTGLLADLLPSFAVEIMPVRKGYRIQADKERDSMKVLYYVEKELAQFDPARRMRGRYNNTISELSSLHEEDSNFRQSFHQMRSKQFPVSGDLESNPDYWSGVMGGSSGASRGPSAMEYNKEDRESFRHSQPRSKSEMLSRKNFATGVPAVSMDELAAFADSYGQRPRRADGNSHEARGGSRFERSESRAHSGFYQDDSLEEYYGQRSRSREPLTDADRGWAFSPARRRPAEDAHLPRLVSRTPGTAPKYDHSYLGSARERQARPEGASRGGSLETPSKRSAQLGPRSASYYAWSPPGTYKAGSSQDDQEDASDDALPPYSELELTRGPSYRGRDLPYHSNSEKKRKKEPAKKTNDFPTRMSLVV

SEQ ID NO: 7166 - protein, 512 aa, Homo sapiens
MDRVLLRWISLFWLTAMVEGLQVTVPDKKKVAMLFQPTVLRCHFSTSSHQPAVVQWKFKSYCQDRMGESLGMSSTRAQSLSKRNLEWDPYLDCLDSRRTVRVVASKQGSTVTLGDFYRGREITIVHDADLQIGKLMWGDSGLYYCIITTPDDLEGKNEDSVELLVLVRKGYRIQADKERDSMKVLYYVEKELAQFDPARRMRGRYNNTISELSSLHEEDSNFRQSFHQMRSKQFPVSGDLESNPDYWSGVMGGSSGASRGPSAMEYNKEDRESFRHSQPRSKSEMLSRKNFATGVPAVSMDELAAFADSYGQRPRRADGNSHEARGGSRFERSESRAHSGFYQDDSLEEYYGQRSRSREPLTDADRGWAFSPARRRPAEDAHLPRLVSRTPGTAPKYDHSYLGSARERQARPEGASRGGSLETPSKRSAQLGPRSASYYAWSPPGTYKAGSSQDDQEDASDDALPPYSELELTRGPSYRGRDLPYHSNSEKKRKKEPAKKTNDFPTRMSLVV

SEQ ID NO: 7167 - protein, 172 aa, Homo sapiens
MITTSRDPSSRLKMFAKELKLVFPGAQRMNRGRHEVGALVRACKANGVTDLLVVHEHRGTPVGLIVSHLPFGPTAYFTLCNVVMRHDIPDLGTMSEAKPHLITHGFSSRLGKRVSDILRYLFPVPKDDSHRVITFANQDDYISFRHHVYKKTDHRNVELTEVGPRFELKLYM

SEQ ID NO: 7168 - protein, 76 aa, Homo sapiens
MLRREARLRREYLYRKAREEAQRSAQERKERLRRALEENRLIPTELRREALALQGSLEFDDAGGEGNYTRCDQPRG

SEQ ID NO: 7169 - protein, 248 aa, Homo sapiens
MLRREARLRREYLYRKAREEAQRSAQERKERLRRALEENRLIPTELRREALALQGSLEFDDAGGEGVTSHVDDEYRWAGVEDPKVMITTSRDPSSRLKMFAKELKLVFPGAQRMNRGRHEVGALVRACKANGVTDLLVVHEHRGTPVGLIVSHLPFGPTAYFTLCNVVMRHDIPDLGTMSEAKPHLITHGFSSRLGKRVSDILRYLFPVPKDDSHRVITFANQDDYISFRHHVYKKTDHRNVELTECT

SEQ ID NO: 7170 - protein, 291 aa, Homo sapiens
MLRREARLRREYLYRKAREEAQRSAQERKERLRRALEENRLIPTELRREALALQGSLEFDDAGGEGVTSHVDDEYRWAGVEDPKVMITTSRDPSSRLKMFAKELKLVFPGAQRMNRGRHEVGALVRACKANGVTDLLVVHEHRGTPVGLIVSHLPFGPTAYFTLCNVVMRHDIPDLGTMSEAKPHLITHGFSSRLGKRVSDILRYLFPVPKDDSHRVITFANQDDYISFRHHVYKKTDHRNVELTEVGPRFELKLYMIRLGTLEQEATADVEWRWHPYTNTARKRVFLSTE

SEQ ID NO: 7171 - protein, 236 aa, Homo sapiens
MMLEVKVTIQGVTSHVDDEYRWAGVEDPKVMITTSRDPSSRLKMFAKELKLVFPGAQRMNRGRHEVGALVRACKANGVTDLLVVHEHRGTPVGLIVSHLPFGPTAYFTLCNVVMRHDIPDLGTMSEAKPHLITHGFSSRLGKRVSDILRYLFPVPKDDSHRVITFANQDDYISFRHHVYKKTDHRNVELTEVGPRFELKLYMIRLGTLEQEATADVEWRWHPYTNTARKRVFLSTE

SEQ ID NO: 7172 - protein, 280 aa, Homo sapiens
  SITE 1: note = misc_feature - Xaa can be any naturally occurring amino acid
XSKCLPAVFLAHWVLLLVLRVFLPCDENRLIPTELRREALALQGSLEFDDAGGEGVTSHVDDEYRWAGVEDPKVMITTSRDPSSRLKMFAKELKLVFPGAQRMNRGRHEVGALVRACKANGVTDLLVVHEHRGTPVGLIVSHLPFGPTAYFTLCNVVMRHDIPDLGTMSEAKPHLITHGFSSRLGKRVSDILRYLFPVPKDDSHRVITFANQDDYISFRHHVYKKTDHRNVELTEVGPRFELKLYMIRLGTLEQEATADVEWRWHPYTNTARKRVFLSTE

SEQ ID NO: 7173 - protein, 158 aa, Homo sapiens
ERPNGTSAQPAQVKPEFYRQAELKPCPWTGSNQRRCITFCPTPDQADPCKFLACGEFAQCVKNERTEEAECRCKPGYDSQGSLDGLEPGLCGPGTKECEVLQGKGAPCRLPDHSENQAYKTSVKKFQNQQNNKVISKRNSELLTVEYEEFNHQDWEGN

SEQ ID NO: 7174 - protein, 140 aa, Homo sapiens
MKQILDSLQAYYRLRVCQEAVWEAYRIFLDRIPDTGEYQDWVSICQQETFCLFDIGKNFSNSQEHLDLLQQRIKQRSFPDRKDEISAEKTLGEPGETIVISTEKNKGKTKPFNILQFGNNHHEHLLPIFCLLSSIIYTYY

SEQ ID NO: 7175 - protein, 797 aa, Homo sapiens
MYLETRRAIFVFWIFLQVQGTKDISINIYHSETKDIDNPPRNETTESTEKMYKMSTMRRIFDLAKHRTKRSAFFPTGVKVCPQESMKQILDSLQAYYRLRVCQEAVWEAYRIFLDRIPDTGEYQDWVSICQQETFCLFDIGKNFSNSQEHLDLLQQRIKQRSFPDRKDEISAEKTLGEPGETIVISTDVANVSLGPFPLTPDDTLLNEILDNTLNDTKMPTTERETEFAVLEEQRVELSVSLVNQKFKAELADSQSPYYQELAGKSQLQMQKIFKKLPGFKKIHVLGFRPKKEKDGSSSTEMQLTAIFKRHSAEAKSPASDLLSFDSNKIESEEVYHGTMEEDKQPEIYLTATDLKRLISKALEEEQSLDVGTIQFTDEIAGSLPAFGPDTQSELPTSFAVITEDATLSPELPPVEPQLETVDGAEHGLPDTSWSPPAMASTSLSEAPPFFMASSIFSLTDQGTTDTMATDQTMLVPGLTIPTSDYSAISQLALGISHPPASSDDSRSSAGGEDMVRHLDEMDLSDTPAPSEVPELSEYVSVPDHFLEDTTPVSALQYITTSSMTIAPKGRELVVFFSLRVANMAFSNDLFNKSSLEYRALEQQFTQLLVPYLRSNLTGFKQLEILNFRNGSVIVNSKMKFAKSVPYNLTKAVHGVLEDFRSAAAQQLHLEIDSYSLNIEPADQADPCKFLACGEFAQCVKNERTEEAECRCKPGYDSQGSLDGLEPGLCGPGTKECEVLQGKGAPCRLPDHSENQAYKTSVKKFQNQQNNKVISKRNSELLTVEYEEFNHQDWEGN

SEQ ID NO: 7176 - protein, 719 aa, Homo sapiens
MYLETRRAIFVFWIFLQVQGTKVCQEAVWEAYRIFLDRIPDTGEYQDWVSICQQETFCLFDIGKNFSNSQEHLDLLQQRIKQRSFPDRKDEISAEKTLGEPGETIVISTDVANVSLGPFPLTPDDTLLNEILDNTLNDTKMPTTERETEFAVLEEQRVELSVSLVNQKFKAELADSQSPYYQELAGKSQLQMQKIFKKLPGFKKIHVLGFRPKKEKDGSSSTEMQLTAIFKRHSAEAKSPASDLLSFDSNKIESEEVYHGTMEEDKQPEIYLTATDLKRLISKALEEEQSLDVGTIQFTDEIAGSLPAFGPDTQSELPTSFAVITEDATLSPELPPVEPQLETVDGAEHGLPDTSWSPPAMASTSLSEAPPFFMASSIFSLTDQGTTDTMATDQTMLVPGLTIPTSDYSAISQLALGISHPPASSDDSRSSAGGEDMVRHLDEMDLSDTPAPSEVPELSEYVSVPDHFLEDTTPVSALQYITTSSMTIAPKGRELVVFFSLRVANMAFSNDLFNKSSLEYRALEQQFTQLLVPYLRSNLTGFKQLEILNFRNGSVIVNSKMKFAKSVPYNLTKAVHGVLEDFRSAAAQQLHLEIDSYSLNIEPADQADPCKFLACGEFAQCVKNERTEEAECRCKPGYDSQGSLDGLEPGLCGPGTKECEVLQGKGAPCRLPDHSENQAYKTSVKKFQNQQNNKVISKRNSELLTVEYEEFNHQDWEGN

SEQ ID NO: 7177 - protein, 366 aa, Homo sapiens
MVLHLLLFLLLTPQGGHSCQGLELARELVLAKVRALFLDALGPPAVTREGGDPGVRRLPRRHALGGFTHRGSEPEEEEDVSQAILFPATDASCEDKSAARGLAQEAEEGLFRYMFRPSQHTRSRQVTSAQLWFHTGLDRQGTAASNSSEPLLGLLALSPGGPVAVPMSLGHAPPHWAVLHLATSALSLLTHPVLVLLLRCPLCTCSARPEATPFLVAHTRTRPPSGGERARRSTPLMSWPWSPSALRLLQRPPEEPAAHANCHRVALNISFQELGWERWIVYPPSFIFHYCHGGCGLHIPPNLSLPVPGAPPTPAQPYSLLPGAQPCCAALPGTMRPLHVRTTSDGGYSFKYETVPNLLTQHCACI

SEQ ID NO: 7178 - protein, 426 aa, Homo sapiens
MPLLWLRGFLLASCWIIVRSSPTPGSEGHSAAPDCPSCALAALPKDVPNSQPEMVEAVKKHILNMLHLKKRPDVTQPVPKAALLNAIRKLHVGKVGENGYVEIEDDIGRRAEMNELMEQTSEIITFAESGTARKTLHFEISKEGSDLSVVERAEVWLFLKVPKANRTRTKVTIRLFQQQKHPQGSLDTGEEAEEVGLKGERSELLLSEKVVDARKSTWHVFPVSSSIQRLLDQGKSSLDVRIACEQCQESGASLVLLGKKKKKEEEGEGKKKGGGEGGAGADEEKEQSHRPFLMLQARQSEDHPHRRRRRGLECDGKVNICCKKQFFVSFKDIGWNDWIIAPSGYHANYCEGECPSHIAGTSGSSLSFHSTVINHYRMRGHSPFANLKSCCVPTKLRPMSMLYYDDGQNIIKKDIQNMIVEECGCS

SEQ ID NO: 7179 - protein, 426 aa, Homo sapiens; identical to SEQ ID NO: 7178

SEQ ID NO: 7180 - protein, 426 aa, Homo sapiens; identical to SEQ ID NO: 7178

SEQ ID NO: 7181 - protein, 407 aa, Homo sapiens
MDGLPGRALGAACLLLLAAGWLGPEAWGSPTPPPTPAAPPPPPPPGSPGGSQDTCTSCGGFRRPEELGRVDGDFLEAVKRHILSRLQMRGRPNITHAVPKAAMVTALRKLHAGKVREDGRVEIPHLDGHASPGADGQERVSEIISFAETDGLASSRVRLYFFISNEGNQNLFVVQASLWLYLKLLPYVLEKGSRRKVRVKVYFQEQGHGDRWNMVEKRVDLKRSGWHTFPLTEAIQALFERGERRLNLDVQCDSCQELAVVPVFVDPGEESHRPFVVVQARLGDSRHRIRKRGLECDGRTNLCCRQQFFIDFRLIGWNDWIIAPTGYYGNYCEGSCPAYLAGVPGSASSFHTAVVNQYRMRGLNPGTVNSCCIPTKLSTMSMLYFDDEYNIVKRDVPNMIVEECGCA

SEQ ID NO: 7182 - protein, 352 aa, Homo sapiens
MTSSLLLAFLLLAPTTVATPRAGGQCPACGGPTLELESQRELLLDLAKRSILDKLHLTQRPTLNRPVSRAALRTALQHLHGVPQGALLEDNREQECEIISFAETGLSTINQTRLDFHFSSDRTAGDREVQQASLMFFVQLPSNTTWTLKVRVLVLGPHNTNLTLATQYLLEVDASGWHQLPLGPEAQAACSQGHLTLELVLEGQVAQSSVILGGAAHRPFVAARVRVGGKHQIHRRGIDCQGGSRMCCRQEFFVDFREIGWHDWIIQPEGYAMNFCIGQCPLHIAGMPGIAASFHTAVLNLLKANTAAGTTGGGSCCVPTARRPLSLLYYDRDSNIVKTDIPDMVVEACGCS

SEQ ID NO: 7183 - protein, 274 aa, Homo sapiens
METAAAVVKLERLEAALTRALRRLQPGSVAPGNGEEVISFATVTDSTSAYSSLLTFHLSTPRSHHLYHARLWLHVLPTLPGTLCLRIFRWGPRRRRQGSRTLLAEHHITNLGWHTLTLPSSGLRGEKSGVLKLQLDCRPLEGNSTVTGQPRRLLDTAGHQQPFLELKIRANEPGAGRARRRTPTCEPATPLCCRRDHYVDFQELGWRDWILQPEGYQLNYCSGQCPPHLAGSPGIAASFHSAVFSLLKANNPWPASTSCCVPTARRPLSLLYLD

SEQ ID NO: 7184 - protein, 350 aa, Homo sapiens
MRLPDVQLWLVLLWALVRAQGTGSVCPSCGGSKLAPQAERALVLELAKQQILDGLHLTSRPRITHPPPQAALTRALRRLQPGSVAPGNGEEVISFATVTDSTSAYSSLLTFHLSTPRSHHLYHARLWLHVLPTLPGTLCLRIFRWGPRRRRQGSRTLLAEHHITNLGWHTLTLPSSGLRGEKSGVLKLQLDCRPLEGNSTVTGQPRRLLDTAGHQQPFLELKIRANEPGAGRARRRTPTCEPATPLCCRRDHYVDFQELGWRDWILQPEGYQLNYCSGQCPPHLAGSPGIAASFHSAVFSLLKANNPWPASTSCCVPTARRPLSLLYLDHNGNVVKTDVPDMVVEACGCS

SEQ ID NO: 7185 - protein, 104 aa, Homo sapiens
LDISFPPSYPYSEDARQGEQYMNTRCPAWCDRILMSPSAKELVLRSESEEKVVTYDHIGPNVCMGDHKPVFLAFRIMPGAGKRCQRHERTLREPPCSRGPNTHS

SEQ ID NO: 7186 - protein, 412 aa, Homo sapiens
MAGKAAAPGTAVLLVTANVGSLFDDPENLQKNWLREFYQVVHTHKPHFMALHCQEFGGKNYEASMSHVDKFVKELLSSDAMKEYNRARVYLDENYKSQEHFTALGSFYFLHESLKNIYQFDFKAKKYRKVAGKEIYSDTLESTPMLEKEKFPQDYFPECKWSRKGFIRTRWCIADCAFDLVNIHLFHDASNLVAWETSPSVYSGIRHKALGYVLDRIIDQRFEKVSYFVFGDFNFRLDSKSVVETLCTKATMQTVRAADTNEVVKLIFRESDNDRKVMLQLEKKLFDYFNQEVFRDNNGTALLEFDKELSVFKDRLYELDISFPPSYPYSEDARQGEQYMNTRCPAWCDRILMSPSAKELVLRSESEEKVVTYDHIGPNVCMGDHKPVFLAFRIMPGAGKPHAHVHKCCVVQ

SEQ ID NO: 7187 - protein, 387 aa, Homo sapiens
MAGKAAAPGTAVLLVTANVGSLFDDPENLQKNWLREFYQVVHTHKPHFMALHCQEFGGKNYEASMSHVDKFVKELLSSDAMKEYNRARVYLDENYKSQEHFTALGSFYFLHESLKNIYQFDFKAKKYRKVAGKEIYSDTLESTPMLEKEKFPQDYFPECKWSRKGFIRTRWCIADCAFDLVNIHLFHDASNLVAWETSPSVYSGIRHKALGYVLDRIIDQRFEKVSYFVFGDFNFRLDSKSVVETLCTKATMQTVRAADTNEVVKLIFRESDNDRKVMLQLEKKLFDYFNQEVFRDNNGTALLEFDKELSVFKDRLYELDISFPPSYPYSEDARQGEQYMNTRCPAWCDRILMSPSAKELVLRVSVCCPSPGHRGMWSAGSGLAQPW

SEQ ID NO: 7188 - protein, 138 aa, Homo sapiens
VTANVGSLFDDPENLQKNWLREFYQALGSFYFLHESLKNIYQFDFKAKKYRKVAGKEIYSDTLESTPMLEKEKFPQDYFPECKWSRKGFIRTRWCIADCAFDLVNIHLFHDASNLVAWETSPSVYSGIRHKALGYVLD

SEQ ID NO: 7189 - protein, 278 aa, Homo sapiens
  SITE 1: note = misc_feature - Xaa can be any naturally occurring amino acid
XQKNWLREFYQVVHTHKPHFMALHCQEFGGKNYEASMSHVDKFVKELLSSDAMKEYNRARVYLDENYKSQEHFTALGSFYFLHESLKNIYQFDFKAKKYRKVAGKEIYSDTLESTPMLEKEKFPQDYFPECKWSRKGFIRTRWCIADCAFDLVNIHLFHDASNLVAWETSPSVYSGIRHKALGYVLDRIIDQRFEKVSYFVFGDFNFRLDSKSVVELLEFDKELSVFKDRLYELDISFPPSYPYSEDARQGEQYMNTRCPAWCDRILMSPSAKELVLR

SEQ ID NO: 7190 - protein, 92 aa, Homo sapiens
MALWMRLLPLLALLALWGPDPAAAFVNQHLCGSHLVEALYLVCGERGFFYTPKTRREAEDLQAGELLQLDAARRQPHTRRLLHRERWNKALE

SEQ ID NO: 7191 - protein, 98 aa, Homo sapiens
MALWMRLLPLLALLALWGPDPAAAFVNQHLCGSHLVEALYLVCGERGFFYTPKTRREAEDLQGSLQPLALEGSLQKRGIVEQCCTSICSLYQLENYCN

SEQ ID NO: 7192 - protein, 110 aa, Homo sapiens
MALWMRLLPLLALLALWGPDPAAAFVNQHLCGSHLVEALYLVCGERGFFYTPKTRREAEDLQVGQVELGGGPGAGSLQPLALEGSLQKRGIVEQCCTSICSLYQLENYCN

SEQ ID NO: 7193 - protein, 110 aa, Homo sapiens; identical to SEQ ID NO: 7192

SEQ ID NO: 7194 - protein, 110 aa, Homo sapiens; identical to SEQ ID NO: 7192

SEQ ID NO: 7195 - protein, 200 aa, Homo sapiens
MALWMRLLPLLALLALWGPDPAAAFVNQHLCGSHLVEALYLVCGERGFFYTPKTRREAEDLQASALSLSSSTSTWPEGLDATARAPPALVVTANIGQAGGSSSRQFRQRALGTSDSPVLFIHCPGAAGTAQGLEYRGRRVTTELVWEEVDSSPQPQGSESLPAQPPAQPAPQPEPQQAREPSPEVSCCGLWPRRPQRSQN

SEQ ID NO: 7196 - protein, 200 aa, Homo sapiens; identical to SEQ ID NO: 7195

SEQ ID NO: 7197 - protein, 157 aa, Homo sapiens
MDPRLPAWALVLLGPALVFALGPAPTPEMREKLCGHHFVRALVRVCGGPRWSTEARRPATGGDQRESHSVSQAGLKLLSSSNPPTLTFQSVGISDVSCYSGWRDDICSMGWWPTVISRWDLACSPCPRPLTITATTVQLPPTLHATAASVAVPNKTC

SEQ ID NO: 7198 - protein, 131 aa, Homo sapiens
MDPRLPAWALVLLGPALVFALGPAPTPEMREKLCGHHFVRALVRVCGGPRWSTEARRPATGGDRELLQWLERRHLLHGLVADSNLTLGPGLQPLPQTSHHHRHHRAAATNPARYCCLSGCTQQDLLTLCPY

SEQ ID NO: 7199 - protein, 71 aa, Homo sapiens
  SITE 1: note = misc_feature - Xaa can be any naturally occurring amino acid
XDPRLPAWALVLLGPALVFALGPAPTPEMREKLCGHHFVRALVRVCGGPRWSTEARRPATGGDPEFHSVPR

SEQ ID NO: 7200 - protein, 139 aa, Homo sapiens
MASLFRSYLPAIWLLLSQLLRESLAAELRGCGPRFGKHLLSYCPMPEKTFTTTPGGWLLESGRPKEMVSTSNNKDGQALGTTSEFIPNLSPELKKPLSEGQPSLKKIILSRKKRSGRHRFDPFCCEVICDDGTSVKLCT

SEQ ID NO: 7201 - protein, 135 aa, Homo sapiens
MKGSIFTLFLFSVLFAISEVRSKESVRLCGLEYIRTVIYICASSRWRRHQEGIPQAQQAETGNSFQLPHKREFSEENPAQNLPKVDASGEDRLWGGQMPTEELWKSKKHSVMSRQDLQTLCCTDGCSMTDLSALC

SEQ ID NO: 7202 - protein, 213 aa, Homo sapiens
MPRLLRLSLLWLGLLLVRFSRELSDISSARKLCGRYLVKEIEKLCGHANWSQFRFEEETPFSRLIAQASEKVEAYSPYQFESPQTASPARGRGTNPVSTSWEEAVNSWEMQSLPEYKDKKGYSPLGKTREFSSSHNINVYIHENAKFQKKRRNKIKTLSNLFWGHHPQRKRRGYSEKCCLTGCTKEELSIACLPYIDFKRLKEKRSSLVTKIY

SEQ ID NO: 7203 - protein, 902 aa, Homo sapiens
MAVYTYLRLIVDHHGTAQLQALRQKEVDFCISLLRERFMECLMIGRDLVRLLQNVARIPEFELLWKDIIHNPQALSPQFTGILQLLQSRTSRKFLACRLTPDMETKLLFMTSRVRFGQQKRYQDWFQRQYLSTPDSQSLRCDLIRYICGVVHPSNEVLSSDILPRWAIIGWLLTTCTSNVAASNAKLALFYDWLFFSPDKDSIMNIEPAILVMHHSMKPHPAITATLLDFMCRIIPNFYPPLEGHVRQGVFSSLNHIVEKRVLAHLAPLFDNPKLDKELRAMLREKFPEFCSSPSPPVEVKIEEPVSMEMDNHMSDKDESCYDNAEAAFSDDEEDLNSKGKKREFRFHPIKETVVEEPVDITPYLDQLDESLRDKVLQLQKGSDTEAQCEVMQEIVDQVLEEDFDSEQLSVLASCLQELFKAHFRGEVLPEEITEESLEESVGKPLYLIFRNLCQMQEDNSSFSLLLDLLSELYQKQPKIGYHLLYYLRASKAAAGKMNLYESFAQATQLGDLHTCLMMDMKACQEDDVRLLCHLTPSIYTEFPDETLRSGELLNMIVAVIDSAQLQELVCHVMMGNLVMFRKDSVLNILIQSLDWETFEQYCAWQLFLAHNIPLETIIPILQHLKYKEHPEALSCLLLQLRREKPSEEMVKMVLSRPCHPDDQFTTSILRHWCMKHDELLAEHIKSLLIKNNSLPRKRQSLRSSSSKLAQLTLEQILEHLDNLRLNLTNTKQNCMPSTLGVQCRRCCPGPDYAWSQAGGRGRTPGATTHTRDKTTCACCLISSQTSDCFSFPALPFLPLVFSQTPILQALQHVQASCDEAHKMKFSDLFSLAEEYEDSSTKPPKSRRKAALSSPRSRKNATQPPNAEEESGSSSASEEEDTKPKPTKRKRKGSSAVGSDSD

SEQ ID NO: 7204 - protein, 1042 aa, Homo sapiens
MELQKGKGAAAAAAASGAAGGGGGGAGAGAPGGGRLLLSTSLDAKDELEERLERCMSIVTSMTAGVSEREANDALNAYVCKGLPQHEEICLGLFTLILTEPAQAQKCYRDLALVSRDGMNIVLNKINQILMEKYLKLQDTCRTQLVWLVRELVKSGVLGADGVCMTFMKQIAGGDVTAKNIWLAESVLDILTEQREWVLKSSILIAMAVYTYLRLIVDHHGTAQLQALRQKEVDFCISLLRERFMECLMIGRDLVRLLQNVARIPEFELLWKDIIHNPQALSPQFTGILQLLQSRTSRKFLACRLTPDMETKLLFMTSRVRFGQQKRYQDWFQRQYLSTPDSQSLRCDLIRYICGVVHPSNEVLSSDILPRWAIIGWLLTTCTSNVAASNAKLALFYDWLFFSPDKDSIMNIEPAILVMHHSMKPHPAITATLLDFMCRIIPNFYPPLEGHVRQGVFSSLNHIVEKRVLAHLAPLFDNPKLDKELRAMLREKFPEFCSSPSPPVEVKIEEPVSMEMDNHMSDKDESCYDNAEAAFSDDEEDLNSKGKKREFRFHPIKETVVEEPVDITPYLDQLDESLRDKVLQLQKGSDTEAQCEVMQEIVDQVLEEDFDSEQLSVLASCLQELFKAHFRGEVLPEEITEESLEESVGKPLYLIFRNLCQMQEDNSSFSLLLDLLSELYQKQPKIGYHLLYYLRASKAAAGKMNLYESFAQATQLGDLHTCLMMDMKACQEDDVRLLCHLTPSIYTEFPDETLRSGELLNMIVAVIDSAQLQELVCHVMMGNLVMFRKDSVLNILIQSLDWETFEQYCAWQLFLAHNIPLETIIPILQHLKYKEHPEALSCLLLQLRREKPSEEMVKMVLSRPCHPDDQFTTSILRHWCMKHDELLAEHIKSLLIKNNSLPRKRQSLRSSSSKLAQLTLEQILEHLDNLRLNLTNTKQNFFSQTPILQALQHVQASCDEAHKMKFSDLFSLAEEYEDSSTKPPKSRRKAALSSPRSRKNATQPPNAEEESGSSSASEEEDTKPKPTKRKRKGSSAVGSDSD

SEQ ID NO: 7205 - protein, 1042 aa, Homo sapiens; identical to SEQ ID NO: 7204

SEQ ID NO: 7206 - protein, 41 aa, Homo sapiens
TQPPNAEEESGSSSASEEEDTKPKPTKRKRKGSSAVGSDSD

SEQ ID NO: 7207 - protein, 280 aa, Homo sapiens
VYTYLRLIVDHHGTAQLQALRQKEVDFCISLLRERFMECLMIGRDLVRLLQNVARIPEFELLWKDIIHNPQALSPQFTGILQLLQSRTSRKFLACRLTPDMETKLLFMTSRVRFGQQKRYQDWFQRQYLSTPDSQSLRCDLIRYICGVVHPSNEVLSSDILPRWAIIGWLLTTCTSNVAASNAKLALFYDWLFFSPDKDSIMNIEPAILVMHHSMKPHPAITATLLDFMCRIIPNFYPPLEGHVRQGVFSSLNHIVEKRVLACKKYWLYLRLLGICLLGS

SEQ ID NO: 7208 - protein, 49 aa, Homo sapiens
  SITE 1: note = misc_feature - Xaa can be any naturally occurring amino acid
XSQSLRCDLIRYICGVVHPSNEVLSSDILPRWAIIGWLLTTCTTPSSPV

SEQ ID NO: 7209 - protein, 64 aa, Homo sapiens
MDLNSASTVVLQVLTQATSQDTAVLKPAEEQLKQWETQPGFYSVLLNIFTNHTLDINVRWLAVL

SEQ ID NO: 7210 - protein, 149 aa, Homo sapiens
MDLNSASTVVLQVLTQATSQDTAVLKPAEEQLKQWETQPGFYSVLLNIFTNHTLDINVRWLAVLYFKHGIDRYWRRVAPHALSEEEKTTLRAGLITNFNEPINQIATQIAVLIAKVARLDCPRQWPELIPTLIESVKVQDDLRQHRALL

SEQ ID NO: 7211 - protein, 162 aa, Homo sapiens
MDLNSASTVVLQVLTQATSQDTAVLKPAEEQLKQWETQPGFYSVLLNIFTNHTLDINVRWLAVLYFKHGIDRYWRRVAPHALSEEEKTTLRAGLITNFNEPINQIATQIAVLIAKVARLDCPRQWPELIPTLIESVKVQDDLRQHRALLTFYHVTKTLASKR

SEQ ID NO: 7212 - protein, 975 aa, Homo sapiens
MDLNSASTVVLQVLTQATSQDTAVLKPAEEQLKQWETQPGFYSVLLNIFTNHTLDINVRWLAVLYFKHGIDRYWRRVAPHALSEEEKTTLRAGLITNFNEPINQIATQIAVLIAKVARLDCPRQWPELIPTLIESVKVQDDLRQHRALLTFYHVTKTLASKRLAADRKLFYDLASGIYNFACSLWNHHTDTFLQEVSSGNEAAILSSLERTLLSLKVLRKLTVNGFVEPHKNMEVMGFLHGIFERLKQFLECSRSIGTDNVCRDRLEKTIILFTKVLLDFLDQHPFSFTPLIQRSLEFSVSYVFTEVGEGVTFERFIVQCMNLIKMIVKNYAYKPSKNFEDSSPETLEAHKIKMAFFTYPTLTEICRRLVSHYFLLTEEELTMWEEDPEGFTVEETGGDSWKYSLRPCTEVLFIDIFHEYNQTLTPVLLEMMQTLQGPTNVEDMNALLIKDAVYNAVGLAAYELFDSVDFDQWFKNQLLPELQVIHNRYKPLRRRVIWLIGQWISVKFKSDLRPMLYEAICNLLQDQDLVVRIETATTLKLTVDDFEFRTDQFLPYLETMFTLLFQLLQQVTECDTKMHVLHVLSCVIERVNMQIRPYVGCLVQYLPLLWKQSEEHNMLRCAILTTLIHLVQGLGADSKNLYPFLLPVIQLSTDVSQPPHVYLLEDGLELWLVTLENSPCITPELLRIFQNMSPLLELSSENLRTCFKIINGYIFLSSTEFLQTYAVGLCQSFCELLKEITTEGQVQVLKVVENALKVNPILGPQMFQPILPYVFKGIIEGERYPVVMSTYLGVMGRVLLQNTSFFSSLLNEMAHKFNQEMDQLLGNMIEMWVDRMDNITQPERRKLSALALLSLLPSDNSVIQDKFCGIINISVEGLHDVMTEDPETGTYKDCMLMSHLEEPKVTEDEEPPTEQDKRKKMLALKDPVHTVSLQQFIYEKLKAQQEMLGEQGFQSLMETVDTEIVTQLQEFLQGF

SEQ ID NO: 7213 - protein, 863 aa, Homo sapiens
MDLNSASTVVLQVLTQATSQDTAVLKPAEEQLKQWETQPGFYSVLLNIFTNHTLDINVRWLAVLYFKHGIDRYWRRVAPHALSEEEKTTLRAGLITNFNEPINQIATQIAVLIAKVARLDCPRQWPELIPTLIESVKVQDDLRQHRALLTFYHVTKTLASKRLAADRKLFYDLASGIYNFACSLWNHHTDTFLQEVSSGNEAAILSSLERTLLSLKVLRKLTVNGFVEPHKNMEVMGFLHGIFERLKQFLECSRSIGTDNVCRDRLEKTIILFTKVLLDFLDQHPFSFTPLIQRSLEFSVSYVFTEVGEGVTFERFIVQCMNLIKMIVKNYAYKPSKNFEDSSPETLEAHKIKMAFFTYPTLTEICRRLVSHYFLLTEEELTMWEEDPEGFTVEETGGDSWKYSLRPCTEVLFIDIFHEYNQTLTPVLLEMMQTLQGPTNVEDMNALLIKDAVYNAVGLAAYELFDSVDFDQWFKNQLLPELQVIHNRYKPLRRRVIWLIGQWISVKFKSDLRPMLYEAICNLLQDQDLVVRIETATTLKLTVDDFEFRTDQFLPYLETMFTLLFQLLQQVTECDTKMHVLHVLSCVIERVNMQIRPYVGCLVQYLPLLWKQSEEHNMLRCAILTTLIHLVQGLGADSKNLYPFLLPVIQLSTDVSQPPHVYLLEDGLELWLVTLENSPCITPELLRIFQNMSPLLELSSENLRTCFKIINGYIFLSSTEFLQTYAVGLCQSFCELLKEITTEGQVQVLKVVENALKVNPILGPQMFQPILPYVFKGIIEGERYPVVMSTYLGVMGRVLLQNTSFFSSLLNEMAHKFNQEMDQLLGNMIEMWVDRMDNITQPERRKLSALALLSLLPSDNSQF

SEQ ID NO: 7214 - protein, 59 aa, Homo sapiens
MDQLLGNMIEMWVDRMDNITQPERRKLSALALLSLLPSDNSFLYPWQPLFYTLTVKEPM

SEQ ID NO: 7215 - protein, 94 aa, Homo sapiens
MTEDPETGTYKDCMLMSHLEEPKVTEDEEPPTEQDKRKKMLALKDPVHTVSLQQFIYEKLKAQQEMLGEQGFQSLMETVDTEIVTQLQEFLQGF

SEQ ID NO: 7216 - protein, 1015 aa, Homo sapiens
MVQPIIHLGYVVYSLLYLGYKPVQHVTALNTVSSCHKMVSMDLNSASTVVLQVLTQATSQDTAVLKPAEEQLKQWETQPGFYSVLLNIFTNHTLDINVRWLAVLYFKHGIDRYWRRVAPHALSEEEKTTLRAGLITNFNEPINQIATQIAVLIAKVARLDCPRQWPELIPTLIESVKVQDDLRQHRALLTFYHVTKTLASKRLAADRKLFYDLASGIYNFACSLWNHHTDTFLQEVSSGNEAAILSSLERTLLSLKVLRKLTVNGFVEPHKNMEVMGFLHGIFERLKQFLECSRSIGTDNVCRDRLEKTIILFTKVLLDFLDQHPFSFTPLIQRSLEFSVSYVFTEVGEGVTFERFIVQCMNLIKMIVKNYAYKPSKNFEDSSPETLEAHKIKMAFFTYPTLTEICRRLVSHYFLLTEEELTMWEEDPEGFTVEETGGDSWKYSLRPCTEVLFIDIFHEYNQTLTPVLLEMMQTLQGPTNVEDMNALLIKDAVYNAVGLAAYELFDSVDFDQWFKNQLLPELQVIHNRYKPLRRRVIWLIGQWISVKFKSDLRPMLYEAICNLLQDQDLVVRIETATTLKLTVDDFEFRTDQFLPYLETMFTLLFQLLQQVTECDTKMHVLHVLSCVIERVNMQIRPYVGCLVQYLPLLWKQSEEHNMLRCAILTTLIHLVQGLGADSKNLYPFLLPVIQLSTDVSQPPHVYLLEDGLELWLVTLENSPCITPELLRIFQNMSPLLELSSENLRTCFKIINGYIFLSSTEFLQTYAVGLCQSFCELLKEITTEGQVQVLKVVENALKVNPILGPQMFQPILPYVFKGIIEGERYPVVMSTYLGVMGRVLLQNTSFFSSLLNEMAHKFNQEMDQLLGNMIEMWVDRMDNITQPERRKLSALALLSLLPSDNSVIQDKFCGIINISVEGLHDVMTEDPETGTYKDCMLMSHLEEPKVTEDEEPPTEQDKRKKMLALKDPVHTVSLQQFIYEKLKAQQEMLGEQGFQSLMETVDTEIVTQLQEFLQGF

SEQ ID NO: 7217 - protein, 160 aa, Homo sapiens
  SITE 1: note = misc_feature - Xaa can be any naturally occurring amino acid
XLRCAILTTLIHLVQVVENALKVNPILGPQMFQPILPYVFKGIIEGERYPVVMSTYLGVMGRVLLQNTSFFSSLLNEMAHKFNQEMDQLLGNMIEMWVDRMDNITQPERRKLSALALLSLLPSDNSVIQDKFCGIINISVEGLHDVMTEDPETGTYKDWP

SEQ ID NO: 7218 - protein, 1041 aa, Homo sapiens
MAAAAAAGAASGLPGPVAQGLKEALVDTLTGILSPVQEVRAAAEEQIKVLEVTEEFGVHLAELTVDPQGALAIRQLASVILKQYVETHWCAQSEKFRPPETTERAKIVIRELLPNGLRESISKVRSSVAYAVSAIAHWDWPEAWPQLFNLLMEMLVSGDLNAVHGAMRVLTEFTREVTDTQMPLVAPVILPEMYKIFTMAEVYGIRTRSRAVEIFTTCAHMICNMEELEKGAAKVLIFPVVQQFTEAFVQALQIPDGPTSDSGFKMEVLKAVTALVKNFPKHMVSSMQQILPIVWNTLTESAAFYVRTEVNYTEEVEDPVDSDGEVLGFENLVFSIFEFVHALLENSKFKSTVKKALPELIYYIILYMQITEEQIKVWTANPQQFVEDEDDDTFSYTVRIAAQDLLLAVATDFQNESAAALAAAATRHLQEAEQTKNSGTEHWWKIHEACMLALGSVKAIITDSVKNGRIHFDMHGFLTNVILADLNLSVSPFLLGRALWAASRFTVAMSPELIQQFLQATVSGLHETQPPSVRISAVRAIWGYCDQLKVSESTHVLQPFLPSILDGLIHLAAQFSSEVLNLVMETLCIVCTVDPEFTASMESKICPFTIAIFLKYSNDPVVASLAQDIFKELSQIEACQGPMQMRLIPTLVSIMQAPADKIPAGLCATAIDILTTVVRNTKPPLSQLLICQAFPAVAQCTLHTDDNATMQNGGECLRAYVSVTLEQVAQWHDEQGHNGLWYVMQVVSQLLDPRTSEFTAAFVGRLVSTLISKAGRELGENLDQILRAILSKMQQAETLSVMQSLIMVFAHLVHTQLEPLLEFLCSLPGPTGKPALEFVMAEWTSRQHLFYGQYEGKVSSVALCKLLQHGINADDKRLQDIRVKGEEIYSMDEGIRTRSKSAKNPERWTNIPLLVKILKLIINELSNVMEANAARQATPAEWSQDDSNDMWEDQEEEEEEEEDGLAGQLLSDILATSKYEEDYYEDDEEDDPDALKDPLYQIDLQAYLTDFLCQFAQQPCYIMFSGHLNDNERRVLQTIGI

SEQ ID NO: 7219 - protein, 155 aa, Homo sapiens
SNVMEANAARQATPAEWSQDDSNDMWEDQEEEEEEEEDGLAGQLLSDILATSKYEEDYYEDDEEDDPDALKDPLYQIDLQATLMTMRGEFYRPSASKKGSLSTFAPSGPAANHFAALTGLEMHFLLNLKWHLDPWPLASAVTLMTIQTRLTGAVT

SEQ ID NO: 7220 - protein, 127 aa, Homo sapiens
MDTQNLEKTAIKIQSWWRGNMVRRTLLQAALRAWVIQCWWRSMQAKMLEQRRRLALRLYTCQEWAVVKVQAQVRMWQARRRFLQARQAACIIQSHWRWHASQTRGLIRGHYEVRASRLELDIEILMT

SEQ ID NO: 7221 - protein, 107 aa, Homo sapiens
MVRRTLLQAALRAWVIQCWWRSMQAKMLEQRRRLALRLYTCQEWAVVKVQAQVRMWQARRRFLQARQAACIIQSHWRWHASQTRGLIRGHYEVRASRLELDIEILMT

SEQ ID NO: 7222 - protein, 596 aa, Homo sapiens
MAGNCGARGALSAHTLLFDLPPALLGELCAVLDSCDGALGWRGLAERLSSSWLDVRHIEKYVDQGKSGTRELLWSWAQKNKTIGDLLQVLQEMGHRRAIHLITNYGAVLSPSEKSYQEGGFPNILFKETANVTVDNVLIPEHNEKGILLKSSISFQNIIEGTRNFHKDFLIGEGEIFEVYRVEIQNLTYAVKLFKQEKKMQCKKHWKRFLSELEVLLLFHHPNILELAAYFTETEKFCLIYPYMRNGTLFDRLQCVGDTAPLPWHIRIGILIGISKAIHYLHNVQPCSVICGSISSANILLDDQFQPKLTDFAMAHFRSHLEHQSCTINMTSSSSKHLWYMPEEYIRQGKLSIKTDVYSFGIVIMEVLTGCRVVLDDPKHIQLRDLLRELMEKRGLDSCLSFLDKKVPPCPRNFSAKLFCLAGRCAATRAKLRPSMDEVLNTLESTQASLYFAEDPPTSLKSFRCPSPLFLENVPSIPVEDDESQNNNLLPSDEGLRIDRMTQKTPFECSQSEVMFLSLDKKPESKRNEEACNMPSSSCEESWFPKYIVPSQDLRPYKVNIDPSSEAPGHSCRSRPVESSCSSKFSWDEYEQYKKE

SEQ ID NO: 7223 - protein, 535 aa, Homo sapiens
MAGNCGARGALSAHTLLFDLPPALLGELCAVLDSCDGALGWRGLGAVLSPSEKSYQEGGFPNILFKETANVTVDNVLIPEHNEKGILLKSSISFQNIIEGTRNFHKDFLIGEGEIFEVYRVEIQNLTYAVKLFKQEKKMQCKKHWKRFLSELEVLLLFHHPNILELAAYFTETEKFCLIYPYMRNGTLFDRLQCVGDTAPLPWHIRIGILIGISKAIHYLHNVQPCSVICGSISSANILLDDQFQPKLTDFAMAHFRSHLEHQSCTINMTSSSSKHLWYMPEEYIRQGKLSIKTDVYSFGIVIMEVLTGCRVVLDDPKHIQLRDLLRELMEKRGLDSCLSFLDKKVPPCPRNFSAKLFCLAGRCAATRAKLRPSMDEVLNTLESTQASLYFAEDPPTSLKSFRCPSPLFLENVPSIPVEDDESQNNNLLPSDEGLRIDRMTQKTPFECSQSEVMFLSLDKKPESKRNEEACNMPSSSCEESWFPKYIVPSQDLRPYKVNIDPSSEAPGHSCRSRPVESSCSSKFSWDEYEQYKKE

SEQ ID NO: 7224 - protein, 93 aa, Homo sapiens
MAGNCGARGALSAHTLLFDLPPALLGELCAVLDSCDGALGWRGLVSKNKLCENGVLILQGFWHVVVCKYKDSKYGCVALFEKTPSETYLHMET

SEQ ID NO: 7225 - protein, 1257 aa, Homo sapiens
MASCSFTRDQATRRLRGAAAAAAAALAAVVTTPLLSSGTPTALIGTGSSCPGAMWLSTATGSRSDSESEEEDLPVGEEVCKRGYLRKQKHGHRRYFVLKLETADAPARLEYYENARKFRHSVRAAAAAAAAAASGAAIPPLIPPRRVITLYQCFSVSQRADARYRHLIALFTQDEYFAMVAENESEQESWYLLLSRLILESKRRRCGTLGAQPDGEPAALAAAAAAEPPFYKDVWQVIVKPRGLGHRKELSGVFRLCLTDEEVVFVRLNTEVASVVVQLLSIRRCGHSEQYFFLEVGRSTVIGPGELWMQVDDCVVAQNMHELFLEKMRALCADEYRARCRSYSISIGAHLLTLLSARRHLGLVPLEPGGWLRRSRFEQFCHLRAIGDGEDEMLFTRRFVTPSEPVAHSRRGRLHLPRGRRSRRAVSVPASFFRRLAPSPARPRHPAEAPNNGARLSSEVSGSGSGNFGEEGNPQGKEDQEGSGGDYMPMNNWGSGNGRGSGGGQGSNGQGSSSHSSGGNQCSGEGQGSRGGQGSNGQGSGGNQCSRDGQGTAGGHGSGGGQRPGGGHGSGGGQGPGDGHGSGGGKNSGGGKGSGSGKGSDGDGERGKSLKKRSYFGKLTQSKQQQMPPPPPPPPPPPPAGGTGGKGKSGGRFRLYFCVDRGATKECKEAKEVKDAEIPEGAARGPHRARAFDEDEDDPYVPMRPGVATPLVSSSDYMPMAPQNVSASKKRHSRSPFEDSRGYMMMFPRVSPPPAPSPPKAPDTNKEDDSKDNDSESDYMFMAPGAGAIPKNPRNPQGGSSSKSWSSYFSLPNPFRSSPLGQNDNSEYVPMLPGKFLGRGLDKEVSYNWDPKDAASKPSGEGSFSKPGDGGSPSKPSDHEPPKNKAKRPNRLSFITKGYKIKPKPQKPTHEQREADSSSDYVNMDFTKRESNTPAPSTQGLPDSWGIIAEPRQSAFSNYVNVEFGVPFPNPANDLSDLLRAIPRANPLSLDSARWPLPPLPLSATGSNAIEEEGDYIEVIFNSAMTPAMALADSAIRYDAETGRIYVVDPFSECCMDISLSPSRCSEPPPVARLLQEEEQERRRPQSRSQSFFAAARAAVSAFPTDSLERDLSPSSAPAVASAAEPTLALSQVVAAASALAAAPGIGAAAAAAGFDSASARWFQPVANAADAEAVRGAQDVAGGSNPGAHNPSANLARGDNQAGGAAAAAAAPEPPPRSRRVPRPPEREDSDNDDDTHVRMDFARRDNQFDSPKRGR

SEQ ID NO: 7226 - protein, 147 aa, Homo sapiens
MQELHLLWWALLLGLAQACPEPCDCGEKYGFQIADCAYRDLESVPPGFPANVTTLSLSANRLPGLPEGAFREVPLLQSLWLAHNEIRTVAAGALASLSHLKSLDLSHNLISDFAWSDLHNLSALQLLKMDSNELTFIPRDAFRSLRA

SEQ ID NO: 7227 - protein, 183 aa, Homo sapiens
MQELHLLWWALLLGLAQACPEPCDCGEKYGFQIADCAYRDLESVPPGFPANVTTLSLSANRLPGLPEGAFREVPLLQSLWLAHNEIRTVAAGALASLSHLKSLDLSHNLISDFAWSDLHNLSALQLLKMDSNELTFIPRDAFRSLRALRSLQLNHNRLHTLAEGTFTPLTALSHLQINENPFD

SEQ ID NO: 7228 - protein, 428 aa, Homo sapiens
MQELHLLWWALLLGLAQACPEPCDCGEKYGFQIADCAYRDLESVPPGFPANVTTLSLSANRLPGLPEGAFREVPLLQSLWLAHNEIRTVAAGALASLSHLKSLDLSHNLISDFAWSDLHNLSALQLLKMDSNELTFIPRDAFRSLRALRSLQLNHNRLHTLAEGTFTPLTALSHLQINENPFDCTCGIVWLKTWALTTAVSIPEQDNIACTSPHVLKGTPLSRLPPLPCSAPSVQLSYQPSQDGAELRPGFVLALHCDVDGQPAPQLHWHIQIPSGIVEITSPNVGTDGRALPGTPVASSQPRFQAFANGSLLIPDFGKLEEGTYSCLATNELGSAESSVDVALATPGEGGEDTLGRRFHGKAVEGKGCYTVDNEVQPSGPEDNVVIIYLSRAGNPEAAVAEGVPGQLPPGLLLLGQSLLLFFFLTSF

SEQ ID NO: 7229 - protein, 428 aa, Homo sapiens; identical to SEQ ID NO: 7228

SEQ ID NO: 7230 - protein, 5 aa, Homo sapiens
MFPLR

SEQ ID NO: 7231 - protein, 89 aa, Homo sapiens
MFPLRALWLVWALLGVAGSCPEPCACVDKYAHQFADCAYKELREVPEGLPANVTTLSLSANKITVLRRGAFADVTQVTSLWLAHNEVRT

SEQ ID NO: 7232 - protein, 114 aa, Homo sapiens
MFPLRALWLVWALLGVAGSCPEPCACVDKYAHQFADCAYKELREVPEGLPANVTTLSLSANKITVLRRGAFADVTQVTSLWLAHNEVRTVEPGALAVLSQLKNLDLSHNFISSF

SEQ ID NO: 7233 - protein, 138 aa, Homo sapiens
MFPLRALWLVWALLGVAGSCPEPCACVDKYAHQFADCAYKELREVPEGLPANVTTLSLSANKITVLRRGAFADVTQVTSLWLAHNEVRTVEPGALAVLSQLKNLDLSHNFISSFPWSDLRNLSALQLLKMNHNRLGSL

SEQ ID NO: 7234 - protein, 334 aa, Homo sapiens
MFPLRALWLVWALLGVAGSCPEPCACVDKYAHQFADCAYKELREVPEGLPANVTTLSLSANKITVLRRGAFADVTQVTSLWLAHNEVRTVEPGALAVLSQLKNLDLSHNFISSFPWSDLRNLSALQLLKMNHNRLGSLPRDALGALPDLRSLRINNNRLAGEACHVQVVFSTKKELPSLLVIVAVSVFLLVLATVPLLGAACCHLLAKHPGKPYRLILRPQAPDPMEKRIAADFDPRASYLESEKSYPAGGEAGGEEPEDVQGEGLDEDAEQGDPSGDLQREESLAACSLVESQSKANQEEFEAGSEYSDRLPLGAEAVNIAQEINGNYRQTAG

SEQ ID NO: 7235 - protein, 745 aa, Homo sapiens
MFPLRALWLVWALLGVAGSCPEPCACVDKYAHQFADCAYKELREVPEGLPANVTTLSLSANKITVLRRGAFADVTQVTSLWLAHNEVRTVEPGALAVLSQLKNLDLSHNFISSFPWSDLRNLSALQLLKMNHNRLGSLPRDALGALPDLRSLRINNNRLRTLAPGTFDALSALSHLQLYHNPFHCGCGLVWLQAWAASTRVSLPEPDSIACASPPALQGVPVYRLPALPCAPPSVHLSAEPPLEAPGTPLRAGLAFVLHCIADGHPTPRLQWQLQIPGGTVVLEPPVLSGEDDGVGAEEGEGEGDGDLLTQTQAQTPTPAPAWPAPPATPRFLALANGSLLVPLLSAKEAGVYTCRAHNELGANSTSIRVAVAATGPPKHAPGAGGEPDGQAPTSERKSTAKGRGNSVLPSKPEGKIKGQGLAKVSILGETETEPEEDTSEGEEAEDQILADPAEEQRCGNGDPSRYVSNHAFNQSAELKPHVFELGVIALDVAEREARVQLTPLAARWGPGPGGAGGAPRPGRRPLRLLYLCPAGGGAAVQWSRVEEGVNAYWFRGLRPGTNYSVCLALAGEACHVQVVFSTKKELPSLLVIVAVSVFLLVLATVPLLGAACCHLLAKHPGKPYRLILRPQAPDPMEKRIAADFDPRASYLESEKSYPAGGEAGGEEPEDVQGEGLDEDAEQGDPSGDLQREESLAACSLVESQSKANQEEFEAGSEYSDRLPLGAEAVNIAQEINGNYRQTAG

SEQ ID NO: 7236 - protein, 745 aa, Homo sapiens; identical to SEQ ID NO: 7235

SEQ ID NO: 7237 - protein, 745 aa, Homo sapiens; identical to SEQ ID NO: 7235

SEQ ID NO: 7238 - protein, 745 aa, Homo sapiens; identical to SEQ ID NO: 7235

SEQ ID NO: 7239 - protein, 745 aa, Homo sapiens; identical to SEQ ID NO: 7235

SEQ ID NO: 7240 - protein, 464 aa, Homo sapiens
MVRLAAELLLLLGLLLLTLHITVLRGSGAADGPDAAAGNASQAQLQNNLNVGSDTTSETSFSLSKEAPREHLDHQAAHQPFPRPRFRQETGHPSLQRDFPRSFLLDLPNFPDLSKADINGQNPNIQVTIEVVDGPDSEADKDQHPENKPSWSVPSPDWRAWWQRSLSLARANSGDQDYKYDSTSDDSNFLNPPRGWDHTAPGHRTFETKDQPEYDSTDGEGDWSLWSVCSVTCGNGNQKRTRSCGYACTATESRTCDRPNCPGIEDTFRTAATEVSLLAGSEEFNATKLFEVDTDSCERWMSCKSEFLKKYMHKVMNDLPSCPCSYPTEVAYSTADIFDRIKRKDFRWKDASGPKEKLEIYKPTARYCIRSMLSLESTTLAAQHCCYGDNMQLITRGKGAGTPNLISTEFSAELHYKVDVLPWIICKGDWSRYNEARPPNNGQKCTESPSDEDYIKQFQEAREY

SEQ ID NO: 7241 - protein, 76 aa, Homo sapiens
MRALRDRAGLLLCVLLLAALLEAALGLPVKKPRLRGPRPGSLTRLAEPPFQVRASSERSPAGARNLALCGVAGQGR

SEQ ID NO: 7242 - protein, 292 aa, Homo sapiens
MRALRDRAGLLLCVLLLAALLEAALGLPVKKPRLRGPRPGSLTRLAEVSASPDPRPLKEEEEAPLLPRTHLQAEPHQHGCWTVTEPAAMTPGNATPPRTPEVTPLRLELQKLPGLANTTLSTPNPDTQASASPDPRPLREEEEARLLPRTHLQAELHQHGCWTVTEPAALTPGNATPPRTQEVTPLLLELQKLPELVHATLSTPNPDNQTMSLRRSGVPGLPAVGTAALASSRGLGPVAMAALPPRPVPVTCPPVLALRTRTPWASPVRSGSSWPAMLRTCMIKMWTAVRSG

SEQ ID NO: 7243 - protein, 571 aa, Homo sapiens
MRALRDRAGLLLCVLLLAALLEAALGLPVKKPRLRGPRPGSLTRLAEVSASPDPRPLKEEEEAPLLPRTHLQAEPHQHGCWTVTEPAAMTPGNATPPRTPEVTPLRLELQKLPGLANTTLSTPNPDTQASASPDPRPLREEEEARLLPRTHLQAELHQHGCWTVTEPAALTPGNATPPRTQEVTPLLLELQKLPELVHATLSTPNPDNQVTIKVVEDPQAEVSIDLLAEPSNPPPQDTLSWLPALWSFLWGDYKGEEKDRAPGEKGEEKEEDEDYPSEDIEGEDQEDKEEDEEEQALWFNGTTDNWDQGWLAPGDWVFKDSVSYDYEPQKEWSPWSPCSGNCSTGKQQRTRPCGYGCTATETRTCDLPSCPGTEDKDTLGLPSEEWKLLARNATDMHDQDVDSCEKWLNCKSDFLIKYLSQMLRDLPSCPCAYPLEAMDSPVSLQDEHQGRSFRWRDASGPRERLDIYQPTARFCLRSMLSGESSTLAAQHCCYDEDSRLLTRGKGAGMPNLISTDFSPKLHFKFDTTPWILCKGDWSRLHAVLPPNNGRACTDNPLEEEYLAQLQEAKEY

SEQ ID NO: 7244 - protein, 185 aa, Homo sapiens
MRALRDRAGLLLCVLLLAALLEAALGLPVKKPRLRGPRPGSLTRLAEVSASPDPRPLKEEEEAPLLPRTHLQAEPHQHGCWTVTEPAAMTPGNATPPRTPEVTPLRLELQKLPGLANTTLSTPNPDTQVTIKVVEDPQAEVSIDLLAEPSNPPPQDTLSWLPALWSFLWGDYKGEEKDRAPGEKG

SEQ ID NO: 7245 - protein, 104 aa, Homo sapiens
  SITE 1: note = misc_feature - Xaa can be any naturally occurring amino acid
XCVLLLAALLEAALGLPVKKPRLRGPRPGSLTRLAEVSGGGTGLRSALSVPPPQPAGSSRAGSGTGTHTGSDPPMERGAGAGRKLPDTGRCPGAPDFGASTPRA

SEQ ID NO: 7246 - protein, 73 aa, Homo sapiens
  SITE 1: note = misc_feature - Xaa can be any naturally occurring amino acid
XRLAEVSGGGTGLRSALSVPPPQPAGSSRAGSGTGTHTGSDPPMERGAGAGRKLPDTGRCPGAPDFGASTPRA

SEQ ID NO: 7247 - protein, 614 aa, Homo sapiens
MAWEARREPGPRRAAVRETVMLLLCLGVPTGRPYNVDTESALLYQGPHNTLFGYSVVLHSHGANRWLLVGAPTANWLANASVINPGAIYRCRIGKNPGQTCEQLQLGSPNGEPCGKTCLEERDNQWLGVTLSRQPGENGSIVTCGHRWKNIFYIKNENKLPTGGCYGVPPDLRTELSKRIAPCYQDYVKKFGENFASCQAGISSFYTKDLIVMGAPGSSYWTGSLFVYNITTNKYKAFLDKQNQVKFGSYLGYSVGAGHFRSQHTTEVVGGAPQHEQIGKAYIFSIDEKELNILHEMKGKKLGSYFGASVCAVDLNADGFSDLLVGAPMQSTIREEGRVFVYINSGSGAVMNAMETNLVGSDKYAARFGESIVNLGDIDNDGFEDVAIGAPQEDDLQGAIYIYNGRADGISSTFSQRIEGLQISKSLSMFGQSISGQIDADNNGYVDVAVGAFRSDSAVLLRTRPVVIVDASLSHPESVNRTKFDCVENGWPSVCIDLTLCFSYKGKEVPGYIVLFYNMSLDVNRKAESPPRFYFSSNGTSDVITGSIQVSSREANCRTHQAFMRKDVRDILTPIQIEAAYHLGPHVISKRSTEEFPPLQPILQQKKEKDIMKK

SEQ ID NO: 7248 - protein, 1032 aa, Homo sapiens [sequence omitted]

SEQ ID NO: 7249 - protein, 195 aa, Homo sapiens
MAWEARREPGPRRAAVRETVMLLLCLGVPTGRPYNVDTESALLYQGPHNTLFGYSVVLHSHGANRWLLVGAPTANWLANASVINPGAIYRCRIGKNPGQTCEQLQLGSPNGEPCGKTCLEERDNQWLGVTLSRQPGENGSIVTCGHRWKNIFYIKNENKLPTGGCYGVPPDLRTELSKRIAPCYQGSISKYRART

SEQ ID NO: 7250 - protein, 1035 aa, Homo sapiens
MGGPAAPRGAGRLRALLLALVVAGIPAGAYNLDPQRPVHFQGPADSFFGYAVLEHFHDNTRWVLVGAPKADSKYSPSVKSPGAVFKCRVHTNPDRRCTELDMARGKNRGTSCGKTCREDRDDEWMGVSLARQPKADGRVLACAHRWKNIYYEADHILPHGFCYIIPSNLQAKGRTLIPCYEEYKKKYGEEHGSCQAGIAGFFTEELVVMGAPGSFYWAGTIKVLNLTDNTYLKLNDEVIMNRRYTYLGYAVTAGHFSHPSTIDVVGGAPQDKGIGKVYIFRADRRSGTLIKIFQASGKKMGSYFGSSLCAVDLNGDGLSDLLVGAPMFSEIRDEGQVTVYINRGNGALEEQLALTGDGAYNAHFGESIASLDDLDNDGFPDVAIGAPKEDDFAGAVYIYHGDAGGIVPQYSMKLSGQKINPVLRMFGQSISGGIDMDGNGYPDVTVGAFMSDSVVLLRARPVITVDVSIFLPGSINITAPQCHDGQQPVNCLNVTTCFSFHGKHVPGEIGLNYVLMADVAKKEKGQMPRVYFVLLGETMGQVTEKLQLTYMEETCRHYVAHVKRRVQDVISPIVFEAAYSLSEHVTGEEERELPPLTPVLRWKKGQKIAQKNQTVFERNCRSEDCAADLQLQGKLLLSSMDEKTLYLALGAVKNISLNISISNLGDDAYDANVSFNVSRELFFINMWQKEEMGISCELLESDFLKCSVGFPFMRSKSKYEFSVIFDTSHLSGEEEVLSFIVTAQSGNTERSESLHDNTLVLMVPLMHEVDTSITGIMSPTSFVYGESVDAANFIQLDDLECHFQPINITLQVYNTGPSTLPGSSVSISFPNRLSSGGAEMFHVQEMVVGQEKGNCSFQKNPTPCIIPQEQENIFHTIFAFFTKSGRKVLDCEKPGISCLTAHCNFSALAKEESRTIDIYMLLNTEILKKDSSSVIQFMSRAKVKVDPALRVVEIAHGNPEEVTVVFEALHNLEPRGYVVGWIIAISLLVGILIFLLLAVLLWKMGFFRRRYKEIIEAEKNRKENEDSWDWVQKNQ

SEQ ID NO: 7251 - protein, 632 aa, Homo sapiens
MGGPAAPRGAGRLRALLLALVVAGIPAGAYNLDPQRPVHFQGPADSFFGYAVLEHFHDNTRWVLVGAPKADSKYSPSVKSPGAVFKCRVHTNPDRRCTELDMARGKNRGTSCGKTCREDRDDEWMGVSLARQPKADGRVLACAHRWKNIYYEADHILPHGFCYIIPSNLQAKGRTLIPCYEEYKKKYGEEHGSCQAGIAGFFTEELVVMGAPGSFYWAGTIKVLNLTDNTYLKLNDEVIMNRRYTYLGYAVTAGHFSHPSTIDVVGGAPQDKGIGKVYIFRADRRSGTLIKIFQASGKKMGSYFGSSLCAVDLNGDGLSDLLVGAPMFSEIRDEGQVTVYINRGNGALEEQLALTGDGAYNAHFGESIASLDDLDNDGFPDVAIGAPKEDDFAGAVYIYHGDAGGIVPQYSMKLSGQKINPVLRMFGQSISGGIDMDGNGYPDVTVGAFMSDSVVLLRARPVITVDVSIFLPGSINITAPQCHDGQQPVNCLNVTTCFSFHGKHVPGEIGLNYVLMADVAKKEKGQMPRVYFVLLGETMGQVTEKLQLTYMEETCRHYVAHVKRRVQDVISPIVFEAAYSLSEHVTGEEERELPPLTPVLRWKKGQKIAQKNQVRTLKLILSTQGGSCTEQK

SEQ ID NO: 7252 - protein, 69 aa, Homo sapiens
  SITE 1: note = misc_feature - Xaa can be any naturally occurring amino acid
XKKDSSSVIQFMSRAKVKVDPALRVVEIAHGNPEEVTMGFFRRRYKEIIEAEKNRKENEDSWDWVQKNQ

SEQ ID NO: 7253 - protein, 404 aa, Homo sapiens
MKDSCITVMAMALLSGFFFFAPASSYNLDVRGARSFSPPRAGRHFGYRVLQIKSLIPQFQGRLVANLTYTLQLDGHRTRRRGLFPGGRHELRRNIAVTTSMSCTDFSFHFPMMFNTLVNSSWGDSVELHANVTCNNEDSDLLEDNSATTIIPILYPINILIQDQEDSTLYVSFTPKGPKIHQVKHMYQVRIQPSIHDHNIPTLEAVVGVPQPPSEGPITHQWSVQMEPPVPCHYEDLERLPDAAEPCLPGALFRCPVVFRQEILVQVIGTLELVGEIEASSMFSLCSSLSISFNSSKHFHLYGSNASLAQVVMKVDVVYEKQMLYLYVLSGIGGLLLLLLIFIVLYKVGFFKRNLKEKMEAGRGVPNGIPAEDSEQLASGQEAGDPGCLKPLHEKDSESGGGKD

SEQ ID NO: 7254 - protein, 109 aa, Homo sapiens
MKDSCITVMAMALLSGFFFFAPASSYNLDVRGARSFSPPRAGRHFGYRVLQLDGHRTRRRGLFPGGRHELRRNIAVTTSMSCTDFSFHFPIQSPASNCFCQPLCGAEPE

SEQ ID NO: 7255 - protein, 55 aa, Homo sapiens
MKDSCITVMAMALLSGFFFFAPASSYNLDVRGARSFSPPRAGRHFGYRVLQVGNG

SEQ ID NO: 7256 - protein, 1170 aa, Homo sapiens
MKDSCITVMAMALLSGFFFFAPASSYNLDVRGARSFSPPRAGRHFGYRVLQVGNGVIVGAPGEGNSTGSLYQCQSGTGHCLPVTLRGSNYTSKYLGMTLATDPTDGSILACDPGLSRTCDQNTYLSGLCYLFRQNLQGPMLQGRPGFQECIKGNVDLVFLFDGSMSLQPDEFQKILDFMKDVMKKLSNTSYQFAAVQFSTSYKTEFDFSDYVKRKDPDALLKHVKHMLLLTNTFGAINYVATEVFREELGARPDATKVLIIITDGEATDSGNIDAAKDIIRYIIGIGKHFQTKESQETLHKFASKPASEFVKILDTFEKLKDLFTELQKKIYVIEGTSKQDLTSFNMELSSSGISADLSRGHAVVGAVGAKDWAGGFLDLKADLQDDTFIGNEPLTPEVRAGYLGYTVTWLPSRQKTSLLASGAPRYQHMGRVLLFQEPQGGGHWSQVQTIHGTQIGSYFGGELCGVDVDQDGETELLLIGAPLFYGEQRGGRVFIYQRRQLGFEEVSELQGDPGYPLGRFGEAITALTDINGDGLVDVAVGAPLEEQGAVYIFNGRHGGLSPQPSQRIEGTQVLSGIQWFGRSIHGVKDLEGDGLADVAVGAESQMIVLSSRPVVDMVTLMSFSPAEIPVHEVECSYSTSNKMKEGVNITICFQIKSLIPQFQGRLVANLTYTLQLDGHRTRRRGLFPGGRHELRRNIAVTTSMSCTDFSFHFPVCVQDLISPINVSLNFSLWEEEGTPRDQRAQGKDIPPILRPSLHSETWEIPFEKNCGEDKKCEANLRVSFSPARSRALRLTAFASLSVELSLSNLEEDAYWVQLDLHFPPGLSFRKVEMLKPHSQIPVSCEELPEESRLLSRALSCNVSSPIFKAGHSVALQMMFNTLVNSSWGDSVELHANVTCNNEDSDLLEDNSATTIIPILYPINILIQDQEDSTLYVSFTPKGPKIHQVKHMYQVRIQPSIHDHNIPTLEAVVGVPQPPSEGPITHQWSVQMEPPVPCHYEDLERLPDAAEPCLPGALFRCPVVFRQEILVQVIGTLELVGEIEASSMFSLCSSLSISFNSSKHFHLYGSNASLAQVVMKVDVVYEKQMLYLYVLSGIGGLLLLLLIFIVLYKVGFFKRNLKEKMEAGRGVPNGIPAEDSEQLASGQEAGDPGCLKPLHEKDSESGGGKD

SEQ ID NO: 7257 - protein, 162 aa, Homo sapiens
MKDSCITVMAMALLSGFFFFAPASSYNLDVRGARSFSPPRAGRHFGYRVLQVGNGVIVGAPGEGNSTGSLYQCQSGTGHCLPVTLRGSNYTSKYLGMTLATDPTDGSILACDPGLSRTCDQNTYLSGLCYLFRQNLQGPMLQGRPGFQVCCCSVFHKLQNRI

SEQ ID NO: 7258 - protein, 1086 aa, Homo sapiens
MKDSCITVMAMALLSGFFFFAPASSYNLDVRGARSFSPPRAGRHFGYRVLQVGNGVIVGAPGEGNSTGSLYQCQSGTGHCLPVTLRGSNYTSKYLGMTLATDPTDGSILFAAVQFSTSYKTEFDFSDYVKRKDPDALLKHVKHMLLLTNTFGAINYVATEVFREELGARPDATKVLIIITDGEATDSGNIDAAKDIIRYIIGIGKHFQTKESQETLHKFASKPASEFVKILDTFEKLKDLFTELQKKIYVIEGTSKQDLTSFNMELSSSGISADLSRGHAVVGAVGAKDWAGGFLDLKADLQDDTFIGNEPLTPEVRAGYLGYTVTWLPSRQKTSLLASGAPRYQHMGRVLLFQEPQGGGHWSQVQTIHGTQIGSYFGGELCGVDVDQDGETELLLIGAPLFYGEQRGGRVFIYQRRQLGFEEVSELQGDPGYPLGRFGEAITALTDINGDGLVDVAVGAPLEEQGAVYIFNGRHGGLSPQPSQRIEGTQVLSGIQWFGRSIHGVKDLEGDGLADVAVGAESQMIVLSSRPVVDMVTLMSFSPAEIPVHEVECSYSTSNKMKEGVNITICFQIKSLIPQFQGRLVANLTYTLQLDGHRTRRRGLFPGGRHELRRNIAVTTSMSCTDFSFHFPVCVQDLISPINVSLNFSLWEEEGTPRDQRAGKDIPPILRPSLHSETWEIPFEKNCGEDKKCEANLRVSFSPARSRALRLTAFASLSVELSLSNLEEDAYWVQLDLHFPPGLSFRKVEMLKPHSQIPVSCEELPEESRLLSRALSCNVSSPIFKAGHSVALQMMFNTLVNSSWGDSVELHANVTCNNEDSDLLEDNSATTIIPILYPINILIQDQEDSTLYVSFTPKGPKIHQVKHMYQVRIQPSIHDHNIPTLEAVVGVPQPPSEGPITHQWSVQMEPPVPCHYEDLERLPDAAEPCLPGALFRCPVVFRQEILVQVIGTLELVGEIEASSMFSLCSSLSISFNSSKHFHLYGSNASLAQVVMKVDVVYEKQMLYLYVLSGIGGLLLLLLIFIVLYKVGFFKRNLKEKMEAGRGVPNGIPAEDSEQLASGQEAGDPGCLKPLHEKDSESGGGKD

SEQ ID NO: 7259 - protein, 204 aa, Homo sapiens
MKDSCITVMAMALLSGFFFFAPASSYNLDVRGARSFSPPRAGRHFGYRVLQVGNGVIVGAPGEGNSTGSLYQCQSGTGHCLPVTLRGSNYTSKYLGMTLATDPTDGSILFAAVQFSTSYKTEFDFSDYVKRKDPDALLKHVKHMLLLTNTFGAINYVATEVFREELGARPDATKVLIIITDGEATDSGNIDAAKDIIRYIIGVG

SEQ ID NO: 7260 - protein, 90 aa, Homo sapiens
MKDSCITVMAMALLSGFFFFERPNGKLYPQALGRAFRALGGPGVAPSIFPEVNALEGKRRVRVAWGATSGWAWDRPPAGHVQGRGSLGRS

SEQ ID NO: 7261 - protein, 41 aa, Homo sapiens
MTLATDPTDGSILACDPGLSRTCDQNTYLSGLCYLFRQNLQ

SEQ ID NO: 7262 - protein, 38 aa, Homo sapiens
  SITE 1: note = misc_feature - Xaa can be any naturally occurring amino acid
XKEGVNITICFQIKSLIPQFQAGWPPDQKTGVVPRRET

SEQ ID NO: 7263 - protein, 1163 aa, Homo sapiens
MTRTRAALLLFTALATSLGFNLDTEELTAFRVDSAGFGDSVVQYANSWVVVGAPQKITAANQTGGLYQCGYSTGACEPIGLQVPPEAVNMSLGLSLASTTSPSQLLACGPTVHHECGRNMYLTGLCFLLGPTQLTQRLPVSRQECPRQEQDIVFLIDGSGSISSRNFATMMNFVRAVISQFQRPSTQFSLMQFSNKFQTHFTFEEFRRSSNPLSLLASVHQLQGFTYTATAIQNVVHRLFHASYGARRDAAKILIVITDGKKEGDSLDYKDVIPMADAAGIIRYAIGVGLAFQNRNSWKELNDIASKPSQEHIFKVEDFDALKDIQNQLKEKIFAIEGTETTSSSSFELEMAQEGFSAVFTPDGPVLGAVGSFTWSGGAFLYPPNMSPTFINMSQENVDMRDSYLGYSTELALWKGVQSLVLGAPRYQHTGKAVIFTQVSRQWRMKAEVTGTQIGSYFGASLCSVDVDSDGSTDLVLIGAPHYYEQTRGGQVSVCPLPRGWRRWWCDAVLYGEQGHPWGRFGAALTVLGDVNGDKLTDVVIGAPGEEENRGAVYLFHGVLGPSISPSHSQRIAGSQLSSRLQYFGQALSGGQDLTQDGLVDLAVGARGQVLLLRTRPVLWVGVSMQFIPAEIPRSAFECREQVVSEQTLVQSNICLYIDKRSKNLLGSRDLQSSVTLDLALDPGRLSPRATFQETKNRSLSRVRVLGLKAHCENFNLLLPSCVEDSVTPITLRLNFTLVGKPLLAFRNLRPMLAADAQRYFTASLPFEKNCGADHICQDNLGISFSFPGLKSLLVGSNLELNAEVMVWNDGEDSYGTTITFSHPAGLSYRYVAEGQKQGQLRSLHLTCDSAPVGSQGTWSTSCRINHLIFRGGAQITFLATFDVSPKAVLGDRLLLTANVSSENNTPRTSKTTFQLELPVKYAVYTVVSSHEQFTKYLNFSESEEKESHVAMHRYQVNNLGQRDLPVSINFWVPVELNQEAVWMDVEVSHPQNPSLRCSSEKIAPPASDFLAHIQKNPVLDCSIAGCLRFRCDVPSFSVQEELDFTLKGNLSFGWVRQILQKKVSVVSVAEITFDTSVYSQLPGQEAFMRAQTTTVLEKYKVHNPTPLIVGSSIGGLLLLALITAVLYKVGFFKRQYKEMMEEANGQIAPENGTQTPSPPSEK

SEQ ID NO: 7264 - protein, 1169 aa, Homo sapiens
MTRTRAALLLFTALATSLGFNLDTEELTAFRVDSAGFGDSVVQYANSWVVVGAPQKITAANQTGGLYQCGYSTGACEPIGLQVPPEAVNMSLGLSLASTTSPSQLLACGPTVHHECGRNMYLTGLCFLLGPTQLTQRLPVSRQECPRQEQDIVFLIDGSGSISSRNFATMMNFVRAVISQFQRPSTQFSLMQFSNKFQTHFTFEEFRRSSNPLSLLASVHQLQGFTYTATAIQNVVHRLFHASYGARRDAAKILIVITDGKKEGDSLDYKDVIPMADAAGIIRYAIGVGLAFQNRNSWKELNDIASKPSQEHIFKVEDFDALKDIQNQLKEKIFAIEGTETTSSSSFELEMAQEGFSAVFTPDGPVLGAVGSFTWSGGAFLYPPNMSPTFINMSQENVDMRDSYLGYSTELALWKGVQSLVLGAPRYQHTGKAVIFTQVSRQWRMKAEVTGTQIGSYFGASLCSVDVDSDGSTDLVLIGAPHYYEQTRGGQVSVCPLPRGWRRWWCDAVLYGEQGHPWGRFGAALTVLGDVNGDKLTDVVIGAPGEEENRGAVYLFHGVLGPSISPSHSQRIAGSQLSSRLQYFGQALSGGQDLTQDGLVDLAVGARGQVLLLRTRPVLWVGVSMQFIPAEIPRSAFECREQVVSEQTLVQSNICLYIDKRSKNLLGSRDLQSSVTLDLALDPGRLSPRATFQETKNRSLSRVRVLGLKAHCENFNLLLPSCVEDSVTPITLRLNFTLVGKPLLAFRNLRPMLAADAQRYFTASLPFEKNCGADHICQDNLGISFSFPGLKSLLVGSNLELNAEVMVWNDGEDSYGTTITFSHPAGLSYRYVAEGQKQGQLRSLHLTCDSAPVGSQGTWSTSCRINHLIFRGGAQITFLATFDVSPKAVLGDRLLLTANVSSENNTPRTSKTTFQLELPVKYAVYTVVSSHEQFTKYLNFSESEEKESHVAMHRYQVNNLGQRDLPVSINFWVPVELNQEAVWMDVEVSHPQNPSLRCSSEKIAPPASDFLAHIQKNPVLDCSIAGCLRFRCDVPSFSVQEELDFTLKGNLSFGWVRQILQKKVSVVSVAEITFDTSVYSQLPGQEAFMRAQTTTVLEKYKVHNPTPLIVGSSIGGLLLLALITAVLYKVGFFKRQYKEMMEEANGQIAPENGTQTPSPPTPHYPQDNV

SEQ ID NO: 7265 - protein, 181 aa, Homo sapiens
MTRTRAALLLFTALATSLGFNLDTEELTAFRVDSAGFGDSVVQYANSWVVVGAPQKITAANQTGGLYQCGYSTGACEPIGLQVPPEAVNMSLGLSLASTTSPSQLLLTQRLPVSRQGECRDHQGFEELTHIQLGVRWARDSLARVDQKEGIWKKSYHVLQWFLTLLPAHPADRPHAAGPFL

SEQ ID NO: 7266 - protein, 49 aa, Homo sapiens
MNLQPIFWIGLISSVCCVFAQTDENRCLKANAKSCGECIQAGPNCGWCT

SEQ ID NO: 7267 - protein, 89 aa, Homo sapiens
MNLQPIFWIGLISSVCCVFAQTDENRCLKANAKSCGECIQAGPNCGWCTNSTFLQEGMPTSARCDDLEALKKKGCPPDDIENPRGSKDI

SEQ ID NO: 7268 - protein, 104 aa, Homo sapiens
MNLQPIFWIGLISSVCCVFAQTDENRCLKANAKSCGECIQAGPNCGWCTNSTFLQEGMPTSARCDDLEALKKKGCPPDDIENPRGSKDIKKNKNVTNRSKGTAE

SEQ ID NO: 7269 - protein, 125 aa, Homo sapiens
MNLQPIFWIGLISSVCCVFAQTDENRCLKANAKSCGECIQAGPNCGWCTNSTFLQEGMPTSARCDDLEALKKKGCPPDDIENPRGSKDIKKNKNVTNRSKGTAEKLKPEDITQIQPQQLVLRLRS

SEQ ID NO: 7270 - protein, 136 aa, Homo sapiens
MNLQPIFWIGLISSVCCVFAQTDENRCLKANAKSCGECIQAGPNCGWCTNSTFLQEGMPTSARCDDLEALKKKGCPPDDIENPRGSKDIKKNKNVTNRSKGTAEKLKPEDITQIQPQQLVLRLRSGEPQTFTLKFK

SEQ ID NO: 7271 - protein, 143 aa, Homo sapiens
MNLQPIFWIGLISSVCCVFAQTDENRCLKANAKSCGECIQAGPNCGWCTNSTFLQEGMPTSARCDDLEALKKKGCPPDDIENPRGSKDIKKNKNVTNRSKGTAEKLKPEDITQIQPQQLVLRLRSGEPQTFTLKFKRAEDYPI

SEQ ID NO: 7272 - protein, 163 aa, Homo sapiens
MNLQPIFWIGLISSVCCVFAQTDENRCLKANAKSCGECIQAGPNCGWCTNSTFLQEGMPTSARCDDLEALKKKGCPPDDIENPRGSKDIKKNKNVTNRSKGTAEKLKPEDITQIQPQQLVLRLRSGEPQTFTLKFKRAEDYPIDLYYLMDLSYSMKDDLENVK

SEQ ID NO: 7273 - protein, 798 aa, Homo sapiens
MNLQPIFWIGLISSVCCVFAQTDENRCLKANAKSCGECIQAGPNCGWCTNSTFLQEGMPTSARCDDLEALKKKGCPPDDIENPRGSKDIKKNKNVTNRSKGTAEKLKPEDITQIQPQQLVLRLRSGEPQTFTLKFKRAEDYPIDLYYLMDLSYSMKDDLENVKSLGTDLMNEMRRITSDFRIGFGSFVEKTVMPYISTTPAKLRNPCTSEQNCTSPFSYKNVLSLTNKGEVFNELVGKQRISGNLDSPEGGFDAIMQVAVCGSLIGWRNVTRLLVFSTDAGFHFAGDGKLGGIVLPNDGQCHLENNMYTMSHYYDYPSIAHLVQKLSENNIQTIFAVTEEFQPVYKELKNLIPKSAVGTLSANSSNVIQLIIDAYNSLSSEVILENGKLSEGVTISYKSYCKNGVNGTGENGRKCSNISIGDEVQFEISITSNKCPKKDSDSFKIRPLGFTEEVEVILQYICECECQSEGIPESPKCHEGNGTFECGACRCNEGRVGRHCECSTDEVNSEDMDAYCRKENSSEICSNNGECVCGQCVCRKRDNTNEIYSGKFCECDNFNCDRSNGLICGGNGVCKCRVCECNPNYTGSACDCSLDTSTCEASNGQICNGRGICECGVCKCTDPKFQGQTCEMCQTCLGVCAEHKECVQCRAFNKGEKKDTCTQECSYFNITKVESRDKLPQPVQPDPVSHCKEKDVDDCWFYFTYSVNGNNEVMVHVVENPECPTGPDIIPIVAGVVAGIVLIGLALLLIWKLLMIIHDRREFAKFEKEKMNAKWDTGENPIYKSAVTTVVNPKYEGK

SEQ ID NO: 7274 - protein, 798 aa, Homo sapiens; identical to SEQ ID NO: 7273

SEQ ID NO: 7275 - protein, 801 aa, Homo sapiens
MNLQPIFWIGLISSVCCVFAQTDENRCLKANAKSCGECIQAGPNCGWCTNSTFLQEGMPTSARCDDLEALKKKGCPPDDIENPRGSKDIKKNKNVTNRSKGTAEKLKPEDITQIQPQQLVLRLRSGEPQTFTLKFKRAEDYPIDLYYLMDLSYSMKDDLENVKSLGTDLMNEMRRITSDFRIGFGSFVEKTVMPYISTTPAKLRNPCTSEQNCTSPFSYKNVLSLTNKGEVFNELVGKQRISGNLDSPEGGFDAIMQVAVCGSLIGWRNVTRLLVFSTDAGFHFAGDGKLGGIVLPNDGQCHLENNMYTMSHYYDYPSIAHLVQKLSENNIQTIFAVTEEFQPVYKELKNLIPKSAVGTLSANSSNVIQLIIDAYNSLSSEVILENGKLSEGVTISYKSYCKNGVNGTGENGRKCSNISIGDEVQFEISITSNKCPKKDSDSFKIRPLGFTEEVEVILQYICECECQSEGIPESPKCHEGNGTFECGACRCNEGRVGRHCECSTDEVNSEDMDAYCRKENSSEICSNNGECVCGQCVCRKRDNTNEIYSGKFCECDNFNCDRSNGLICGGNGVCKCRVCECNPNYTGSACDCSLDTSTCEASNGQICNGRGICECGVCKCTDPKFQGQTCEMCQTCLGVCAEHKECVQCRAFNKGEKKDTCTQECSYFNITKVESRDKLPQPVQPDPVSHCKEKDVDDCWFYFTYSVNGNNEVMVHVVENPECPTGPDIIPIVAGVVAGIVLIGLALLLIWKLLMIIHDRREFAKFEKEKMNAKWDTQENPIYKSPINNFKNPNYGRKAGL

SEQ ID NO: 7276 - protein, 152 aa, Homo sapiens
MNLQPIFWIGLISSVCCVFAQTDENRCLKANAKSCGECIQAGPNCGWCTNSVSKTFLQEGMPTSARCDDLEALKKKGCPPDDIENPRGSKDIKKNKNVTNRSKGTAEKLKPEDITQIQPQQLVLRLRSGEPQTFTLKFKRAEDYPIDLYYLM

SEQ ID NO: 7277 - protein, 14 aa, Homo sapiens
MPTSARCDDLEALK

SEQ ID NO: 7278 - protein, 31 aa, Homo sapiens
MPTSARCDDLEALKKKGCPPDDIENPRGSKD

SEQ ID NO: 7279 - protein, 98 aa, Homo sapiens
MPTSARCDDLEALKKKGCPPDDIENPRGSKDIKKNKNVTNRSKGTAEKLKPEDITQIQPQQLVLRLRSGEPQTFTLKFKRAEDYPIDLYYLMDLSYSM

SEQ ID NO: 7280 - protein, 108 aa, Homo sapiens
  SITE 1: note = misc_feature - Xaa can be any naturally occurring amino acid
XDMDAYCRKENSSEICSNNGECVCGQCVCRKRDNTNEIYSGKFCECDNFNCDRSNGLICGGNGVCKCRVCECNPNYTGSACDCSLDTSTCEASNGQICNGRGICECGV

SEQ ID NO: 7281 - protein, 70 aa, Homo sapiens
  SITE 1: note = misc_feature - Xaa can be any naturally occurring amino acid
XVAGVVAGIVLIGLALLLIWKLLMIIHDRREFAKFEKEKMNAKWDTQENPIYKSPINNFKNPNYGRKAGL

SEQ ID NO: 7282 - protein, 322 aa, Homo sapiens
GRLGKDLATGVLSQECTKFKVSSCRECIESGPGCTWCQKLNFTGPGDPDSIRCDTRPQLLMRGCAADDIMDPTSLAETQEDHNGGQKQLSPQKVTLYLRPGQAAAFNVTFRRAKGYPIDLYYLMDLSYSMLDDLRNVKKLGGDLLRALNEITESGRIGFGSFVDKTVLPFVNTHPDKLRNPCPNKEKECQPPFAFRHVLKLTNNSNQFQTEVGKQLISGNLDAPEGGLDAMMQVAACPEEIGWRNVTRLLVFATDDGFHFAGDGKLGAILTPNDGRCHLEDNLYKRSNEFDYPSVGQLAHKLAENNIQPIFAVTSRMVKTYE

SEQ ID NO: 7283 - protein, 71 aa, Homo sapiens
MLGLRPPLLALVGLLSLGCGRPRAPTHQPASSLSPLSGVHEVQGQQLPGMHRVGARLHLVPEAELHRAGGS

SEQ ID NO: 7284 - protein, 49 aa, Homo sapiens
MLGLRPPLLALVGLLSLGCVLSQECTKFKVSSCRECIESGPGCTWCQKL

SEQ ID NO: 7285 - protein, 93 aa, Homo sapiens
MLGLRPPLLALVGLLSLGCVLSQECTKFKVSSCRECIESGPGCTWCQKLGAALGPPAHATAASSPRRRSRVAPVCPRTEQGGQAPELHRAGGS

SEQ ID NO: 7286 - protein, 108 aa, Homo sapiens
MLGLRPPLLALVGLLSLGCVLSQECTKFKVSSCRECIESGPGCTWCQKLGAALGPPAHATAASSPRRRSRVAPVCPRTEQGGQAPGGNYLGQAGFFPSPFWRFSAPLK

SEQ ID NO: 7287 - protein, 70 aa, Homo sapiens
MLGLRPPLLALVGLLSLGCVLSQECTKFKVSSCRECIESGPGCTWCQKLNFTGPGDPDSIRCDTRPQLLM

SEQ ID NO: 7288 - protein, 712 aa, Homo sapiens
MLGLRPPLLALVGLLSLGCVLSQECTKFKVSSCRECIESGPGCTWCQKLNFTGPGDPDSIRCDTRPQLLMRGCAADDIMDPTSLAETQEDHNGGQKQLSPQKVTLYLRPGFGSFVDKTVLPFVNTHPDKLRNPCPNKEKECQPPFAFRHVLKLTNNSNQFQTEVGKQLISGNLDAPEGGLDAMMQVAACPEEIGWRNVTRLLVFATDDGFHFAGDGKLGAILTPNDGRCHLEDNLYKRSNEFDYPSVGQLAHKLAENNIQPIFAVTSRMVKTYEKLTEIIPKSAVGELSEDSSNVVHLIKNAYNKLSSRVFLDHNALPDTLKVTYDSFCSNGVTHRNQPRGDCDGVQINVPITFQVKVTATECIQEQSFVIRALGFTDIVTVQVLPQCECRCRDQSRDRSLCHGKGFLECGICRCDTGYIGKNCECQTQGRSSQELEGSCRKDNNSIICSGLGDCVCGQCLCHTSDVPGKLIYGQYCECDTINCERYNGQVCGGPGRGLCFCGKCRCHPGFEGSACQCERTTEGCLNPRRVECSGRGRCRCNVCECHSGYQLPLCQECPGCPSPCGKYISCAECLKFEKGPFGKNCSAACPGLQLSNNPVKGRTCKERDSEGCWVAYTLEQQDGMDRYLIYVDESRECVAGPNIAAIVGGTVAGIVLIGILLLVIWKALIHLSDLREYRRFEKEKLKSQWNNDNPLFKSATTTVMNPKFAES

SEQ ID NO: 7289 - protein, 120 aa, Homo sapiens
MLGLRPPLLALVGLLSLGCVLSQECTKFKVSSCRECIESGPGCTWCQKLNFTGPGDPDSIRCDTRPQLLMRGCAADDIMDPTSLAETQEDHNGGQKQLSPQKVTLYLRPGQAAAFNVTFR

SEQ ID NO: 7290 - protein, 160 aa, Homo sapiens
MLGLRPPLLALVGLLSLGCVLSQECTKFKVSSCRECIESGPGCTWCQKLNFTGPGDPDSIRCDTRPQLLMRGCAADDIMDPTSLAETQEDHNGGQKQLSPQKVTLYLRPGQAAAFNVTFRRAKGYPIDLYYLMDLSYSMLDDLRNVKKLGGDLLRALNEI

SEQ ID NO: 7291 - protein, 166 aa, Homo sapiens
MLGLRPPLLALVGLLSLGCVLSQECTKFKVSSCRECIESGPGCTWCQKLNFTGPGDPDSIRCDTRPQLLMRGCAADDIMDPTSLAETQEDHNGGQKQLSPQKVTLYLRPGQAAAFNVTFRRAKGYPIDLYYLMDLSYSMLDDLRNVKKLGGDLLRALNEITESGRI

SEQ ID NO: 7292 - protein, 769 aa, Homo sapiens
MLGLRPPLLALVGLLSLGCVLSQECTKFKVSSCRECIESGPGCTWCQKLNFTGPGDPDSIRCDTRPQLLMRGCAADDIMDPTSLAETQEDHNGGQKQLSPQKVTLYLRPGQAAAFNVTFRRAKGYPIDLYYLMDLSYSMLDDLRNVKKLGGDLLRALNEITESGRIGFGSFVDKTVLPFVNTHPDKLRNPCPNKEKECQPPFAFRHVLKLTNNSNQFQTEVGKQLISGNLDAPEGGLDAMMQVAACPEEIGWRNVTRLLVFATDDGFHFAGDGKLGAILTPNDGRCHLEDNLYKRSNEFDYPSVGQLAHKLAENNIQPIFAVTSRMVKTYEKLTEIIPKSAVGELSEDSSNVVHLIKNAYNKLSSRVFLDHNALPDTLKVTYDSFCSNGVTHRNQPRGDCDGVQINVPITFQVKVTATECIQEQSFVIRALGFTDIVTVQVLPQCECRCRDQSRDRSLCHGKGFLECGICRCDTGYIGKNCECQTQGRSSQELEGSCRKDNNSIICSGLGDCVCGQCLCHTSDVPGKLIYGQYCECDTINCERYNGQVCGGPGRGLCFCGKCRCHPGFEGSACQCERTTEGCLNPRRVECSGRGRCRCNVCECHSGYQLPLCQECPGCPSPCGKYISCAECLKFEKGPFGKNCSAACPGLQLSNNPVKGRTCKERDSEGCWVAYTLEQQDGMDRYLIYVDESRECVAGPNIAAIVGGTVAGIVLIGILLLVIWKALIHLSDLREYRRFEKEKLKSQWNNDNPLFKSATTTVMNPKFAES

SEQ ID NO: 7293 - protein, 769 aa, Homo sapiens; identical to SEQ ID NO: 7292

SEQ ID NO: 7294 - protein, 769 aa, Homo sapiens; identical to SEQ ID NO: 7292

SEQ ID NO: 7295 - protein, 769 aa, Homo sapiens; identical to SEQ ID NO: 7292

SEQ ID NO: 7296 - protein, 769 aa, Homo sapiens; identical to SEQ ID NO: 7292

SEQ ID NO: 7297 - protein, 37 aa, Homo sapiens
MRGCAADDIMDPTSLAETQEDHNGGQKQLSPQKVTLY

SEQ ID NO: 7298 - protein, 49 aa, Homo sapiens
MRGCAADDIMDPTSLAETQEDHNGGQKQLSPQKVTLYLRPGQAAAFNVT

SEQ ID NO: 7299 - protein, 35 aa, Homo sapiens
LKSCMGLKIGDTVRWAGQGLCPGASVGTQPPFFLL

SEQ ID NO: 7300 - protein, 788 aa, Homo sapiens
MRARPRPRPLWATVLALGALAGVGVGGPNICTTRGVSSCQQCLAVSPMCAWCSDEALPLGSPRCDLKENLLKDNCAPESIEFPVSEARVLEDRPLSDKGSGDSSQVTQVSPQRIALRLRPDDSKNFSIQVRQVEDYPVDIYYLMDLSYSMKDDLWSIQNLGTKLATQMRKLTSNLRIGFGAFVDKPVSPYMYISPPEALENPCYDMKTTCLPMFGYKHVLTLTDQVTRFNEEVKKQSVSRNRDAPEGGFDAIMQATVCDEKIGWRNDASHLLVFTTDAKTHIALDGRLAGIVQPNDGQCHVGSDNHYSASTTMDYPSLGLMTEKLSQKNINLIFAVTENVVNLYQNYSELIPGTTVGVLSMDSSNVLQLIVDAYGKIRSKVELEVRDLPEELSLSFNATCLNNEVIPGLKSCMGLKIGDTVSFSIEAKVRGCPQEKEKSFTIKPVGFKDSLIVQVTFDCDCACQAQAEPNSHRCNNGNGTFECGVCRCGPGWLGSQCECSEEDYRPSQQDECSPREGQPVCSQRGECLCGQCVCHSSDFGKITGKYCECDDFSCVRYKGEMCSGHGQCSCGDCLCDSDWTGYYCNCTTRTDTCMSSNGLLCSGRGKCECGSCVCIQPGSYGDTCEKCPTCPDACTFKKECVECKKFDRGALHDENTCNRYCRDEIESVKELKDTGKDAVNCTYKNEDDCVVRFQYYEDSSGKSILYVVEEPECPKGPDILVVLLSVMGAILLIGLAALLIWKLLITIHDRKEFAKFEEERARAKWDTANNPLYKEATSTFTNITYRGT

SEQ ID NO: 7301 - protein, 443 aa, Homo sapiens
MRARPRPRPLWATVLALGALAGVGVGGPNICTTRGVSSCQQCLAVSPMCAWCSDEALPLGSPRCDLKENLLKDNCAPESIEFPVSEARVLEDRPLSDKGSGDSSQVTQVSPQRIALRLRPDDSKNFSIQVRQVEDYPVDIYYLMDLSYSMKDDLWSIQNLGTKLATQMRKLTSNLRIGFGAFVDKPVSPYMYISPPEALENPCYDMKTTCLPMFGYKHVLTLTDQVTRFNEEVKKQSVSRNRDAPEGGFDAIMQATVCDEKIGWRNDASHLLVFTTDAKTHIALDGRLAGIVQPNDGQCHVGSDNHYSASTTMDYPSLGLMTEKLSQKNINLIFAVTENVVNLYQNYSELIPGTTVGVLSMDSSNVLQLIVDAYGKIRSKVELEVRDLPEELSLSFNATCLNNEVIPGLKSCMGLKIGDTVRWAGQGLCPGASVGTQPPFFLL

SEQ ID NO: 7302 - protein, 89 aa, Homo sapiens
MVALPMVLVLLLVLSRGESELDAKIPSTGDATEWRNPHLSMLGSCQPAPSCQKCILSHPSCAWCKQLNFTASGEAEARRCARREELLAR

SEQ ID NO: 7303 - protein, 93 aa, Homo sapiens
MVALPMVLVLLLVLSRGESELDAKIPSTGDATEWRNPHLSMLGSCQPAPSCQKCILSHPSCAWCKQLNFTASGEAEARRCARREELLARGCPL

SEQ ID NO: 7304 - protein, 158 aa, Homo sapiens
MVALPMVLVLLLVLSRGESELDAKIPSTGDATEWRNPHLSMLGSCQPAPSCQKCILSHPSCAWCKQLNFTASGEAEARRCARREELLARGCPLEELEEPRGQQEVLQDQPLSQGARGEGATQLAPQRVRVTLRPGEPQQLQVRFLRAEGYPVDLYYLM

SEQ ID NO: 7305 - protein, 798 aa, Homo sapiens
MVALPMVLVLLLVLSRGESELDAKIPSTGDATEWRNPHLSMLGSCQPAPSCQKCILSHPSCAWCKQLNFTASGEAEARRCARREELLARGCPLEELEEPRGQQEVLQDQPLSQGARGEGATQLAPQRVRVTLRPGEPQQLQVRFLRAEGYPVDLYYLMDLSYSMKDDLERVRQLGHALLVRLQEVTHSVRIGFGSFVDKTVLPFVSTVPSKLRHPCPTRLERCQSPFSFHHVLSLTGDAQAFEREVGRQSVSGNLDSPEGGFDAILQAALCQEQIGWRNVSRLLVFTSDDTFHTAGDGKLGGIFMPSDGHCHLDSNGLYSRSTEFDYPSVGQVAQALSAANIQPIFAVTSAALPVYQELSKLIPKSAVGELSEDSSNVVQLIMDAYNSLSSTVTLEHSSLPPGVHISYESQCEGPEKREGKAEDRGQCNHVRINQTVTFWVSLQATHCLPEPHLLRLRALGFSEELIVELHTLCDCNCSDTQPQAPHCSDGQGHLQCGVCSCAPGRLGRLCECSVAELSSPDLESGCRAPNGTGPLCSGKGHCQCGRCSCSGQSSGHLCECDDASCERHEGILCGGFGRCQCGVCHCHANRTGRACECSGDMDSCISPEGGLCSGHGRCKCNRCQCLDGYYGALCDQCPGCKTPCERHRDCAECGAFRTGPLATNCSTACAHTNVTLALAPILDDGWCKERTLDNQLFFFLVEDDARGTVVLRVRPQEKGADHTQAIVLGCVGGIVAVGLGLVLAYRLSVEIYDRREYSRFEKEQQQLNWKQDSNPLYKSAITTTINPRFQEADSPTL

SEQ ID NO: 7306 - protein, 798 aa, Homo sapiens; identical to SEQ ID NO: 7305

SEQ ID NO: 7307 - protein, 650 aa, Homo sapiens
MVALPMVLVLLLVLSRGESELDAKIPSTGDATEWRNPHLSMLGSCQPAPSCQKCILSHPSCAWCKQLNFTASGEAEARRCARREELLARGCPLEELEEPRGQQEVLQDQPLSQGARGEGATQLAPQRVRVTLRPGEPQQLQVRFLRAEGYPVDLYYLMDLSYSMKDDLERVRQLGHALLVRLQEVTHSVRIGFGSFVDKTVLPFVSTVPSKLRHPCPTRLERCQSPFSFHHVLSLTGDAQAFEREVGRQSVSGNLDSPEGGFDAILQAALCQEQIGWRNVSRLLVFTSDDTFHTAGDGKLGGIFMPSDGHCHLDSNGLYSRSTEFDYPSVGQVAQALSAANIQPIFAVTSAALPVYQELSKLIPKSAVGELSEDSSNVVQLIMDAYNSLSSTVTLEHSSLPPGVHISYESQCEGPEKREGKAEDRGQCNHVRINQTVTFWVSLQATHCLPEPHLLRLRALGFSEELIVELHTLCDCNCSDTQPQAPHCSDGQGHLQCGVCRDCAECGAFRTGPLATNCSTACAHTNVTLALAPILDDGWCKERTLDNQLFFFLVEDDARGTVVLRVRPQEKGADHTQAIVLGCVGGIVAVGLGLVLAYRLSVEIYDRREYSRFEKEQQQLNWKQDSNPLYKSAITTTINPRFQEADSPTL

SEQ ID NO: 7308 - protein, 471 aa, Homo sapiens
MVALPMVLVLLLVLSRGESELDAKIPSTGDATEWRNPHLSMLGSCQPAPSCQKCILSHPSCAWCKQLNFTASGEAEARRCARREELLARGCPLEELEEPRGQQEVLQDQPLSQGARGEGATQLAPQRVRVTLRPGEPQQLQVRFLRAEGYPVDLYYLMDLSYSMKDDLERVRQLGHALLVRLQEVTHSVRIGFGSFVDKTVLPFVSTVPSKLRHPCPTRLERCQSPFSFHHVLSLTGDAQAFEREVGRQSVSGNLDSPEGGFDAILQAALCQEQIGWRNVSRLLVFTSDDTFHTAGDGKLGGIFMPSDGHCHLDSNGLYSRSTEFDYPSVGQVAQALSAANIQPIFAVTSAALPVYQELSKLIPKSAVGELSEDSSNVVQLIMDAYNSLSSTVTLEHSSLPPGVHISYESQCEGPEKREGKAEDRGQCNHVRINQTGLCRVWGLQDWPTGHQLQYSLCPYQCDPGLGPYLG

SEQ ID NO: 7309 - protein, 117 aa, Homo sapiens
  SITE 1: note = misc_feature - Xaa can be any naturally occurring amino acid
XSTACAHTNVTLALAPILDDGWCKERTLDNQLFFFLVEDDARGTVVLRVRPQEKGADHTQAIVLGCVGGIVAVGLGLVLAYRLSVEIYDRREYSRFEKEQQQLNWKQLLGFGSRLAS

SEQ ID NO: 7310 - protein, 353 aa, Homo sapiens
MCKNSQDIICSNAGTCHCGRCKCDNSDGSGLVYGKFCECDDRECIDDETEEICGGHGKCYCGNCYCKAGWHGDKCEFQCDITPWESKRRCTSPDGKICSNRGTCVCGECTCHDVDPTGDWGDIHGDTCECDERDCRAVYDRYSDDFCSGHGQCNCGRCDCKAGWYGKKCEHPQSCTLSAEESIRKCQGSSDLPCSGRGKCECGKCTCYPPGDRRVYGKTCECDDRRCEDLDGVVCGGHGTCSCGRCVCERGWFGKLCQHPRKCNMTEEQSKNLCESADGILCSGKGSCHCGKCICSAEEWYISGEFCDCDDRDCDKHDGLICTGNGICSCGNCECWDGWNGNACEIWLGSEYP

SEQ ID NO: 7311 - protein, 401 aa, Homo sapiens
MNLVAVMGAFNKGHGKCDCGKCKCDQGWYGDACQYPTNCDLTKKKSNQMCKNSQDIICSNAGTCHCGRCKCDNSDGSGLVYGKFCECDDRECIDDETEEICGGHGKCYCGNCYCKAGWHGDKCEFQCDITPWESKRRCTSPDGKICSNRGTCVCGECTCHDVDPTGDWGDIHGDTCECDERDCRAVYDRYSDDFCSGHGQCNCGRCDCKAGWYGKKCEHPQSCTLSAEESIRKCQGSSDLPCSGRGKCECGKCTCYPPGDRRVYGKTCECDDRRCEDLDGVVCGGHGTCSCGRCVCERGWFGKLCQHPRKCNMTEEQSKNLCESADGILCSGKGSCHCGKCICSAEEWYISGEFCDCDDRDCDKHDGLICTGNGICSCGNCECWDGWNGNACEIWLGSEYP

SEQ ID NO: 7312 - protein, 494 aa, Homo sapiens
MRPPGFRNFLLLASSLLFAGLSAVPQSFSPSLRSWPGAACRLSRAESERRCRAPGQPPGAALCHGRGRCDCGVCICHVTEPGMFFGPLCECHEWVCETYDGSTCAGHGKCDCGKCKCDQGWYGDACQYPTNCDLTKKKSNQMCKNSQDIICSNAGTCHCGRCKCDNSDGSGLVYGKFCECDDRECIDDETEEICGGHGKCYCGNCYCKAGWHGDKCEFQCDITPWESKRRCTSPDGKICSNRGTCVCGECTCHDVDPTGDWGDIHGDTCECDERDCRAVYDRYSDDFCSGHGQCNCGRCDCKAGWYGKKCEHPQSCTLSAEESIRKCQGSSDLPCSGRGKCECGKCTCYPPGDRRVYGKTCECDDRRCEDLDGVVCGGHGTCSCGRCVCERGWFGKLCQHPRKCNMTEEQSKNLCESADGILCSGKGSCHCGKCICSAEEWYISGEFCDCDDRDCDKHDGLICTGNGICSCGNCECWDGWNGNACEIWLGSEYP

SEQ ID NO: 7313 - protein, 445 aa, Homo sapiens
MRPPGFRNFLLLASSLLFAGLSAVPQSFSPSLRSWPGAACRLSRAESERRCRAPGQPPGAALCHGRGRCDCGVCICHVTEPGMFFGPLCECHEWVCETYDGSTCAGTCHCGRCKCDNSDGSGLVYGKFCECDDRECIDDETEEICGGHGKCYCGNCYCKAGWHGDKCEFQCDITPWESKRRCTSPDGKICSNRGTCVCGECTCHDVDPTGDWGDIHGDTCECDERDCRAVYDRYSDDFCSGHGQCNCGRCDCKAGWYGKKCEHPQSCTLSAEESIRKCQGSSDLPCSGRGKCECGKCTCYPPGDRRVYGKTCECDDRRCEDLDGVVCGGHGTCSCGRCVCERGWFGKLCQHPRKCNMTEEQSKNLCESADGILCSGKGSCHCGKCICSAEEWYISGEFCDCDDRDCDKHDGLICTGNGICSCGNCECWDGWNGNACEIWLGSEYP

SEQ ID NO: 7314 - protein, 401 aa, Homo sapiens
MSGCARPTTGAPVQAMVSVGKCKCDQGWYGDACQYPTNCDLTKKKSNQMCKNSQDIICSNAGTCHCGRCKCDNSDGSGLVYGKFCECDDRECIDDETEEICGGHGKCYCGNCYCKAGWHGDKCEFQCDITPWESKRRCTSPDGKICSNRGTCVCGECTCHDVDPTGDWGDIHGDTCECDERDCRAVYDRYSDDFCSGHGQCNCGRCDCKAGWYGKKCEHPQSCTLSAEESIRKCQGSSDLPCSGRGKCECGKCTCYPPGDRRVYGKTCECDDRRCEDLDGVVCGGHGTCSCGRCVCERGWFGKLCQHPRKCNMTEEQSKNLCESADGILCSGKGSCHCGKCICSAEEWYISGEFCDCDDRDCDKHDGLICTGNGICSCGNCECWDGWNGNACEIWLGSEYP

SEQ ID NO: 7315 - protein, 208 aa, Homo sapiens
  SITE 1: note = misc_feature - Xaa can be any naturally occurring amino acid
XCEGHGQCNCGRCDCKAGWYGKKCEHPQSCTLSAEESIRKCQGSSDLPCSGRGKCECGKCTCYPPGDRRVYGKTCECDDRRCEDLDGVVCGGHGTCSCGRCVCERGWFGKLCQHPRKCNMTEEQSKNLCESADGILCSGKGSCHCGKCICSAEEWYISGEFCDCDDRDCDKHDGLICTGNGICSCGNCECWDGWNGNACEIWLGSEYP

SEQ ID NO: 7316 - protein, 911 aa, Homo sapiens
MDGAMGPRGLLLCMYLVSLLILQAMPALGSATGRSKSSEKRQAVDTAVDGVFIRSLKVNCKVTSRFAHYVVTSQVVNTANEAREVAFDLEIPKTAFISDFAVTADGNAFIGDIKDKVTAWKQYRKAAISGENAGLVRASGRTMEQFTIHLTVNPQSKVTFQLTYEEVLKRNHMQYEIVIKVKPKQLVHHFEIDVDIFEPQGISKLDAQASFLPKELAAQTIKKSFSGKKGHVLFRPTVSQQQSCPTCSTSLLNGHFKVTYDVSRDKICDLLVANNHFAHFFAPQNLTNMNKNVVFVIDISGSMRGQKVKQTKEALLKILGDMQPGDYFDLVLFGTRVQSWKGSLVQASEANLQAAQDFVRGFSLDEATNLNGGLLRGIEILNQVQESLPELSNHASILIMLTDGDPTEGVTDRSQILKNVRNAIRGRFPLYNLGFGHNVDFNFLEVMSMENNGRAQRIYEDHDATQQLQGFYSQVAKPLLVDVDLQYPQDAVLALTQNHHKQYYEGSEIVVAGRIADNKQSSFKADVQAHGEGQEFSITCLVDEEEMKKLLRERGHMLENHVERLWAYLTIQELLAKRMKVDREERANLSSQALQMSLDYGFVTPLTSMSIRGMADQDGLKPTIDKPSEDSPPLEMLGPRRTFVLSALQPSPTHSSSNTQRLPDRVTGVDTDPHFIIHVPQKEDTLCFNINEEPGVILSLVQDPNTGFSVNGQLIGNKARSPGQHDGTYFGRLGIANPATDFQLEVTPQNITLNPGFGGPVFSWRDQAVLRQDGVVVTINKKRNLVVSVDDGGTFEVVLHRVWKGSSVHQDFLGFYVLDSHRMSARTHGLLGQFFHPIGFEVSDIHPGSDPTKPDATMVVRNRRLTVTRGLQKDYSKDPWHGAEVSCWFIHNNGAGLIDGAYTDYIVPDIF

SEQ ID NO: 7317 - protein, 213 aa, Homo sapiens
MDGAMGPRGLLLCMYLVSLLILQAMPALGSATGRSKSSEKRQAVDTAVDGVFIRSLKVNCKVTSRFAHYVVTSQVVNTANEAREVAFDLEIPKTAFISDFAVTADGNAFIGDIKDKVTAWKQYRKAAISGENAGLVRASGRTMEQFTIHLTVNPQSKVTFQLTYEEVLKRNHMQYEIVIKVKPKQLVHHFEVDHRSRGRGPAPLSVTMAPNTG

SEQ ID NO: 7318 - protein, 623 aa, Homo sapiens
MNKNVVFVIDISGSMRGQKVKQTKEALLKILGDMQPGDYFDLVLFGTRVQSWKGSLVQASEANLQAAQDFVRGFSLDEATNLNGGLLRGIEILNQVQESLPELSNHASILIMLTDGDPTEGVTDRSQILKNVRNAIRGRFPLYNLGFGHNVDFNFLEVMSMENNGRAQRIYEDHDATQQLQGFYSQVAKPLLVDVDLQYPQDAVLALTQNHHKQYYEGSEIVVAGRIADNKQSSFKADVQAHGEGQEFSITCLVDEEEMKKLLRERGHMLENHVERLWAYLTIQELLAKRMKVDREERANLSSQALQMSLDYGFVTPLTSMSIRGMADQDGLKPTIDKPSEDSPPLEMLGPRRTFVLSALQPSPTHSSSNTQRLPDRVTGVDTDPHFIIHVPQKEDTLCFNINEEPGVILSLVQDPNTGFSVNGQLIGNKARSPGQHDGTYFGRLGIANPATDFQLEVTPQNITLNPGFGGPVFSWRDQAVLRQDGVVVTINKKRNLVVSVDDGGTFEVVLHRVWKGSSVHQDFLGFYVLDSHRMSARTHGLLGQFFHPIGFEVSDIHPGSDPTKPDATMVVRNRRLTVTRGLQKDYSKDPWHGAEVSCWFIHNNGAGLIDGAYTDYIVPDIF

SEQ ID NO: 7319 - protein, 277 aa, Homo sapiens
MPLPLPSAFVLSALQPSPTHSSSNTQRLPDRVTGVDTDPHFIIHVPQKEDTLCFNINEEPGVILSLVQDPNTGFSVNGQLIGNKARSPGQHDGTYFGRLGIANPATDFQLEVTPQNITLNPGFGGPVFSWRDQAVLRQDGVVVTINKKRNLVVSVDDGGTFEVVLHRVWKGSSVHQDFLGFYVLDSHRMSARTHGLLGQFFHPIGFEVSDIHPGSDPTKPDATMVVRNRRLTVTRGLQKDYSKDPWHGAEVSCWFIHNNGAGLIDGAYTDYIVPDIF

SEQ ID NO: 7320 - protein, 464 aa, Homo sapiens
SMENNGRAQRIYEDHDATQQLQGFYSQVAKPLLVDVDLQYPQDAVLALTQNHHKQYYEGSEIVVAGRIADNKQSSFKADVQAHGEGQEFSITCLVDEEEMKKLLRERGHMLENHVERLWAYLTIQELLAKRMKVDREERANLSSQALQMSLDYGFVTPLTSMSIRGMADQDGLKPTIDKPSEGIGCREMLGPRRTFVLSALQPSPTHSSSNTQRLPDRVTGVDTDPHFIIHVPQKEDTLCFNINEEPGVILSLVQDPNTGFSVNGQLIGNKARSPGQHDGTYFGRLGIANPATDFQLEVTPQNITLNPGFGGPVFSWRDQAVLRQDGVVVTINKKRNLVVSVDDGGTFEVVLHRVWKGSSVHQDFLGFYVLDSHRMSARTHGLLGQFFHPIGFEVSDIHPGSDPTKPDATMVVRNRRLTVTRGLQKDYSKDPWHGAEVSCWFIHNNGAGLIDGAYTDYIVPDIF

SEQ ID NO: 7321 - protein, 74 aa, Homo sapiens
  SITE 1: note = misc_feature - Xaa can be any naturally occurring amino acid
XMKVDREERANLSSQALQMSLDYGFVTPLTSMSIRGMADQDGLKPTIDKPSEDSPPLEMLGPRRTPIPSGCQTE

SEQ ID NO: 7322 - protein, 935 aa, Homo sapiens
MKRLTCFFICFFLSEVSGFEIPINGLSEFVDYEDLVELAPGKFQLVAENRRYQEEVDQVTLYSYKVQSTITSRMATTMIQSKVVNNSPQPQNVVFDVQIPKGAFISNFSMTVDGKTFRSSIKEKTVGRALYAQARAKGKTAGLVRSSALDMENFRTEVNVLPGAKVQFELHYQEVKWRKLGSYEHRIYLQPGRLAKHLEVDVWVIEPQGLRFLHVPDTFEGHFDGVPVISKGQQKAHVSFKPTVAQQRICPNCRETAVDGELVVLYDVKREEKAGELEVFNGYFVHFFAPDNLDPIPKNILFVIDVSGSMWGVKMKQTVEAMKTILDDLRAEDHFSVIDFNQNIRTWRNDLISATKTQVADAKRYIEKIQPSGGTNINEALLRAIFILNEANNLGLLDPNSVSLIILVSDGDPTVGELKLSKIQKNVKENIQDNISLFSLGMGFDVDYDFLKRLSNENHGIAQRIYGNQDTSSQLKKFYNQVSTPLLRNVQFNYPHTSVTDVTQNNFHNYFGGSEIVVAGKFDPAKLDQIESVITATSANTQLVLETLAQMDDLQDFLSKDKHADPDFTRKLWAYLTINQLLAERSLAPTAAAKRRITRSILQMSLDHHIVTPLTSLVIENEAGDERMLADAPPQDPSCCSGALYYGSKVVPDSTPSWANPSPTPVISMLAQGSQVLESTPPPHVMRVENDPHFIIYLPKSQKNICFNIDSEPGKILNLVSDPESGIVVNGQLVGAKKPNNGKLSTYFGKLGFYFQSEDIKIEISTETITLSHGSSTFSLSWSDTAQVTNQRVQISVKKEKVVTITLDKEMSFSVLLHRVWKKHPVNVDFLGIYIPPTNKFSPKAHGLIGQFMQEPKIHIFNERPGKDPEKPEASMEVKGQKLIITRGLQKDYRTDLVFGTDVTCWFVHNSGKGFIDGHYKDYFVPQLYSFLKRP

SEQ ID NO: 7323 - protein, 946 aa, Homo sapiens
MKRLTCFFICFFLSEVSGFEIPINGLSEFVDYEDLVELAPGKFQLVAENRRYQRSLPGESEEMMEEVDQVTLYSYKVQSTITSRMATTMIQSKVVNNSPQPQNVVFDVQIPKGAFISNFSMTVDGKTFRSSIKEKTVGRALYAQARAKGKTAGLVRSSALDMENFRTEVNVLPGAKVQFELHYQEVKWRKLGSYEHRIYLQPGRLAKHLEVDVWVIEPQGLRFLHVPDTFEGHFDGVPVISKGQQKAHVSFKPTVAQQRICPNCRETAVDGELVVLYDVKREEKAGELEVFNGYFVHFFAPDNLDPIPKNILFVIDVSGSMWGVKMKQTVEAMKTILDDLRAEDHFSVIDFNQNIRTWRNDLISATKTQVADAKRYIEKIQPSGGTNINEALLRAIFILNEANNLGLLDPNSVSLIILVSDGDPTVGELKLSKIQKNVKENIQDNISLFSLGMGFDVDYDFLKRLSNENHGIAQRIYGNQDTSSQLKKFYNQVSTPLLRNVQFNYPHTSVTDVTQNNFHNYFGGSEIVVAGKFDPAKLDQIESVITATSANTQLVLETLAQMDDLQDFLSKDKHADPDFTRKLWAYLTINQLLAERSLAPTAAAKRRITRSILQMSLDHHIVTPLTSLVIENEAGDERMLADAPPQDPSCCSGALYYGSKVVPDSTPSWANPSPTPVISMLAQGSQVLESTPPPHVMRVENDPHFIIYLPKSQKNICFNIDSEPGKILNLVSDPESGIVVNGQLVGAKKPNNGKLSTYFGKLGFYFQSEDIKIEISTETITLSHGSSTFSLSWSDTAQVTNQRVQISVKKEKVVTITLDKEMSFSVLLHRVWKKHPVNVDFLGIYIPPTNKFSPKAHGLIGQFMQEPKIHIFNERPGKDPEKPEASMEVKGQKLIITRGLQKDYRTDLVFGTDVTCWFVHNSGKGFIDGHYKDYFVPQLYSFLKRP

SEQ ID NO: 7324 - protein, 237 aa, Homo sapiens
MKRLTCFFICFFLSEVSGFEIPINGLSERSLPGESEEMMEEVDQVTLYSYKVQSTITSRMATTMIQSKVVNNSPQPQNVVFDVQIPKGAFISNFSMTVDGKTFRSSIKEKTVGRALYAQARAKGKTAGLVRSSALDMENFRTEVNVLPGAKVQFELHYQEVKWRKLGSYEHRIYLQPGRLAKHLEVDVWVIEPQGLRFLHVPDTFEGHFDGVPVISKGQQKAHVSFKPTVAQQRICP

SEQ ID NO: 7325 - protein, 698 aa, Homo sapiens
MAFAWWPCLILALLSSLAASGFPRSPFRLLGKRSLPEGVANGIEVYSTKINSKVTSRFAHNVVTMRAVNRADTAKEVSFDVELPKTAFITNFTLTIDGVTYPGNVKEKEVAKKQYEKAVSQGKTAGLVKASGRKLEKFTVSVNVAAGSKVTFELTYEELLKRHKGKYEMYLKVQPKQLVKHFEIEVDIFEPQGISMLDAEASFITNDLLGSALTKSFSGKKGHVSFKPSLDQQRSCPTCTDSLLNGDFTITYDVNRESPGNVQIVNGYFVHFFAPQGLPVVPKNVAFVIDISGSMAGRKLEQTKEALLRILEDMQEEDYLNFILFSGDVSTWKEHLVQATPENLQEARTFVKSMEDKGMTNINDGLLRGISMLNKAREEHRIPERSTSIVIMLTDGDANVGESRPEKIQENVRNAIGGKFPLYNLGFGNNLNYNFLENMALENHGFARRIYEDSDADLQLQGFYEEVANPLLTGVEMEYPENAILDLTQNTYQHFYDGSEIVVAGRLVDEDMNSFKADVKGHGATNDLTFTEEVTTEKITLWNRAVPSTFSWLDTVTVTQDGLSMMINRKNMVVSFGDGVTFVVVLHQVWKKHPVHRDFLGFYVVDSHRMSAQTHGLLGQFFQPFDFKVSDIRPGSDPTKPDATLVVKNHQLIVTRGSQKDYRKDASIGTKVVCWFVHNNGEGLIDGVHTDYIVPNLF

SEQ ID NO: 7326 - protein, 890 aa, Homo sapiens
MAFAWWPCLILALLSSLAASGFPRSPFRLLGKRSLPEGVANGIEVYSTKINSKVTSRFAHNVVTMRAVNRADTAKEVSFDVELPKTAFITNFTLTIDGVTYPGNVKEKEVAKKQYEKAVSQGKTAGLVKASGRKLEKFTVSVNVAAGSKVTFELTYEELLKRHKGKYEMYLKVQPKQLVKHFEIEVDIFEPQGISMLDAEASFITNDLLGSALTKSFSGKKGHVSFKPSLDQQRSCPTCTDSLLNGDFTITYDVNRESPGNVQIVNGYFVHFFAPQGLPVVPKNVAFVIDISGSMAGRKLEQTKEALLRILEDMQEEDYLNFILFSGDVSTWKEHLVQATPENLQEARTFVKSMEDKGMTNINDGLLRGISMLNKAREEHRIPERSTSIVIMLTDGDANVGESRPEKIQENVRNAIGGKFPLYNLGFGNNLNYNFLENMALENHGFARRIYEDSDADLQLQGFYEEVANPLLTGVEMEYPENAILDLTQNTYQHFYDGSEIVVAGRLVDEDMNSFKADVKGHGATNDLTFTEEVDMKEMEKALQERDYIFGNYIERLWAYLTIEQLLEKRKNAHGEEKENLTARALDLSLKYHFVTPLTSMVVTKPEDNEDERAIADKPGEDAEATPVSPAMSYLTSYQPPQNPYYYVDGDPHFIIQIPEKDDALCFNIDEAPGTVLRLIQDAVTGLTVNGQITGDKRGSPDSKTRKTYFGKLGIANAQMDFQVEVTTEKITLWNRAVPSTFSWLDTVTVTQDGLSMMINRKNMVVSFGDGVTFVVVLHQVWKKHPVHRDFLGFYVVDSHRMSAQTHGLLGQFFQPFDFKVSDIRPGSDPTKPDATLVVKNHQLIVTRGSQKDYRKDASIGTKVVCWFVHNNGEGLIDGVHTDYIVPNLF

SEQ ID NO: 7327 - protein, 670 aa, Homo sapiens [sequence omitted]

SEQ ID NO: 7328 - protein, 930 aa, Homo sapiens
MKPPRPVRTCSKVLVLLSLLAIHQTTTAEKNGIDIYSLTVDSRVSSRFAHTVVTSRVVNRANTVQEATFQMELPKKAFITNFSMIIDGMTYPGIIKEKAEAQAQYSAAVAKGKSAGLVKATGRNMEQFQVSVSVAPNAKITFELVYEELLKRRLGVYELLLKVRPQQLVKHLQMDIHIFEPQGISFLETESTFMTNQLVDALTTWQNKTKAHIRFKPTLSQQQKSPEQQETVLDGNLIIRYDVDRAISGGSIQIENGYFVHYFAPEGLTTMPKNVVFVIDKSGSMSGRKIQQTREALIKILDDLSPRDQFNLIVFSTEATQWRPSLVPASAENVNKARSFAAGIQALGGTNINDAMLMAVQLLDSSNQEERLPEGSVSLIILLTDGDPTVGETNPRSIQNNVREAVSGRYSLFCLGFGFDVSYAFLEKLALDNGGLARRIHEDSDSALQLQDFYQEVANPLLTAVTFEYPSNAVEEVTQNNFRLLFKGSEMVVAGKLQDRGPDVLTATVSGKLPTQNITFQTESSVAEQEAEFQSPKYIFHNFMERLWAYLTIQQLLEQTVSASDADQQALRNQALNLSLAYSFVTPLTSMVVTKPDDQEQSQVAEKPMEGESRNRNVHSGSTFFKYYLQGAKIPKPEASFSPRRGWNRQAGAAGSRMNFRPGVLSSRQLGLPGPPDVPDHAAYHPFRRLAILPASAPPATSNPDPAVSRVMNMKIEETTMTTQTPAPIQAPSAILPLPGQSVERLCVDPRHRQGPVNLLSDPEQGVEVTGQYEREKAGFSWIEVTFKNPLVWVHASPEHVVVTRNRRSSAYKWKETLFSVMPGLKMTMDKTGLLLLSDPDKVTIGLLFWDGRGEGLRLLLRDTDRFSSHVGGTLGQFYQEVLWGSPAASDDGRRTLRVQGNDHSATRERRLDYQEGPPGVEISCWSVEL

SEQ ID NO: 7329 - protein, 900 aa, Homo sapiens
MKPPRPVRTCSKVLVLLSLLAIHQTTTAEKNGIDIYSLTVDSRVSSRFAHTVVTSRVVNRANTVQEATFQMELPKKAFITNFSMIIDGMTYPGIIKEKAEAQAQYSAAVAKGKSAGLVKATGRNMEQFQVSVSVAPNAKITFELVYEELLKRRLGVYELLLKVRPQQLVKHLQMDIHIFEPQGISFLETESTFMTNQLVDALTTWQNKTKAHIRFKPTLSQQQKSPEQQETVLDGNLIIRYDVDRAISGGSIQIENGYFVHYFAPEGLTTMPKNVVFVIDKSGSMSGRKIQQTREALIKILDDLSPRDQFNLIVFSTEATQWRPSLVPASAENVNKARSFAAGIQALGGTNINDAMLMAVQLLDSSNQEERLPEGSVSLIILLTDGDPTVGETNPRSIQNNVREAVSGRYSLFCLGFGFDVSYAFLEKLALDNGGLARRIHEDSDSALQLQDFYQEVANPLLTAVTFEYPSNAVEEVTQNNFRLLFKGSEMVVAGKLQDRGPDVLTATVSGKLPTQNITFQTESSVAEQEAEFQSPKYIFHNFMERLWAYLTIQQLLEQTVSASDADQQALRNQALNLSLAYSFVTPLTSMVVTKPDDQEQSQVAEKPMEGESRNRNVHSAGAAGSRMNFRPGVLSSRQLGLPGPPDVPDHAAYHPFRRLAILPASAPPATSNPDPAVSRVMNMKIEETTMTTQTPAPIQAPSAILPLPGQSVERLCVDPRHRQGPVNLLSDPEQGVEVTGQYEREKAGFSWIEVTFKNPLVWVHASPEHVVVTRNRRSSAYKWKETLFSVMPGLKMTMDKTGLLLLSDPDKVTIGLLFWDGRGEGLRLLLRDTDRFSSHVGGTLGQFYQEVLWGSPAASDDGRRTLRVQGNDHSATRERRLDYQEGPPGVEISCWSVEL

SEQ ID NO: 7330 - protein, 935 aa, Homo sapiens
MKPPRPVRTCSKVLVLLSLLAIHQTTTAEKNGIDIYSLTVDSRVSSRFAHTVVTSRVVNRANTVQEATFQMELPKKAFITNFSMIIDGMTYPGIIKEKAEAQAQYSAAVAKGKSAGLVKATGRNMEQFQVSVSVAPNAKITFELVYEELLKRRLGVYELLLKVRPQQLVKHLQMDIHIFEPQGISFLETESTFMTNQLVDALTTWQNKTKAHIRFKPTLSQQQKSPEQQETVLDGNLIIRYDVDRAISGGSIQIENGYFVHYFAPEGLTTMPKNVVFVIDKSGSMSGRKIQQTREALIKILDDLSPRDQFNLIVFSTEATQWRPSLVPASAENVNKARSFAAGIQALGGTNINDAMLMAVQLLDSSNQEERLPEGSVSLIILLTDGDPTVGETNPRSIQNNVREAVSGRYSLFCLGFGFDVSYAFLEKLALDNGGLARRIHEDSDSALQLQDFYQEVANPLLTAVTFEYPSNAVEEVTQNNFRLLFKGSEMVVAGKLQDRGPDVLTATVSGKLPTQNITFQTESSVAEQEAEFQSPKYIFHNFMERLWAYLTIQQLLEQTVSASDADQQALRNQALNLSLAYSFVTPLTSMVVTKPDDQEQSQVAEKPMEGESRNRNVHSGSTFFKYYLQGAKIPKPGLDHTEASFSPRRGWNRQAGAAGSRMNFRPGVLSSRQLGLPGPPDVPDHAAYHPFRRLAILPASAPPATSNPDPAVSRVMNMKIEETTMTTQTPAPIQAPSAILPLPGQSVERLCVDPRHRQGPVNLLSDPEQGVEVTGQYEREKAGFSWIEVTFKNPLVWVHASPEHVVVTRNRRSSAYKWKETLFSVMPGLKMTMDKTGLLLLSDPDKVTIGLLFWDGRGEGLRLLLRDTDRFSSHVGGTLGQFYQEVLWGSPAASDDGRRTLRVQGNDHSATRERRLDYQEGPPGVEISCWSVEL

SEQ ID NO: 7331 - protein, 719 aa, Homo sapiens
  SITE 1: note = misc_feature - Xaa can be any naturally occurring amino acid
XVSVAPNAKITFELVYEELLKRRLGVYELLLKVRPQQLVKHLQMDIHIFEPQGISFLETESTFMTNQLVDALTTWQNKTKQKSPEQQETVLDGNLIIRYDVDRAISGGSIQIENGYFVHYFAPEGLTTMPKNVVFVIDKSGSMSGRKIQQTREALIKILDDLSPRDQFNLIVFSTEATQWRPSLVPASAENVNKARSFAAGIQALGGTNINDAMLMAVQLLDSSNQEERLPEGSVSLIILLTDGDPTVGETNPRSIQNNVREAVSGRYSLFCLGFGFDVSYAFLEKLALDNGGLARRIHEDSDSALQLQDFYQEVANPLLTAVTFEYPSNAVEEVTQNNFRLLFKGSEMVVAGKLQDRGPDVLTATVSGKLPTQNITFQTESSVAEQEAEFQSPKYIFHNFMERLWAYLTIQQLLEQTVSASDADQQALRNQALNLSLAYSFVTPLTSMVVTKPDDQEQSQVAEKPMEGESRNRNVHSAGAAGSRMNFRPGVLSSRQLGLPGPPDVPDHAAYHPFRRLAILPASAPPATSNPDPAVSRVMNMKIEETTMTTQTPGVEVTGQYEREKAGFSWIEVTFKNPLVWVHASPEHVVVTRNRRSSAYKWKETLFSVMPGLKMTMDKTGLLLLSDPDKVTIGLLFWDGRGEGLRLLLRDTDRFSSHVGGTLGQFYQEVLWGSPAASDDGRRTLRVQGNDHSATRERRLDYQEGPPGVEISCWSVEL

SEQ ID NO: 7332 - protein, 942 aa, Homo sapiens
MLLLLGLCLGLSLCVGSQEEAQSWGHSSEQDGLRVPRQVRLLQRLKTKPLMTEFSVKSTIISRYAFTTVSCRMLNRASEDQDIEFQMQIPAAAFITNFTMLIGDKVYQGEITEREKKSGDRVKEKRNKTTEENGEKGTEIFRASAVIPSKDKAAFFLSYEELLQRRLGKYEHSISVRPQQLSGRLSVDVNILESAGIASLEVLPLHNSRQRGSGRGEDDSGPPPSTVINQNETFANIIFKPTVVQQARIAQNGILGDFIIRYDVNREQSIGDIQVLNGYFVHYFAPKDLPPLPKNVVFVLDSSASMVGTKLRQTKDALFTILHDLRPQDRFSIIGFSNRIKVWKDHLISVTPDSIRDGKVYIHHMSPTGGTDINGALQRAIRLLNKYVAHSGIGDRSVSLIVFLTDGKPTVGETHTLKILNNTREAARGQVCIFTIGIGNDVDFRLLEKLSLENCGLTRRVHEEEDAGSQLIGFYDEIRTPLLSDIRIDYPPSSVVQATKTLFPNYFNGSEIIIAGKLVDRKLDHLHVEVTASNSKKFIILKTDVPVRPQKAGKDVTGSPRPGGDGEGDTNHIERLWSYLTTKELLSSWLQSDDEPEKERLRQRAQALAVSYRFLTPFTSMKLRGPVPRMDGLEEAHGMSAAMGPEPVVQSVRGAGTQPGPLLKKPYQPRIKISKTSVDGDPHFVVDFPLSRLTVCFNIDGQPGDILRLVSDHRDSGVTVNGELIGAPAPPNGHKKQRTYLRTITILINKPERSYLEITPSRVILDGGDRLVLPCNQSVVVGSWGLEVSVSANANVTVTIQGSIAFVILIHLYKKPAPFQRHHLGFYIANSEGLSSNCHGLLGQFLNQDARLTEDPAGPSQNLTHPLLLQVGEGPEAVLTVKGHQVPVVWKQRKIYNGEEQIDCWFARNNAAKLIDGEYKDYLASHPFDTGMTLGRGMSREL

SEQ ID NO: 7333 - protein, 702 aa, Homo sapiens
MLLLLGLCLGLSLCVGSQEEAQSWGHSSEQDGLRVPRQVRLLQRLKTKPLMTEFSVKSTIISRYAFTTVSCRMLNRASEDQDIEFQMQIPAAAFITNFTMLIGDKVYQGEITEREKKSGDRVKEKRNKTTEENGEKGTEIFRASAVIPSKDKAAFFLSYEELLQRRLGKYEHSISVRPQQLSGRLSVDVNILESAGIASLEVLPLHNSRQRGSGRGEDDSGPPPSTVINQNETFANIIFKPTVVQQARIAQNGILGDFIIRYDVNREQSIGDIQVLNGYFVHYFAPKDLPPLPKNVVFVLDSSASMVGTKLRQTKDALFTILHDLRPQDRFSIIGFSNRIKVWKDHLISVTPDSIRDGKVYIHHMSPTGGTDINGALQRAIRLLNKYVAHSGIGDRSVSLIVFLTDGKPTVGETHTLKILNNTREAARGQVCIFTIGIGNDVDFRLLEKLSLENCGLTRRVHEEEDAGSQLIGFYDEIRTPLLSDIRIDYPPSSVVQATKTLFPNYFNGSEIIIAGKLVDRKLDHLHVEVTASNSKKFIILKTDVPVRPQKAGKDVTGSPRPGGDGEGDTNHIERLWSYLTTKELLSSWLQSDDEPEKERLRQRAQALAVSYRFLTPFTSMKLRGPVPRMDGLEEAHGMSAAMGPEPVVQSVRGAGTQPGPLLKKPYQPRIKISKTSVRGFRREEQIFSNVMKFPFASILEL

SEQ ID NO: 7334 - protein, 728 aa, Homo sapiens
MRNYDSGPPPSTVINQNETFANIIFKPTVVQQARIAQNGILGDFIIRYDVNREQSIGDIQVLNGYFVHYFAPKDLPPLPKNVVFVLDSSASMVGTKLRQTKDALFTILHDLRPQDRFSIIGFSNRIKVWKDHLISVTPDSIRDGKVYIHHMSPTGGTDINGALQRAIRLLNKYVAHSGIGDRSVSLIVFLTDGKPTVGETHTLKILNNTREAARGQVCIFTIGIGNDVDFRLLEKLSLENCGLTRRVHEEEDAGSQLIGFYDEIRTPLLSDIRIDYPPSSVVQATKTLFPNYFNGSEIIIAGKLVDRKLDHLHVEVTASNSKKFIILKTDVPVRPQKAGKDVTGSPRPGGDGEGDTNHIERLWSYLTTKELLSSWLQSDDEPEKERLRQRAQALAVSYRFLTPFTSMKLRGPVPRMDGLEEAHGMSAAMGPEPVVQSVRGAGTQPGPLLKKPYQPRIKISKTSVDGDPHFVVDFPLSRLTVCFNIDGQPGDILRLVSDHRDSGVTVNGELIGAPAPPNGHKKQRTYLRTITILINKPERSYLEITPSRVILDGGDRLVLPCNQSVVVGSWGLEVSVSANANVTVTIQGSIAFVILIHLYKKPAPFQRHHLGFYIANSEGLSSNCHGLLGQFLNQDARLTEDPAGPSQNLTHPLLLQVGEGPEAVLTVKGHQVPVVWKQRKIYNGEEQIDCWFARNNAAKLIDGEYKDYLASHPFDTGMTLGRGMSREL

SEQ ID NO: 7335 - protein, 119 aa, Homo sapiens
  SITE 1: note = misc_feature - Xaa can be any naturally occurring amino acid
XPSTVINQNETFANIIFKPTVVQQARIAQNGILGDFIIRYDVNREQSIGDIQVLNGYFVHYFAPKDLPPLPKNVVFVLDSSASMVGTKLRQDIGFSLAVQNWVPKGYLDISCVTLQVHV

SEQ ID NO: 7336 - protein, 1313 aa, Homo sapiens
MSGWRYLICVSFLLTILLELTYQGPPVPASSSTKLLMTSYSMRSTVVSRYAHTLVTSVLFNPHAEAHEAIFDLDLPHLAFISNFTMTINNKVYIAEVKEKHQAKKIYEEAHQQGKTAAHVGIRDRESEKFRISTSLAAGTEVTFSLAYEELLQRHQGQYQLVVSLRPGQLVKRLSIEVTVSERTGISYVHIPPLRTGRLRTNAHASEVDSPPSTRIERGETCVRITYCPTLQDQSSISGSGIMADFLVQYDVVMEDIIGDVQIYDDYFIHYFAPRGLPPMEKNVVFVIDVSSSMFGTKMEQTKTAMNVILSDLQANDYFNIISFSDTVNVWKAGGSIQATIQNVHSAKDYLHCMEADGWTDVNSALLAAASVLNHSNQEPGRGPSVGRIPLIIFLTDGEPTAGVTTPSVILSNVRQALGHRVSLFSLAFGDDADFTLLRRLSLENRGIARRIYEDTDAALQLKGLYEEISMPLLADVRLNYLGGLVGASPWAVFPNYFGGSELVVAGQVQPGKQELGIHLAARGPKDQLLVAHHSEGATNNSQKAFGCPGEPAPNVAHFIRRLWAYVTIGELLDAHFQARDTTTRHLLAAKVLNLSLEYNFVTPLTSLVMVQPKQASEETRRQTSTSAGPDTIMPSSSSRHGLGVSTAQPALVPKVISPKSRPVKPKFYLSSTTTASTKKMLSSKELEPLGESPHTLSMPTYPKAKIPAQQDSGTLAQPTLRTKPTILVPSNSGTLLPLKPGSLSHQNPDILPTNSRTQVPPVKPGIPASPKADTVKCVTPLHSKPGAPSHPQLGALTSQAPKGLPQSRPGVSTLQVPKYPLHTRPRVPAPKTRNNMPHLGPGILLSKTPKILLSLKPSAPPHQISTSISLSKPETPNPHMPQTPLPPRPDRPRPPLPESLSTFPNTISSSTGPSSTTTTSVLGEPLPMPFTPTLPPGRFWHQYDLLPGPQRTRQVLGPSRPGVPTMSLLNSSRPTPEGSPPNLPILLPSSILPEAISLLLLPEELELLSESMVESKFVESLNPPAFYTFLTPDEDGSPNWDGNSEEILGGAGGSMESQGSSVGLAKGTLPSIFTFSSSVDGDPHFVIQIPHSEEKICFTLNGHPGDLLQLIEDPKAGLHVSGKLLGAPPRPGHKDQTRTYFQIITVTTDKPRAYTITISRSSISLRGEGTLRLSWDQPALLKRPQLELYVAAAARLTLRLGPYLEFLVLRHRYRHPSTLQLPHLGFYVANGSGLSPSARGLIGQFQHADIRLVTGPMGPCLRRHHGPDVPVILGKRLLKDSPRLLPRWASCWLVKRSHVELLLGHPYLSYVL

SEQ ID NO: 7337 - protein, 313 aa, Homo sapiens
MNQLSFLLFLIATTRGWSTDEANTYFKEWTCSSSPSLPRSCKEIKDECPSAFDGLYFLRTENGVIYQTFCDMTSGGGGWTLVASVHENDMRGKCTVGDRWSSQQGSKAVYPEGDGNWANYNTFGSAEAATSDDYKNPGYYDIQAKDLGIWHVPNKSPMQHWRNSSLLRYRTDTGFLQTLGHNLFGIYQKYPVKYGEGKCWTDNGPVIPVVYDFGDAQKTASYYSPYGQREFTAGFVQFRVFNNERAANALCAGMRVTGCNTEHHCIGGGGYFPEASPQQCGDFSGFDWSGYGTHVGYSSSREITEAAVLLFYR

SEQ ID NO: 7338 - protein, 325 aa, Homo sapiens
MLSMLRTMTRLCFLLFFSVATSGCSAAAASSLEMLSREFETCAFSFSSLPRSCKEIKERCHSAGDGLYFLRTKNGVVYQTFCDMTSGGGGWTLVASVHENDMRGKCTVGDRWSSQQGNKADYPEGDGNWANYNTFGSAEAATSDDYKNPGYYDIQAKDLGIWHVPNKSPMQHWRNSALLRYRTNTGFLQRLGHNLFGIYQKYPVKYRSGKCWNDNGPAIPVVYDFGDAKKTASYYSPYGQREFVAGFVQFRVFNNERAANALCAGIKVTGCNTEHHCIGGGGFFPQGKPRQCGDFSAFDWDGYGTHVKSSCSREITEAAVLLFYR

SEQ ID NO: 7339 - protein, 243 aa, Homo sapiens
MACWWPLLLELWTVMPTWAGDELLNICMNAKHHKRVPSPEDKLYEECIPWKDNACCTLTTSWEAHLDVSPLYNFSLFHCGLLMPGCRKHFIQAICFYECSPNLGPWIQPVAPSGQGERVVNVPLCQEDCEEWWEDCRMSYTCKSNWRGGWDWSQGKNRCPKGAQCLPFSHYFPTPADLCEKTWSNSFKASPERRNSGRCLQKWFEPAQGNPNVAVARLFASSAPSWELSYTIMVCSLFLPFLS

SEQ ID NO: 7340 - protein, 250 aa, Homo sapiens
MACWWPLLLELWTVMPTWAGDELLNICMNAKHHKRVPSPEDKLYEECIPWKDNACCTLTTSWEAHLDVSPLYNFSLFHCGLLMPGCRKHFIQAICFYECSPNLGPWIQPVGSLGWEVAPSGQGERVVNVPLCQEDCEEWWEDCRMSYTCKSNWRGGWDWSQGKNRCPKGAQCLPFSHYFPTPADLCEKTWSNSFKASPERRNSGRCLQKWFEPAQGNPNVAVARLFASSAPSWELSYTIMVCSLFLPFLS

SEQ ID NO: 7341 - protein, 184 aa, Homo sapiens
MALLLCLVCLTAALAHGCLHCHSNFSKKFSFYRHHVNFKSWWVGDIPVSGALLTDWSDDTMKELHLAIPAKITREKLDQVATAVYQMMDQLYQGKMYFPGKGRETEAGPPHPGTPRPPPEPDLLLPRRLRVFPQRAAKHLPGAGAPHPERHHRKPHRLSAPLWSSAQWKSAVQGLLNYINNWHK

SEQ ID NO: 7342 - protein, 232 aa, Homo sapiens
MALLLCLVCLTAALAHGCLHCHSNFSKKFSFYRHHVNFKSWWVGDIPVSGALLTDWSDDTMKELHLAIPAKITREKLDQVATAVYQMMDQLYQGKMYFPGYFPNELRNIFREQVHLIQNAIIESRIDCQHRCGIFQYETISCNNCTDSHVACFGYNCESSAQWKSAVQGLLNYINNWHKQDTSMRPRSSAFSWPGTHRATPAFLVSPALRCLEPPHLANLTLEDAAECLKQH

SEQ ID NO: 7343 - protein, 214 aa, Homo sapiens
MALLLCLVCLTAALAHGCLHCHSNFSKKFSFYRHHVNFKSWWVGDIPVSGALLTDWSDDTMKELHLAIPAKITREKLDQVATAVYQMMDQLYQGKMYFPGYFPNELRNIFREQVHLIQNAIIESRIDCQHRCGIFQYETISCNNCTDSHVACFGYNCESSAQWKSAVQGLLNYINNWHKQDTSMSLVSPALRCLEPPHLANLTLEDAAECLKQH

SEQ ID NO: 7344 - protein, 208 aa, Homo sapiens
MALLLCLVCLTAALAHGCLHCHSNFSKKFSFYRHHVNFKSWWVGDIPVSGALLTDWSDDTMKELHLAIPAKITREKLDQVATAVYQMMDQLYQGKMYFPGYFPNELRNIFREQVHLIQNAIIESRIDCQHRCGIFQYETISCNNCTDSHVACFGYNCESSAQWKSAVQGLLNYINNWHNLVSPALRCLEPPHLANLTLEDAAECLKQH

SEQ ID NO: 7345 - protein, 152 aa, Homo sapiens
VSGALLTDWSDDTMKELHLAIPAKITREKLDQVATAVYQMMDQLYQGKMYFPGYFPNELRNIFREQVHLIQNAIIESIFQYETISCNNCTDSHVACFGYNCESSAQWKSAVQGLLNYINNWHNLVSPALRCLEPPHLANLTLEDAAECLKQH

SEQ ID NO: 7346 - protein, 152 aa, Homo sapiens
  SITE 1: note = misc_feature - Xaa can be any naturally occurring amino acid
XPQQLLQEVLLLPPPCELQVLVGGRHPRVRGAAHRLERRHDEGAAPGHPRQDHPGEAGPSGDSSVPDDGSAVPGEDVLPRVFPQRAAKHLPGAGAPHPERHHRKPHRLSAPLWSSAQWKSAVQGLLNYINNWHKPRSSAFSWPGTHRATPAL

SEQ ID NO: 7347 - protein, 138 aa, Homo sapiens
  SITE 1: note = misc_feature - Xaa can be any naturally occurring amino acid
XSALPQQLLQEVLLLPPPCELQVLVGGRHPRVRGAAHRLERRHDEGAAPGHPRQDHPGEAGPSGDSSVPDDGSAVPGEDVLPRVFPQRAAKHLPGAGAPHPERHHRKPHRLSAPLWHLPVRDHLLQQLHRLARRLLWL

SEQ ID NO: 7348 - protein, 155 aa, Homo sapiens
MFCPLKLILLPVLLDYSLGLNDLNVSPPELTVHVGDSALMGCVFQSTEDKCIFKIDWTLSPGEHAKDEYVLYYYSNLSVPIGRFQNRVHLMGDILCNDGSLLLQDVQEADQGTYICEIRLKGESQVFKKAVVLHVLPEEPKELMVHVGGLIQMGC

SEQ ID NO: 7349 - protein, 383 aa, Homo sapiens
MFCPLKLILLPVLLDYSLGLNDLNVSPPELTVHVGDSALMGCVFQSTEDKCIFKIDWTLSPGEHAKDEYVLYYYSNLSVPIGRFQNRVHLMGDILCNDGSLLLQDVQEADQGTYICEIRLKGESQVFKKAVVLHVLPEEPKELMVHVGGLIQMGCVFQSTEVKHVTKEEIVFRYYHKLRMSVEYSQSWGHFQNRVNLVGDIFRNDGSIMLQGVRESDGGNYTCSIHLGNLVFKKTIVLHVSPEEPRTLVTPAALRPLVLGGNQLVIIVGIVCATILLLPVLILIVKKTCGNKSSVNSTVLVKNTKKTNPEIKEKPCHFERCEGEKHIYSPIIVREVIEEEEPSEKSEATYMTMHPVWPSLRSDRNNSLEKKSGGGMPKTQQAF

SEQ ID NO: 7350 - protein, 394 aa, Homo sapiens
MFCPLKLILLPVLLDYSLGLNDLNVSPPELTVHVGDSALMGCVFQSTEDKCIFKIDWTLSPGEHAKDEYVLYYYSNLSVPIGRFQNRVHLMGDILCNDGSLLLQDVQEADQGTYICEIRLKGESQVFKKAVVLHVLPEEPKELMVHVGGLIQMGCVFQSTEVKHVTKVEWIFSGRRAKEEIVFRYYHKLRMSVEYSQSWGHFQNRVNLVGDIFRNDGSIMLQGVRESDGGNYTCSIHLGNLVFKKTIVLHVSPEEPRTLVTPAALRPLVLGGNQLVIIVGIVCATILLLPVLILIVKKTCGNKSSVNSTVLVKNTKKTNPEIKEKPCHFERCEGEKHIYSPIIVREVIEEEEPSEKSEATYMTMHPVWPSLRSDRNNSLEKKSGGGMPKTQQAF

SEQ ID NO: 7351 - protein, 66 aa, Homo sapiens
MFCPLKLILLPVLLEHRRQMYIQDRLDSVTRRARQGRICAILLLQSQCAYWALPEPRTLDGGHLMQ

SEQ ID NO: 7352 - protein, 121 aa, Homo sapiens
MGCVFQSTEDKCIFKIDWTLSPGEHAKDEYVLYYYSNLSVPIGRFQNRVHLMGDILCNDGSLLLQDVQEADQGTYICEIRLKGESQVFKKAVVLHVLPEEPKELMVHVGGLIQMGCVFQST

SEQ ID NO: 7353 - protein, 220 aa, Homo sapiens
MGCVFQSTEDKCIFKIDWTLSPGEHAKDEYVLYYYSNLSVPIGRFQNRVHLMGDILCNDGSLLLQDVQEADQGTYICEIRLKGESQVFKKAVVLHVLPEEPKELMVHVGGLIQMGCVFQSTEVKHVTKVEWIFSGRRAKEEIVFRYYHKLRMSVEYSQSWGHFQNRVNLVGDIFRNDGSIMLQGVRESDGGNYTCSIHLGNLVFKKTIVLHVSPEEPRKW

SEQ ID NO: 7354 - protein, 305 aa, Homo sapiens
MGCVFQSTEDKCIFKIDWTLSPGEHAKDEYVLYYYSNLSVPIGRFQNRVHLMGDILCNDGSLLLQDVQEADQGTYICEIRLKGESQVFKKAVVLHVLPEEPKELMVHVGGLIQMGCVFQSTEVKHVTKVEWIFSGRRAKEEIVFRYYHKLRMSVEYSQSWGHFQNRVNLVGDIFRNDGSIMLQGVRESDGGNYTCSIHLGNLVFKKTIVLHVSPEEPRTLVTPAALRPLVLGGNQLVIIVGIVCATILLLPVLILIVKKTCGNKSSVNSTVLVKNTKKTNPEIKEKPCHFERCEGEVNTRFSLKH

SEQ ID NO: 7355 - protein, 355 aa, Homo sapiens
MGCVFQSTEDKCIFKIDWTLSPGEHAKDEYVLYYYSNLSVPIGRFQNRVHLMGDILCNDGSLLLQDVQEADQGTYICEIRLKGESQVFKKAVVLHVLPEEPKELMVHVGGLIQMGCVFQSTEVKHVTKVEWIFSGRRAKEEIVFRYYHKLRMSVEYSQSWGHFQNRVNLVGDIFRNDGSIMLQGVRESDGGNYTCSIHLGNLVFKKTIVLHVSPEEPRTLVTPAALRPLVLGGNQLVIIVGIVCATILLLPVLILIVKKTCGNKSSVNSTVLVKNTKKTNPEIKEKPCHFERCEGEKHIYSPIIVREVIEEEEPSEKSEATYMTMHPVWPSLRSDRNNSLEKKSGGGMPKTQQAF

SEQ ID NO: 7356 - protein, 384 aa, Homo sapiens
MVSGDYSLGLNDLNVSPPELTVHVGDSALMGCVFQSTEDKCIFKIDWTLSPGEHAKDEYVLYYYSNLSVPIGRFQNRVHLMGDILCNDGSLLLQDVQEADQGTYICEIRLKGESQVFKKAVVLHVLPEEPKELMVHVGGLIQMGCVFQSTEVKHVTKVEWIFSGRRAKEEIVFRYYHKLRMSVEYSQSWGHFQNRVNLVGDIFRNDGSIMLQGVRESDGGNYTCSIHLGNLVFKKTIVLHVSPEEPRTLVTPAALRPLVLGGNQLVIIVGIVCATILLLPVLILIVKKTCGNKSSVNSTVLVKNTKKTNPEIKEKPCHFERCEGEKHIYSPIIVREVIEEEEPSEKSEATYMTMHPVWPSLRSDRNNSLEKKSGGGMPKTQQAF

SEQ ID NO: 7357 - protein, 70 aa, Homo sapiens
MKNHLLFWGVLAVFIKAVHVKAQEDERIVLVDNKCKCARITSRIIRSSEDPNEDIVERNIRIIVPLNNRE

SEQ ID NO: 7358 - protein, 159 aa, Homo sapiens
MKNHLLFWGVLAVFIKAVHVKAQEDERIVLVDNKCKCARITSRIIRSSEDPNEDIVERNIRIIVPLNNRENISDPTSPLRTRFVYHLSDLCKKCDPTEVELDNQIVTATQSNICDEDSATETCYTYDRNKCYTAVVPLVYGGETKMVETALTPDACYPD

SEQ ID NO: 7359 - protein, 159 aa, Homo sapiens; identical to SEQ ID NO: 7358

SEQ ID NO: 7360 - protein, 159 aa, Homo sapiens; identical to SEQ ID NO: 7358

SEQ ID NO: 7361 - protein, 158 aa, Homo sapiens
MKNHLLFWGVLAVFIKAVHVKENGIHSEFRAQEDERIVLVDNKCKCARITSRIIRSSEDPNEDIVERNIRIIVPLNNRENISDPTSPLRTRFVYHLSDLCKKCDPTEVELDNQIVTATQSNICDEDSATETCYTYDRNKCYTAVVPLVYGGETKMVET

SEQ ID NO: 7362 - protein, 157 aa, Homo sapiens
MKNHLLFWGVLAVFIKAVHVKGSRDSSASASRVAGITAQEDERIVLVDNKCKCARITSRIIRSSEDPNEDIVERNIRIIVPLNNRENISDPTSPLRTRFVYHLSDLCKKCDPTEVELDNQIVTATQSNICDEDSATETCYTYDRNKCYTAVVPLVYG

SEQ ID NO: 7363 - protein, 285 aa, Homo sapiens
MAGGWAQGSRRAARLPEGGRLMAPASRLLALWALAAVALPGSGAEGDGGWRPGGPGAVAEEERCTVERRADLTYAEFVQQYAFVRPVILQGLTDNSRFRALCSRDRLLASFGDRVVRLSTANTYSYHKVDLPFQEYVEQLLHPQDPTSLGNDTLYFFGDNNFTEWASLFRHYSPPPFGLLGTAPAYSFGIAGAGSGVPFHWHGPGYSEVIYGRKRWFLYPPEKTPEFHPNKTTLAWLRDTYPALPPSARPLECTIRAGEVLYFPDRWWHATLNLDTSVFISTFLG

SEQ ID NO: 7364 - protein, 264 aa, Homo sapiens
MAPASRLLALWALAAVALPGSGAEGDGGWRPGGPGAVAEEERCTVERRADLTYAEFVQQYAFVRPVILQGLTDNSRFRALCSRDRLLASFGDRVVRLSTANTYSYHKVDLPFQEYVEQLLHPQDPTSLGNDTLYFFGDNNFTEWASLFRHYSPPPFGLLGTAPAYSFGIAGAGSGVPFHWHGPGYSEVIYGRKRWFLYPPEKTPEFHPNKTTLAWLRDTYPALPPSARPLECTIRAGEVLYFPDRWWHATLNLDTSVFISTFLG

SEQ ID NO: 7365 - protein, 219 aa, Homo sapiens
MAPASRLLALWALAAVALPGSGAEGDGGWRPGGPGAVAEEERCTVERRADLTYAEFVQQYAFVRPVILQGLTDNSRFRALCSRDRLLASFGDRVVRLSTANTYSYHKVDLPFQEYVEQLLHPQDPTSLGNDTLYFFGDNNFTEWASLFRHYSPPPFGLLGTAPAYSFGIAGAGSGVPFHWHGPGYSEVIYGRKVLYFPDRWWHATLNLDTSVFISTFLG

SEQ ID NO: 7366 - protein, 234 aa, Homo sapiens
MAPASRLLALWALAAVALPGSGAEGDGGWYAFVRPVILQGLTDNSRFRALCSRDRLLASFGDRVVRLSTANTYSYHKVDLPFQEYVEQLLHPQDPTSLGNDTLYFFGDNNFTEWASLFRHYSPPPFGLLGTAPAYSFGIAGAGSGVPFHWHGPGYSEVIYGRKRWFLYPPEKTPEFHPNKTTLAWLRDTYPALPPSARPLECTIRAGEVLYFPDRWWHATLNLDTSVFISTFLG

SEQ ID NO: 7367 - protein, 81 aa, Homo sapiens
  SITE 1: note = misc_feature - Xaa can be any naturally occurring amino acid
XWTCPSRSMWSSCCTPRTPPPWAMTPCTSSGTTTSPSGPLSFGTTPHPHLACWEPLQLTALESQELARGCPSTGMDPGTQK

SEQ ID NO: 7368 - protein, 331 aa, Homo sapiens
MSMTTRAWEELDGGLGSCQALEDHSALAETQEDRASATPRLADSGSVPHDSQVAEGPSVDTRPKKMEKEPAARGTPGTGKERLKAGASPRSVPARKKAQTAPPLQPPPPPPALSEELPWGDLSLNKCLVLASLVALLGSAFQLCRDAVPGEAALQARVPEPWVPPSSAPREPSSPLPKFEAQAPPSAPPAPRAEAEVRPKIPGSREAAENDEEEPGEATGEAVREDRVTLADRGPKERPRREGKPRKEKPRKEERPKKERPRKEERPRAAREPREALPQRWESREGGHRPWARDSRDAEPRKKQAWVSPRRPDEEQRPGSRQKLRAGKGRD

SEQ ID NO: 7369 - protein, 206 aa, Homo sapiens
ENLKRLKCLRRYRQRYGVEALLHRQLKERRMLATDGAAQQAHTTRSSQRCLAFVDDVRCSNQSLPMTRHCLTHICQDTNQVLFKCCQGSEEVPCNKPVPVSLSEDPCCPLHFQLPPQMYKPEQDLDVVGDGMQCPPSPLLFDPSLTLEDHLVKEIAEDPVDILGQMQMAGDGCRSQGSRNSEKASAPLSQSGLATANGKPEPTSIS

SEQ ID NO: 7370 - protein, 675 aa, Homo sapiens
MAVLFPLSSCGWAAISLFLSAQSCYSASKQCQSQSPSCRLPGARISGDWSRRTKWRSHRLPRPGPVVRSEAGRDKGGVRGGGVAAAWGWCCRFPSCCSCASPEDTFSVVWFGVGPGMEGHAKGRQSHRCLWRLGEGGGDLRSVPYGDDFCMSFGNCPRDLCGAGIFGKGKGFLVFRLTPQVLVMNRIRIHVLPTNRGRITPVPRSQEPLSCAFTHRPCSHPRLEGQEFCIKHILEDKNAPFKQCSYISTKNGKRCPNAAPKPEKKDGVSFCAEHVRRNALALHAQMKKTNPGPVGETLLCQLSSYAKTELGSQTPESSRSEASRILDEDSWSDGEQEPITVDQTWRGDPDSEADSIDSDQEDPLKHAGVYTAEEVALIMREKLIRLQSLYIDQFKRLQHLLKEKKRRYLHNRKVEHEALGSSLLTGPEGLLAKERENLKRLKCLRRYRQRYGVEALLHRQLKERRMLATDGAAQQAHTTRSSQRCLAFVDDVRCSNQSLPMTRHCLTHICQDTNQVLFKCCQGSEEVPCNKPVPVSLSEDPCCPLHFQLPPQMYKPEQVLSVPDDLEAGPMDLYLSAAELQPTESLPLEFSDDLDVVGDGMQCPPSPLLFDPSLTLEDHLVKEIAEDPVDILGQMQMAGDGCRSQGSRNSEKASAPLSQSGLATANGKPEPTSIS

SEQ ID NO: 7371 - protein, 69 aa, Homo sapiens
MNRIRIHVLPTNRGRITPVPRSQEPLSCAFTHRPCSHPRLEGQEFCIKHILEDKNAPFKQCSYISTKNG

SEQ ID NO: 7372 - protein, 108 aa, Homo sapiens
MNRIRIHVLPTNRGRITPVPRSQEPLSCAFTHRPCSHPRLEGQEFCIKHILEDKNAPFKQCSYISTKNGKRCPNAAPKPEKKDGVSFCAEHVRRNALALHAQMKKTNP

SEQ ID NO: 7373 - protein, 492 aa, Homo sapiens
MNRIRIHVLPTNRGRITPVPRSQEPLSCAFTHRPCSHPRLEGQEFCIKHILEDKNAPFKQCSYISTKNGKRCPNAAPKPEKKDGVSFCAEHVRRNALALHAQMKKTNPGPVGETLLCQLSSYAKTELGSQTPESSRSEASRILDEDSWSDGEQEPITVDQTWRGDPDSEADSIDSDQEDPLKHAGVYTAEEVALIMREKLIRLQSLYIDQFKRLQHLLKEKKRRYLHNRKVEHEALGSSLLTGPEGLLAKERENLKRLKCLRRYRQRYGVEALLHRQLKERRMLATDGAAQQAHTTRSSQRCLAFVDDVRCSNQSLPMTRHCLTHICQDTNQVLFKCCQGSEEVPCNKPVPVSLSEDPCCPLHFQLPPQMYKPEQVLSVPDDLEAGPMDLYLSAAELQPTESLPLEFSDDLDVVGDGMQCPPSPLLFDPSLTLEDHLVKEIAEDPVDILGQMQMAGDGCRSQGSRNSEKASAPLSQSGLATANGKPEPTSIS

SEQ ID NO: 7374 - protein, 454 aa, Homo sapiens
MNRIRIHVLPTNRGRITPVPRSQEPLSCAFTHRPCSHPRLEGQEFCIKHILEDKNAPFKQCSYISTKNGKRCPNAAPKPEKKDGVSFCAEHVRRNALALHAQMKKTNPGPVGETLLCQLSSYAKTELGSQTPESSRSEASRILDEDSWSDGEQEPITVDQTWRGDPDSEADSIDSDQEDPLKHAGVYTAEEVALIMREKLIRLQSLYIDQFKRLQHLLKEKKRRYLHNRKVEHEALGSSLLTGPEGLLAKERENLKRLKCLRRYRQRYGVEALLHRQLKERRMLATDGAAQQAHTTRSSQRCLAFVDDVRCSNQSLPMTRHCLTHICQDTNQVLFKCCQGSEEVPCNKPVPVSLSEDPCCPLHFQLPPQMYKPEQDLDVVGDGMQCPPSPLLFDPSLTLEDHLVKEIAEDPGQMQMAGDGCRSQGSRNSEKASAPLSQSGLATANGKPEPTSIS

SEQ ID NO: 7375 - protein, 155 aa, Homo sapiens
MNRIRIHVLPTNRGRITPVPRSQEPLSCAFTHRPCSHPRLEGQEFCIKHILEDKNAPFKQCSYISTKNGKRCPNAAPKPEKKDGVSFCAEHVRRNALALHAQMKKTNPGPVGETLLCQLSSYAKTELGSQTPESSRSEASRILDMLVSTQQKKWP

SEQ ID NO: 7376 - protein, 133 aa, Homo sapiens
MNRIRIHVLPTNRGRITPVPRVSFCAEHVRRNALALHAQMKKTNPGPVGETLLCQLSSYAKTELGSQTPESSRSEASRILDEDSWSDGEQEPITVDQTWRGDPDSEADSIDSDQEDPLKHAGVYTAEEVALIM

SEQ ID NO: 7377 - protein, 74 aa, Homo sapiens
PNAAPKPEKKDGVSFCAEHVRRNALALHAQMKKTNPGPVGETLLCQLSSYAKTELGSQTPESSRSEASRILGLG

SEQ ID NO: 7378 - protein, 340 aa, Homo sapiens
  SITE 1: note = misc_feature - Xaa can be any naturally occurring amino acid
XLPTNRGRITPVPRSQEPLSCAFTHRPCSHPRLEGQEFCIKHILEDKNAPFKQCSYISTKNGKRCPNAAPKPEKKDGVSFCAEHVRRNALALHAQMKKTNPGPVGETLLCQLSSYAKTELGSQTPESSRSEASRILDEDSWSDGEQEPITVDQTWRGDPDSEADSIDSDQEDPLKHAGVYTAEEVALIMREKLIRLQSLYIDQFKRLQHLLKEKKRRYLHNRKVEHEALGSSLLTGPEGLLAKERENLKRLKCLRRYRQRYGVEALLHRQLKERRMLATDGAAQQAHTTRSSQRCLAFVDDVRCSNQSLPMTRHCLTQKDATAIGDLLTLYCGLMETALD

SEQ ID NO: 7379 - protein, 25 aa, Homo sapiens
  SITE 1: note = misc_feature - Xaa can be any naturally occurring amino acid
XPESSRSEASRILDMLVSTQQKKWP

SEQ ID NO: 7380 - protein, 304 aa, Homo sapiens
MLPPPRPAAALALPVLLLLLVVLTPPPTGARPSPGPDYLRRGWMRLLAEGEGCAPCRPEECAAPRGCLAGRVRDACGCCWECANLEGQLCDLDPSAHFYGHCGEQLECRLDTGGDLSRGEVPEPLCACRSQSPLCGSDGHTYSQICRLQEAARARPDANLTVAHPGPCESGPQIVSHPYDTWNVTGQDVIFGCEVFAYPMASIEWRKDGLDIQLPGDDPHISVQFRGGPQRFEVTGWLQIQAVRPSDEGTYRCLGRNALGQVEAPASLTVLTPDQLNSTGIPQLRSLNLVPEEEAESEENDDYY

SEQ ID NO: 7381 - protein, 230 aa, Homo sapiens
MGIQGMELCAMAVVVLLFIAVLKQFGILEPISMEDSSDSELELSTVRHQPEGLDQLQAQTKFTKKELQSLYRGFKNECPTGLVDEDTFKLIYAQFFPQGDATTYAHFLFNAFDADGNGAIHFEDFVVGLSILLRGTVHEKLKWAFNLYDINKDGYITKEEMLAIMKSIYDMMGRHTYPILREDAPAEHVERFFEKMDRNQDGVVTIEEFLEACQKDENIMSSMQLFENVI

SEQ ID NO: 7382 - protein, 256 aa, Homo sapiens
MQPAKEVTKASDGSLLGDLGHTPLSKKEGIKWQRPRLSRQALMRCCLVKWILSSTAPQGSDSSDSELELSTVRHQPEGLDQLQAQTKFTKKELQSLYRGFKNECPTGLVDEDTFKLIYAQFFPQGDATTYAHFLFNAFDADGNGAIHFEDFVVGLSILLRGTVHEKLKWAFNLYDINKDGYITKEEMLAIMKSIYDMMGRHTYPILREDAPAEHVERFFEKMDRNQDGVVTIEEFLEACQKDENIMSSMQLFENVI

SEQ ID NO: 7383 - protein, 256 aa, Homo sapiens
MQPRKEVTKASDGSLLGDLGHTPLSKKEGIKWQRPRLSRQALMRCCLVKWILSSTAPQGSDSSDSELELSTVRHQPEGLDQLQAQTKFTKKELQSLYRGFKNECPTGLVDEDTFKLIYAQFFPQGDATTYAHFLFNAFDADGNGAIHFEDFVVGLSILLRGTVHEKLKWAFNLYDINKDGYITKEEMLAIMKSIYDMMGRHTYPILREDAPAEHVERFFEKMDRNQDGVVTIEEFLEACQKDENIMSSMQLFENVI

SEQ ID NO: 7384 - protein, 252 aa, Homo sapiens
MGGLRPWSRYGLLVVAHLLALGLGAVVFQALEGPPACRLQAELRAELAAFQAEHRACLPPGALEELLGTALATQAHGVSTLGNSSEGRTWDLPSALLFAASILTTTGYGHMAPLSPGGKAFCMVYAALGLPASLALVATLRHCLLPVLSRPRAWVAVHWQLSPARAALLQAVALGLLVASSFVLLPALVLWGLQGDCSLLGAVYFCFSSLSTIGLEDLLPGRGRSLHPVIYHLGQLALLGGGTSLQGTAWEG

SEQ ID NO: 7385 - protein, 252 aa, Homo sapiens; identical to SEQ ID NO: 7384

SEQ ID NO: 7386 - protein, 257 aa, Homo sapiens
MGGLRPWSRYGLLVVAHLLALGLGAVVFQALEGPPACRLQAELRAELAAFQAEHRACLPPGALEELLGTALATQAHGVSTLGNSSEGRTWDLPSALLFAASILTTTGYGHMAPLSPGGKAFCMVYAALGLPASLALVATLRHCLLPVLSRPRAWVAVHWQLSPARAALLQAVALGLLVASSFVLLPALVLWGLQGDCSLLGAVYFCFSSLSTIGLEDLLPGRGRSLHPVIYHLGQLALLGKSSHLTACGGRGKRSLD

SEQ ID NO: 7387 - protein, 307 aa, Homo sapiens
MGGLRPWSRYGLLVVAHLLALGLGAVVFQALEGPPACRLQAELRAELAAFQAEHRACLPPGALEELLGTALATQAHGVSTLGNSSEGRTWDLPSALLFAASILTTTGYGHMAPLSPGGKAFCMVYAALGLPASLALVATLRHCLLPVLSRPRAWVAVHWQLSPARAALLQAVALGLLVASSFVLLPALVLWGLQGDCSLLGAVYFCFSSLSTIGLEDLLPGRGRSLHPVIYHLGQLALLGYLLLGLLAMLLAVETFSELPQVRAMGKFFRPSGPVTAEDQGGILGQDELALSTLPPAAPASGQAPAC

SEQ ID NO: 7388 - protein, 72 aa, Homo sapiens
  SITE 1: note = misc_feature - Xaa can be any naturally occurring amino acid
XHLGQLALLGLLAMLLAVETFSELPQVRAMGKFFRPSGPVTAEDQGGILGQDELALSTLPPAAPASGQAPAC

SEQ ID NO: 7389 - protein, 28 aa, Homo sapiens
  SITE 1: note = misc_feature - Xaa can be any naturally occurring amino acid
XLHPVIYHLGQLALLGGGTSLQGTAWEG

SEQ ID NO: 7390 - protein, 57 aa, Homo sapiens
MGGDLVLGLGALRRRKRLLEQEKSLAGWALVLAGTGIGLMVLHAEMLWFGGCSTHFG

SEQ ID NO: 7391 - protein, 427 aa, Homo sapiens
MGGDLVLGLGALRRRKRLLEQEKSLAGWALVLAGTGIGLMVLHAEMLWFGGCSWALYLFLVKCTISISTFLLLCLIVAFHAKEVQLFMTDNGLRDWRVALTGRQAAQIVLELVVCGLHPAPVRGPPCVQDLGAPLTSPQPWPGFLGQGEALLSLAMLLRLYLVPRAVLLRSGVLLNASYRSIGALNQVRFRHWFVAKLYMNTHPGRLLLGLTLGLWLTTAWVLSVAERQAVNATGHLSDTLWLIPITFLTIGYGDVVPGTMWGKIVCLCTGVMGVCCTALLVAVVARKLEFNKAEKHVHNFMMDIQYTKEMKESAARVLQEAWMFYKHTRRKESHAARRHQRKLLAAINAFRQVRLKHRKLREQVNSMVDISKMHMILYDLQQNLSSSHRALEKQIDTLAGKLDALTELLSTALGPRQLPEPSQQSK

SEQ ID NO: 7392 - protein, 295 aa, Homo sapiens
MHDQHFHLLTPLPHRGLSCQRGPAVHDRQRAAGLARGADRAAGNASYRSIGALNQVRFRHWFVAKLYMNTHPGRLLLGLTLGLWLTTAWVLSVAERQAVNATGHLSDTLWLIPITFLTIGYGDVVPGTMWGKIVCLCTGVMGVCCTALLVAVVARKLEFNKAEKHVHNFMMDIQYTKEMKESAARVLQEAWMFYKHTRRKESHAARRHQRKLLAAINAFRQVRLKHRKLREQVNSMVDISKMHMILYDLQQNLSSSHRALEKQIDTLAGKLDALTELLSTALGPRQLPEPSQQSK

SEQ ID NO: 7393 - protein, 113 aa, Homo sapiens
SDTLWLIPITFLTIGYGDVVPGTMWGKIVCLCTGVMGVCCTALLVAVVARKLEFNKAEKHVHNFMMDIQYTKEMKESAARVLQEAWMFYKHTRRKESHAARRHQRKLLAAINA

SEQ ID NO: 7394 - protein, 59 aa, Homo sapiens
VDISKMHMILYDLQQNLSSSHRALEKQIDTLAGKLDALTELLSTALGPRQLPEPSQQSK

SEQ ID NO: 7395 - protein, 165 aa, Homo sapiens
  SITE 1: note = misc_feature - Xaa can be any naturally occurring amino acid
XVCCTALLVAVVARKLEFNKAEKHVHNFMMDIQYTKEEGVSCCPQASAQAAGRHQRVRAALYAHVSMCTHVQVTSLHGCVCACPCLSRFRQVRLKHRKLREQVNSMVDISKMHMILYDLQQNLSSSHRALEKQIDTLAGKLDALTELLSTALGPRQLPEPSQQSK

SEQ ID NO: 7396 - protein, 113 aa, Homo sapiens
MFQTKLRNETWEDLPKMSCTTEIQAAFILSSFVTFFSGLIILLIFRLIWRSVKKWQIIKGTGIILELFTSGTIARSHVRSLHFQGQFRDHIEMLLSAQTFVGQVLPCWKLFII

SEQ ID NO: 7397 - protein, 1149 aa, Homo sapiens
MFQTKLRNETWEDLPKMSCTTEIQAAFILSSFVTFFSGLIILLIFRLIWRSVKKWQIIKGTGIILELFTSGTIARSHVRSLHFQGQFRDHIEMLLSAQTFVGQVLVILVFVLSIGSLIIYFINSADPVGSCSSYEDKTIPIDLVFNAFFSFYFGLRFMAADDKIKFWLEMNSIVDIFTIPPTFISYYLKSNWLGLRFLRALRLLELPQILQILRAIKTSNSVKFSKLLSIILSTWFTAAGFIHLVENSGDPWLKGRNSQNISYFESIYLVMATTSTVGFGDVVAKTSLGRTFIMFFTLGSLILFANYIPEMVELFANKRKYTSSYEALKGKKFIVVCGNITVDSVTAFLRNFLRDKSGEINTEIVFLGETPPSLELETIFKCYLAYTTFISGSAMKWEDLRRVAVESAEACLIIANPLCSDSHAEDISNIMRVLSIKNYDSTTRIIIQILQSHNKVYLPKIPSWNWDTGDNIICFAELKLGFIAQGCLVPGLCTFLTSLFVEQNKKVMPKQTWKKHFLNSMKNKILTQRLSDDFAGMSFPEVARLCFLKMHLLLIAIEYKSLFTDGFCGLILNPPPQVRIRKNTLGFFIAETPKDVRRALFYCSVCHDDVFIPELITNCGCKSRSRQHITVPSVKRMKKCLKGISSRISGQDSPPRVSASTSSISNFTTRTLQHDVEQDSDQLDSSGMFHWCKPTSLDKVTLKRTGKSKYKFRNHIVACVFGDAHSAPMGLRNFVMPLRASNYTRKELKDIVFIGSLDYLQREWRFLWNFPQIYILPGCALYSGDLHAANIEQCSMCAVLSPPPQPSSNQTLVDTEAIMATLTIGSLQIDSSSDPSPSVSEETPGYTNGHNEKSNCRKVPILTELKNPSNIHFIEQLGGLEGSLQETNLHLSTAFSTGTVFSGSFLDSLLATAFYNYHVLELLQMLVTGGVSSQLEQHLDKDKVYGVADSCTSLLSGRNRCKLGLLSLHETILSDVNPRNTFGQLFCGSLDLFGILCVGLYRIIDEEELNPENKRFVITRPANEFKLLPSDLVFCAIPFSTACYKRNEEFSLQKSYEIVNKASQTTETHSDTNCPPTIDSVTETLYSPVYSYQPRTNSLSFPKQIAWNQSRTNSIISSQIPLGDNAKENERKTSDEVYDEDPFAYSEPL

SEQ ID NO: 7398 - protein, 308 aa, Homo sapiens
MFQTKLRNETWEDLPKMSCTTEIQAAFILSSFVTFFSGLIILLIFRLIWRSVKKWQIIKGTGIILELFTSGTIARSHVRSLHFQGQFRDHIEMLLSAQTFVGQVLVILVFVLSIGSLIIYFINSADPVGSCSSYEDKTIPIDLVFNAFFSFYFGLRFMAADDKIKFWLEMNSIVDIFTIPPTFISYYLKSNWLGLRFLRALRLLELPQILQILRAIKTSNSVKFSKLLSIILSTWFTAAGFIHLVENSGDPWLKGRNSQNISYFESIYLVMATTSTVGFGDVVAKTSLGRTFIMFFTLGSLVKNIFNI

SEQ ID NO: 7399 - protein, 947 aa, Homo sapiens
MFQTKLRNETWEDLPKMSCTTEIQAAFILSSFVTFFSGLIILLIFRLIWRSVKKWQIIKGTGIILELFTSGTIARSHVRSLHFQGQFRDHIEMLLSAQTFVGQVLVILVFVLSIGSLIIYFINSADPVGSCSSYEDKTIPIDLVFNAFFSFYFGLRFMAADDKIKFWLEMNSIVDIFTIPPTFISYYLKSNWLGLRFLRALRLLELPQILQILRAIKTSNSVKFSKLLSIILSTWFTAAGFIHLVENSGDPWLKGRNSQNISYFESIYLVMATTSTVGFGDVVAKTSLGRTFIMFFTLGSLILFANYIPEMVELFANKRKYTSSYEALKGKKFIVVCGNITVDSVTAFLRNFLRDKSGEINTEIVFLGETPPSLELETIFKCYLAYTTFISGSAMKWEDLRRVAVESAEACLIIANPLCSDSHAEDISNIMRVLSIKNYDSTTRIIIQILQSHNKVYLPKIPSWNWDTGDNIICFAELKLGFIAQGCLVPGLCTFLTSLFVEQNKKVMPKQTWKKHFLNSMKNKILTQRLSDDFAGMSFPEVARLCFLKMHLLLIAIEYKSLFTDGFCGLILNPPPQVRIRKNTLGFFIAETPKDVRRALFYCSVCHDDVFIPELITNCGCKSRSRQHITVPSVKRMKKCLKGISSRISGQDSPPRVSASTSSISNFTTRTLQHDVEQDSDQLDSSGMFHWCKPTSLDKVTLKRTGKSKYKFRNHIVACVFGDAHSAPMGLRNFVMPLRASNYTRKELKDIVFIGSLDYLQREWRFLWNFPQIYILPGCALYSGDLHAANIEQCSMCAVLSPPPQPSSNQTLVDTEAIMATLTIGSLQIDSSSDPSPSVSEETPGYTNGHNEKSNCRKVPILTELKNPSNIHFIEQLGGLEGSLQETNLHLSTAFSTGTVFSGSFLDSLLATLMWKLAIKGSQFQGRSSGLCWPSTIIMSWNCFRCW

SEQ ID NO: 7400 - protein, 51 aa, Homo sapiens
MIKKTEFSNVCSIFYLILQAMLKGLLQLSCPGIASDAGDRRSKFSAGTTFR

SEQ ID NO: 7401 - protein, 1628 aa, Homo sapiens
MAGVGAAALSLLLHLGALALAAGAEGGAVPREPPGQQTTAHSSVLAGNSQEQWHPLREWLGRLEAAVMELREQNKDLQTRVRQLESCECHPASPQCWGLGRAWPEGARWEPDACTACVCQDGAAHCGPQAHLPHCRGCSQNGQTYGNGETFSPDACTTCRCLEGTITCNQKPCPRGPCPEPGACCPHCKPGCDYEGQLYEEGVTFLSSSNPCLQCTCLRSRVRCMALKCPPSPCPEPVLRPGHCCPTCQGCTEGGSHWEHGQEWTTPGDPCRICRCLEGHIQCRQRECASLCPYPARPLPGTCCPVCDGCFLNGREHRSGEPVGSGDPCSHCRCANGSVQCEPLPCPPVPCRHPGKIPGQCCPVCDGCEYQGHQYQSQETFRLQERGLCVRCSCQAGEVSCEEQECPVTPCALPASGRQLCPACELDGEEFAEGVQWEPDGRPCTACVCQDGVPKCGAVLCPPAPCQHPTQPPGACCPSCDSCTYHSQVYANGQNFTDADSPCHACHCQDGTVTCSLVDCPPTTCARPQSGPGQCCPRCPDCILEEEVFVDGESFSHPRDPCQECRCQEGHAHCQPRPCPRAPCAHPLPGTCCPNDCSGCAFGGKEYPSGADFPHPSDPCRLCRCLSGNVQCLARRCVPLPCPEPVLLPGECCPQCPAAPAPAGCPRPGAAHARHQEYFSPPGDPCRRCLCLDGSVSCQRLPCPPAPCAHPRQGPCCPSCDGCLYQGKEFASGERFPSPTAACHLCLCWEGSVSCEPKACAPALCPFPARGDCCPDCDGCEYLGESYLSNQEFPDPREPCNLCTCLGGFVTCGRRPCEPPGCSHPLIPSGHCCPTCQGCRYHGVTTASGETLPDPLDPTCSLCTCQEGSMRCQKKPCPPALCPHPSPGPCFCPVCHSCLSQGREHQDGEEFEGPAGSCEWCRCQAGQVSCVRLQCPPLPCKLQVTERGSCCPRCRGCLAHGEEHPEGSRWVPPDSACSSCVCHEGVVTCARIQCISSCAQPRQGPHDCCPQCSDCEHEGRKYEPGESFQPGADPCEVCICEPQPEGPPSLRCHRRQCPSLVGCPPSQLLPPGPQHCCPTCAEALSNCSEGLLGSELAPPDPCYTCQCQDLTWLCIHQACPELSCPLSERHTPPGSCCPVCRECVVEAEGRRVADGESWRDPSNACIACTCHRGHVECHLEECQALSCPHGWAKVPQADSCCERCQAPTQSCVHQGREVASGERWTVDTCTSCSCMAGTVRCQSQRCSPLSCGPDKAPALSPGSCCPRCLPRPASCMAFGDPHYRTFDGRLLHFQGSCSYVLAKDCHSGDFSVHVTNDDRGRSGVAWTQEVAVLLGDMAVRLLQDGAVTVDGHPVALPFLQEPLLYVELRGHTVILHAQPGLQVLWDGQSQVEVSVPGSYQGRTCGLCGNFNGFAQDDLQGPEGLLLPSEAAFGNSWQVSEGLWPGRPCSAGREVDPCRAAGYRARREANARCGVLKSSPFSRCHAVVPPEPFFAACVYDLCACGPGSSADACLCDALEAYASHCRQAGVTPTWRGPTLCVVGCPLERGFVFDECGPPCPRTCFNQHIPLGELAAHCVRPCVPGCQCPAGLVEHEAHCIPPEACPQVLLTGDQPLGARPSPSREPQETP

SEQ ID NO: 7402 - protein, 1504 aa, Homo sapiens
MAGVGAAALSLLLHLGALALAAGAEGGAVPREPPGQQTTAHSSVLAGNSQEQWHPLREWLGRLEAAVMELREQNKDLQTRVRQLESCECHPASPQCWGLGRAWPEGARWEPDACTACVCQDGAAHCGPQAHLPHCRGCSQNGQTYGNGETFSPDACTTCRCLTGAVQCQGPSCSELNCLESCTPPGECCPICRCTEGGSHWEHGQEWTTPGDPCRICRCLEGHIQCRQRECASLCPYPARPLPGTCCPVCDGCFLNGREHRSGEPVGSGDPCSHCRCANGSVQCEPLPCPPVPCRHPGKIPGQCCPVCDGCEYQGHQYQSQETFRLQERGLCVRCSCQAGEVSCEEQECPVTPCALPASGRQLCPACELDGEEFAEGVQWEPDGRPCTACVCQDGVPKCGAVLCPPAPCQHPTQPPGACCPSCDSCTYHSQVYANGQNFTDADSPCHACHCQDGTVTCSLVDCPPTTCARPQSGPGQCCPRCPDCILEEEVFVDGESFSHPRDPCQECRCQEGHAHCQPRPCPRAPCAHPLPGTCCPNDCSGCAFGGKEYPSGADFPHPSDPCRLCRCLSGNVQCLARRCVPLPCPEPVLLPGECCPQCPAPAGCPRPGAAHARHQEYFSPPGDPCRRCLCLDGSVSCQRLPCPPAPCAHPRQGPCCPSCDGCLYQGKEFASGERFPSPTAACHLCLCWEGSVSCEPKACAPALCPFPARGDCCPDCDGCEYLGESYLSNQEFPDPREPCNLCTCLGGFVTCGRRPCEPPGCSHPLIPSGHCCPTCQGCRYHGVTTASGETLPDPLDPTCSLCTCQEGSMRCQKKPCPPALCPHPSPGPCFCPVCHSCLSQGREHQDGEEFEGPAGSCEWCRCQAGQVSCVRLQCPPLPCKLQVTERGSCCPRCRGCLAHGEEHPEGSRWVPPDSACSSCVCHEGVVTCARIQCISSCAQPRQGPHDCCPQCSDCEHEGRKYEPGESFQPGADPCEVCICEPQPEGPPSLRCHRRQCPSLVGCPPSQLLPPGPQHCCPTCAEALSNCSEGLLGSELAPPDPCYTCQCQDLTWLCIHQACPELSCPLSERHTPPGSCCPVCRAPTQSCVHQGREVASGERWTVDTCTSCSCMAGTVRCQSQRCSPLSCGPDKAPALSPGSCCPRCLPRPASCMAFGDPHYRTFDGRLLHFQGSCSYVLAKDCHSGDFSVHVTNDDRGRSGVAWTQEVAVLLGDMAVRLLQDGAVTVDGHPVALPFLQEPLLYVELRGHTVILHAQPGLQVLWDGQSQVEVSVPGSYQGRTCGLCGNFNGFAQDDLQGPEGLLLPSEAAFGNSWQVSEGLWPGRPCSAGREVDPCRAAGYRARREANARCGVLKSSPFSRCHAVVPPEPFFAACVYDLCACGPGSSADACLCDALEAYASHCRQAGVTPTWRGPTLCVVGCPLERGFVFDECGPPCPRTCFNQHIPLGELAAHCVRPCVPGCQCPAGLVEHEAHCIPPEACPQVLLTGDQPLGARPSPSREPQETP

SEQ ID NO: 7403 - protein, 1568 aa, Homo sapiens
MAGVGAAALSLLLHLGALALAAGAEGGAVPREPPGQQTTAHSSVLAGNSQEQWHPLREWLGRLEAAVMELREQNKDLQTRVRQLESCECHPASPQCWGLGRAWPEGARWEPDACTACVCQDGAAHCGPQAHLPHCRGCSQNGQTYGNGETFSPDACTTCRCLTGAVQCQGPSCSELNCLESCTPPGECCPICRPGCDYEGQLYEEGVTFLSSSNPCLQCTCLRSRVRCMALKCPPSPCPEPVLRPGHCCPTCQGCTEGGSHWEHGQEWTTPGDPCRICRCLEGHIQCRQRECASLCPYPARPLPGTCCPVCDGCFLNGREHRSGEPVGSGDPCSHCRCANGSVQCEPLPCPPVPCRHPGKIPGQCCPVCDGCEYQGHQYQSQETFRLQERGLCVRCSCQAGEVSCEEQECPVTPCALPASGRQLCPACELDGEEFAEGVQWEPDGRPCTACVCQDGVPKCGAVLCPPAPCQHPTQPPGACCPSCDSCTYHSQVYANGQNFTDADSPCHACHCQDGTVTCSLVDCPPTTCARPQSGPGQCCPRCPDCILEEEVFVDGESFSHPRDPCQECRCQEGHAHCQPRPCPRAPCAHPLPGTCCPNDCSGCAFGGKEYPSGADFPHPSDPCRLCRCLSGNVQCLARRCVPLPCPEPVLLPGECCPQCPAAPAPAGCPRPGAAHARHQEYFSPPGDPCRRCLCLDGSVSCQRLPCPPAPCAHPRQGPCCPSCDGCLYQGKEFASGERFPSPTAACHLCLCWEGSVSCEPKACAPALCPFPARGDCCPDCDGCEYLGESYLSNQEFPDPREPCNLCTCLGGFVTCGRRPCEPPGCSHPLIPSGHCCPTCQGCRYHGVTTASGETLPDPLDPTCSLCTCQEGSMRCQKKPCPPALCPHPSPGPCFCPVCHSCLSQGREHQDGEEFEGPAGSCEWCRCQAGQVSCVRLQCPPLPCKLQVTERGSCCPRCRGCLAHGEEHPEGSRWVPPDSACSSCVCHEGVVTCARIQCISSCAQPRQGPHDCCPQCSDCEHEGRKYEPGESFQPGADPCEVCICEPQPEGPPSLRCHRRQCPSLVGCPPSQLLPPGPQHCCPTCAEALSNCSEGLLGSELAPPDPCYTCQCQDLTWLCIHQACPELSCPLSERHTPPGSCCPVCRAPTQSCVHQGREVASGERWTVDTCTSCSCMAGTVRCQSQRCSPLSCGPDKAPALSPGSCCPRCLPRPASCMAFGDPHYRTFDGRLLHFQGSCSYVLAKDCHSGDFSVHVTNDDRGRSGVAWTQEVAVLLGDMAVRLLQDGAVTVDGHPVALPFLQEPLLYVELRGHTVILHAQPGLQVLWDGQSQVEVSVPGSYQGRTCGLCGNFNGFAQDDLQGPEGLLLPSEAAFGNSWQVSEGLWPGRPCSAGREVDPCRAAGYRARREANARCGVLKSSPFSRCHAVVPPEPFFAACVYDLCACGPGSSADACLCDALEAYASHCRQAGVTPTWRGPTLCVVGCPLERGFVFDECGPPCPRTCFNQHIPLGELAAHCVRPCVPGCQCPAGLVEHEAHCIPPEACPQVLLTGDQPLGARPSPSREPQETP

SEQ ID NO: 7404 - protein, 1275 aa, Homo sapiens
MAGVGAAALSLLLHLGALALAAGAEGGAVPREPPGQQTTAHSSVLAGNSQEQWHPLREWLGRLEAAVMELREQNKDLQTRVRQLESCECHPASPQCWGLGRAWPEGARWEPDACTACVCQDGAAHCGPQAHLPHCRGCSQNGQTYGNGETFSPDACTTCRCLTGAVQCQGPSCSELNCLESCTPPGECCPICRPGCDYEGQLYEEGVTFLSSSNPCLQCTCLRSRVRCMALKCPPSPCPEPVLRPGHCCPTCQGCTEGGSHWEHGQEWTTPGDPCRICRCLEGHIQCRQRECASLCPYPARPLPGTCCPVCDGCFLNGREHRSGEPVGSGDPCSHCRCANGSVQCEPLPCPPVPCRHPGKIPGQCCPVCDGCEYQGHQYQSQETFRLQERGLCVRCSCQAGEVSCEEQECPVTPCALPASGRQLCPACELDGEEFAEGVQWEPDGRPCTACVCQDGVPKCGAVLCPPAPCQHPTQPPGACCPSCDSCTYHSQVYANGQNFTDADSPCHACHCQDGTVTCSLVDCPPTTCARPQSGPGQCCPRCPDCILEEEVFVDGESFSHPRDPCQECRCQEGHAHCQPRPCPRAPCAHPLPGTCCPNDCSGCAFGGKEYPSGADFPHPSDPCRLCRCLSGNVQCLARRCVPLPCPEPVLLPGECCPQCPAAPAPAGCPRPGAAHARHQEYFSPPGDPCRRCLCLDGSVSCQRLPCPPAPCAHPRQGPCCPSCDGCLYQGKEFASGERFPSPTAACHLCLCWEGSVSCEPKACAPALCPFPARGDCCPDCDGCEYLGESYLSNQEFPDPREPCNLCTCLGGFVTCGRRPCEPPGCSHPLIPSGHCCPTCQGCRYHGVTTASGETLPDPLDPTCSLCTCQEGSMRCQKKPCPPALCPHPSPGPCFCPVCHSCLSQGREHQDGEEFEGPAGSCEWCRCQAGQVSCVRLQCPPLPCKLQVTERGSCCPRCRGCLAHGEEHPEGSRWVPPDSACSSCVCHEGVVTCARIQCISSCAQPRQGPHDCCPQCSDCEHEGRKYEPGESFQPGADPCEVCICEPQPEGPPSLRCHRRQCPSLVGCPPSQLLPPGPQHCCPTCAEALSNCSEGLLGSELAPPDPCYTCQCQDLTWLCIHQACPELSCPLSERHTPPGSCCPVCRAPTQSCVHQGREVASGERWTVDTCTSCSCMAGTVRCQSQRCSPLSCGPDKAPALSPGSCCPRCLPRPASCMAFGDPHYRTFDGRLLHFQGSCSYVLAKDCHSGDFRWMGTRWPCPSCRSRCCMWSCEDTL

SEQ ID NO: 7405 - protein, 502 aa, Homo sapiens
MFGTLLLYCFFLATVPALAETGGERQLSPEKSEIWGPGLKADVVLPARYFYIQAVDTSGNKFTSSPGEKVFQVKVSAPEEQFTRVGVQVLDRKDGSFIVRYRMYASYKNLKVEIKFQGQHVAKSPYILKGPVYHENCDCPLQDSAAWLREMNCPETIAQIQRDLAHFPAVDPEKIAVEIPKRFGQRQSLCHYTLKDNKVYIKTHGEHVGFRIFMDAILLSLTRKVKMPDVELFVNLGDWPLEKKKSNSNIHPIFSWCGSTDSKDIVMPTYDLTDSVLETMGRVSLDMMSVQANTGPPWESKNSTAVWRGRDSRKERLELVKLSRKHPELIDAAFTNFFFFKHDENLYGPIVKHISFFDFFKHKYQINIDGTVAAYRLPYLLVGDSVVLKQDSIYYEHFYNELQPWKHYIPVKSNLSDLLEKLKWAKDHDEEAKKIAKAGQEFARNNLMGDDIFCYYFKLFQEYANLQVSEPQIREGMKRVEPQTEDDLFPCTCHRKKTKDEL

SEQ ID NO: 7406 - protein, 507 aa, Homo sapiens
MRRLPRALLLQLRLALLVAAGAPEVLVSAPRSLVWGPGLQAAVVLPVRYFYLQAVNSEGQNLTRSPAGETPFKVVVKSLSPKELVRIHVPKPLDRNDGTFLMRYRMYETVDEGLKIEVLYGDEHVAQSPYILKGPVYHEYCECPEDPQAWQKTLSCPTKEPQIAKDFASFPSINLQQMLKEVPKRFGDERGAIVHYTILNNHVYRRSLGKYTDFKMFSDEILLSLTRKVLLPDLEFYVNLGDWPLEHRKVNGTPSPIPIISWCGSLDSRDVVLPTYDITHSMLEAMRGVTNDLLSIQGNTGPSWINKTERAFFRGRDSREERLQLVQLSKENPQLLDAGITGYFFFQEKEKELGKAKLMGFFDFFKYKYQVNVDGTVAAYRYPYLMLGDSLVLKQDSPYYEHFYMALEPWKHYVPIKRNLSDLLEKVKWAKENDEEAKKIAKEGQLMARDLLQPHRLYCYYYQVLQKYAERQSSKPEVRDGMELVPQPEDSTAICQCHRKKPSREEL

SEQ ID NO: 7407 - protein, 451 aa, Homo sapiens
MVELFIFLFLLGETPFKVVVKSLSPKELVRIHVPKPLDRNDGTFLMRYRMYETVDEGLKIEVLYGDEHVAQSPYILKGPVYHEYCECPEDPQAWQKTLSCPTKEPQIAKDFASFPSINLQQMLKEVPKRFGDERGAIVHYTILNNHVYRRSLGKYTDFKMFSDEILLSLTRKVLLPDLEFYVNLGDWPLEHRKVNGTPSPIPIISWCGSLDSRDVVLPTYDITHSMLEAMRGVTNDLLSIQGNTGPSWINKTERAFFRGRDSREERLQLVQLSKENPQLLDAGITGYFFFQEKEKELGKAKLMGFFDFFKYKYQVNVDGTVAAYRYPYLMLGDSLVLKQDSPYYEHFYMALEPWKHYVPIKRNLSDLLEKVKWAKENDEEAKKIAKEGQLMARDLLQPHRLYCYYYQVLQKYAERQSSKPEVRDGMELVPQPEDSTAICQCHRKKPSREEL

SEQ ID NO: 7408 - protein, 409 aa, Homo sapiens
MVELFIFLFLLGETPFKVVVKSLSPKELVRIHVPKPLDRNDGTFLMRYRMYETVDEGLKIEVLYGDEHVAQSPYILKGPVYHEYCECPEDPQAWQKTLSCPTKEPQIAKDFASFPSINLQQMLKEVPKRFGDERGAIVHYTILNNHVYRRSLGKYTDFKMFSDEILLSLTRKVLLPDLEFYVNLGDWPLEHRKVNGTPSPIPIISWCGSLDSRDVVLPTYDITHSMLEAMRGVTNDLLSIQGNTGPSWINKTERAFFRGRDSREERLQLVQLSKENPQLLDAGITGYFFFQEKEKELGKAKLMGFFDFFKYKYQVNVDGTVAAYRYPYLMLGDSLVLKQDSPYYEHFYMALEPWKHYVPIKRNLSDLLEKVKWAKSFTLSPRLECSGTISTHCNLCLPGSRNFVPQPPE

SEQ ID NO: 7409 - protein, 160 aa, Homo sapiens
  SITE 1: note = misc_feature - Xaa can be any naturally occurring amino acid
XEAMRGVTNDLLSIQGNTGPSWINKTERAFFRGRDSREERLQLVQLSKENPQLLDAGITGYFFFQEKEKELGKAKLMGFFDFFKENDEEAKKIAKEGQLMARDLLQPHRLYCYYYQVLQKYAERQSSKPEVRDGMELVPQPEDSTAICQCHRKKPSREEL

SEQ ID NO: 7410 - protein, 302 aa, Homo sapiens [sequence omitted]

SEQ ID NO: 7411 - protein, 876 aa, Homo sapiens
MLSGKKAAAAAAAAAAAATGTEAGPGTAGGSENGSEVAAQPAGLSGPAEVGPGAVGERTPRKKEPPRASPPGGLAEPPGSAGPQAGPTVVPGSATPMETGIAETPEGRRTSRRKRAKVEYREMDESLANLSEDEYYSEEERNAKAEKEKKLPPPPPQAPPEEENESEPEEPSGQAGGLQDDSSGGYGDGQASGVEGAAFQSRLPHDRMTSQEAACFPDIISGPQQTQKVFLFIRNRTLQLWLDNPKIQLTFEATLQQLEAPYNSDTVLVHRVHSYLERHGLINFGIYKRIKPLPTKKTGKVIIIGSGVSGLAAARQLQSFGMDVTLLEARDRVGGRVATFRKGNYVADLGAMVVTGLGGNPMAVVSKQVNMELAKIKQKCPLYEANGQADTVKVPKEKDEMVEQEFNRLLEATSYLSHQLDFNVLNNKPVSLGQALEVVIQLQEKHVKDEQIEHWKKIVKTQEELKELLNKMVNLKEKIKELHQQYKEASEVKPPRDITAEFLVKSKHRDLTALCKEYDELAETQGKLEEKLQELEANPPSDVYLSSRDRQILDWHFANLEFANATPLSTLSLKHWDQDDDFEFTGSHLTVRNGYSCVPVALAEGLDIKLNTAVRQVRYTASGCEVIAVNTRSTSQTFIYKCDAVLCTLPLGVLKQQPPAVQFVPPLPEWKTSAVQRMGFGNLNKVVLCFDRVFWDPSVNLFGHVGSTTASRGELFLFWNLYKAPILLALVAGEAAGIMENISDDVIVGRCLAILKGIFGSSAVPQPKETVVSRWRADPWARGSYSYVAAGSSGNDYDLMAQPITPGPSIPGAPQPIPRLFFAGEHTIRNYPATVHGALLSGLREAGRIADQFLGAMYTLPRQATPGVPAQQSPSM

SEQ ID NO: 7412 - protein, 852 aa, Homo sapiens
MLSGKKAAAAAAAAAAAATGTEAGPGTAGGSENGSEVAAQPAGLSGPAEVGPGAVGERTPRKKEPPRASPPGGLAEPPGSAGPQAGPTVVPGSATPMETGIAETPEGRRTSRRKRAKVEYREMDESLANLSEDEYYSEEERNAKAEKEKKLPPPPPQAPPEEENESEPEEPSGVEGAAFQSRLPHDRMTSQEAACFPDIISGPQQTQKVFLFIRNRTLQLWLDNPKIQLTFEATLQQLEAPYNSDTVLVHRVHSYLERHGLINFGIYKRIKPLPTKKTGKVIIIGSGVSGLAAARQLQSFGMDVTLLEARDRVGGRVATFRKGNYVADLGAMVVTGLGGNPMAVVSKQVNMELAKIKQKCPLYEANGQAVPKEKDEMVEQEFNRLLEATSYLSHQLDFNVLNNKPVSLGQALEVVIQLQEKHVKDEQIEHWKKIVKTQEELKELLNKMVNLKEKIKELHQQYKEASEVKPPRDITAEFLVKSKHRDLTALCKEYDELAETQGKLEEKLQELEANPPSDVYLSSRDRQILDWHFANLEFANATPLSTLSLKHWDQDDDFEFTGSHLTVRNGYSCVPVALAEGLDIKLNTAVRQVRYTASGCEVIAVNTRSTSQTFIYKCDAVLCTLPLGVLKQQPPAVQFVPPLPEWKTSAVQRMGFGNLNKVVLCFDRVFWDPSVNLFGHVGSTTASRGELFLFWNLYKAPILLALVAGEAAGIMENISDDVIVGRCLAILKGIFGSSAVPQPKETVVSRWRADPWARGSYSYVAAGSSGNDYDLMAQPITPGPSIPGAPQPIPRLFFAGEHTIRNYPATVHGALLSGLREAGRIADQFLGAMYTLPRQATPGVPAQQSPSM

SEQ ID NO: 7413 - protein, 858 aa, Homo sapiens
MLSGKKAAAAAAAAAAAATGTEAGPGTAGGSENGSEVAAQPAGLSGPAEVGPGAVGERTPRKKEPPRASPPGGLAEPPGSAGPQAGPTVVPGSATPMETGIAETPEGRRTSRRKRAKVEYREMDESLANLSEDEYYSEEERNAKAEKEKKLPPPPPQAPPEEENESEPEEPSGVEGAAFQSRLPHDRMTSQEAACFPDIISGPQQTQKVFLFIRNRTLQLWLDNPKIQLTFEATLQQLEAPYNSDTVLVHRVHSYLERHGLINFGIYKRIKPLPTKKTGKVIIIGSGVSGLAAARQLQSFGMDVTLLEARDRVGGRVATFRKGNYVADLGAMVVTGLGGNPMAVVSKQVNMELAKIKQKCPLYEANGQAVPKEKDEMVEQEFNRLLEATSYLSHQLDFNVLNNKPVSLGQALEVVIQLQEKHVKDEQIEHWKKIVKTQEELKELLNKMVNLKEKIKELHQQYKEASEVKPPRDITAEFLVKSKHRDLTALCKEYDELAETQGKLEEKLQELEANPPSPLFFCSDVYLSSRDRQILDWHFANLEFANATPLSTLSLKHWDQDDDFEFTGSHLTVRNGYSCVPVALAEGLDIKLNTAVRQVRYTASGCEVIAVNTRSTSQTFIYKCDAVLCTLPLGVLKQQPPAVQFVPPLPEWKTSAVQRMGFGNLNKVVLCFDRVFWDPSVNLFGHVGSTTASRGELFLFWNLYKAPILLALVAGEAAGIMENISDDVIVGRCLAILKGIFGSSAVPQPKETVVSRWRADPWARGSYSYVAAGSSGNDYDLMAQPITPGPSIPGAPQPIPRLFFAGEHTIRNYPATVHGALLSGLREAGRIADQFLGAMYTLPRQATPGVPAQQSPSM

SEQ ID NO: 7414 - protein, 274 aa, Homo sapiens
IFVEFDGCNWKQHSWVKVHAEEVIVLLLEGSLVWAPREDPVLLQGIRVSIAQWPALTFTPLVDKLGLGSVVPVEYLLDRELRFLSDANGLHLFQMGTDSQNQILLEHAALRETVNALISDQKLQEIFSRGPYSVQGHRVKIYQPEGEEGWLYGVVSHQDSITRLMEVSVTESGEIKSVDPRLIHVMLMDNSAPQSEGGTLKAVKSSKGKKKRESIEGKDGRRRKSASDSGCDPASKKLKGDRGEVDSNGSDGDKPQHSLCHLHQRKRQDSGGAG

SEQ ID NO: 7415 - protein, 1761 aa, Homo sapiens
MADAAASPVGKRLLLLFADTAASASASAPAAAAASGDPGPALRTRAWRAGTVRAMSGAVPQDLAIFVEFDGCNWKQHSWVKVHAEEVIVLLLEGSLVWAPREDPVLLQGIRVSIAQWPALTFTPLVDKLGLGSVVPVEYLLDRELRFLSDANGLHLFQMGTDSQNQILLEHAALRETVNALISDQKLQEIFSRGPYSVQGHRVKIYQPEGEEGWLYGVVSHQDSITRLMEVSVTESGEIKSVDPRLIHVMLMDNSAPQSEGGTLKAVKSSKGKKKRESIEGKDGRRRKSASDSGCDPASKKLKGDRGEVDSNGSDGGEASRGPWKGGNASGEPGLDQRAKQPPSTFVPQINRNIRFATYTKENGRTLVVQDEPVGGDTPASFTPYSTATGQTPLAPEVGGAENKEAGKTLEQVGQGIVASAAVVTTASSTPNTVRISDTGLAAGTVPEKQKGSRSQASGENSRNSILASSGFGAPLPSSSQPLTFGSGRSQSNGVLATENKPLGFSFGCSSAQEAQKDTDLSKNLFFQCMSQTLPTSNYFTTVSESLADDSSSRDSFKQSLESLSSGLCKGRSVLGTDTKPGSKAGSSVDRKVPAESMPTLTPAFPRSLLNARTPENHENLFLQPPKLSREEPSNPFLAFVEKVEHSPFSSFASQASGSSSSATTVTSKVAPSWPESHSSADSASLAKKKPLFITTDSSKLVSGVLGSALTSGGPSLSAMGNGRSSSPTSSLTQPIEMPTLSSSPTEERPTVGPGQQDNPLLKTFSNVFGRHSGGFLSSPADFSQENKAPFEAVKRFSLDERSLACRQDSDSSTNSDLSDLSDSEEQLQAKTGLKGIPEHLMGKLGPNGERSAELLLGKSKGKQAPKGRPRTAPLKVGQSVLKDVSKVKKLKQSGEPFLQDGSCINVAPHLHKCRECRLERYRKFKEQEQDDSTVACRFFHFRRLIFTRKGVLRVEGFLSPQQSDPDAMNLWIPSSSLAEGIDLETSKYILANVGDQFCQLVMSEKEAMMMVEPHQKVAWKRAVRGVREMCDVCETTLFNIHWVCRKCGFGVCLDCYRLRKSRPRSETEEMGDEEVFSWLKCAKGQSHEPENLMPTQIIPGTALYNIGDMVHAARGKWGIKANCPCISRQNKSVLRPAVTNGMSQLPSINPSASSGNETTFSGGGGPAPVTTPEPDHVPKADSTDIRSEEPLKTDSSASNSNSELKAIRPPCPDTAPPSSALHWLADLATQKAKEETKEAGSLRSVLNKESHSPFGLDSFNSTAKVSPLTPKLFNSLLLGPTASNNKTEGSSLRDLLHSGPGKLPQTPLDTGIPFPPVFSTSSAGVKSKASLPNFLDHIIASVVENKKTSDASKRACNLTDTQKEVKEMVMGLNVLDPHTSHSWLCDGRLLCLHDPSNKNNWKIFRECWKQGQPVLVSGVHKKLKSELWKPEAFSQEFGDQDVDLVNCRNCAIISDVKVRDFWDGFEIICKRLRSEDGQPMVLKLKDWPPGEDFRDMMPTRFEDLMENLPLPEYTKRDGRLNLASRLPSYFVRPDLGPKMYNAYGLITAEDRRVGTTNLHLDVSDAVNVMVYVGIPIGEGAHDEEVLKTIDEGDADEVTKQRIHDGKEKPGALWHIYAAKDAEKIRELLRKVGEEQGQENPPDHDPIHDQSWYLDQTLRKRLYEEYGVQGWAIVQFLGDAVFIPAGAPHQVHNLYSCIKVAEDFVSPEHVKHCFRLTQEFRHLSNTHTNHEDKLQVKNIIYHAVKDAVGTLKAHESKLARS

SEQ ID NO: 7416 - protein, 759 aa, Homo sapiens
MSEKEAMMMVEPHQKVAWKRAVRGVREMCDVCETTLFNIHWVCRKCGFGVCLDCYRLRKSRPRSETEEMGDEEVFSWLKCAKGQSHEPENLMPTQIIPGTALYNIGDMVHAARGKWGIKANCPCISRQNKSVLRPAVTNGMSQLPSINPSASSGNETTFSGGGGPAPVTTPEPDHVPKADSTDIRSEEPLKTDSSASNSNSELKAIRPPCPDTAPPSSALHWLADLATQKAKEETKEAGSLRSVLNKESHSPFGLDSFNSTAKVSPLTPKLFNSLLLGPTASNNKTEGSSLRDLLHSGPGKLPQTPLDTGIPFPPVFSTSSAGVKSKASLPNFLDHIIASVVENKKTSDASKRACNLTDTQKEVKEMVMGLNVLDPHTSHSWLCDGRLLCLHDPSNKNNWKIFRECWKQGQPVLVSGVHKKLKSELWKPEAFSQEFGDQDVDLVNCRNCAIISDVKVRDFWDGFEIICKRLRSEDGQPMVLKLKDWPPGEDFRDMMPTRFEDLMENLPLPEYTKRDGRLNLASRLPSYFVRPDLGPKMYNAYGLITAEDRRVGTTNLHLDVSDAVNVMVYVGIPIGEGAHDEEVLKTIDEGDADEVTKQRIHDGKEKPGALWHIYAAKDAEKIRELLRKVGEEQGQENPPDHDPIHDQSWYLDQTLRKRLYEEYGVQGWAIVQFLGDAVFIPAGAPHQVHNLYSCIKVAEDFVSPEHVKHCFRLTQEFRHLSNTHTNHEDKLQVKNIIYHAVKDAVGTLKAHESKLARS

SEQ ID NO: 7417 - protein, 20 aa, Homo sapiens
VPEKQKGSRSQASGELASQC

SEQ ID NO: 7418 - protein, 1384 aa, Homo sapiens
MAAGKASGESEEASPSLTAEEREALGGLDSRLFGFVRFHEDGARTKALLGKAVRCYESLILKAEGKVESDFFCQLGHFNLLLEDYPKALSAYQRYYSLQSDYWKNAAFLYGLGLVYFHYNAFQWAIKAFQEVLYVDPSFCRAKEIHLRLGLMFKVNTDYESSLKHFQLALVDCNPCTLSNAEIQFHIAHLYETQRKYHSAKEAYEQLLQTENLSAQVKATVLQQLGWMHHTVDLLGDKATKESYAIQYLQKSLEADPNSGQSWYFLGRCYSSIGKVQDAFISYRQSIDKSEASADTWCSIGVLYQQQNQPMDALQAYICAVQLDHGHAAAWMDLGTLYESCNQPQDAIKCYLNATRSKSCSNTSALAARIKYLQACKPHHPNTEPVLGLSQTPISQQSLPLHMIPSSQVDDLSSPAKRKRTSSPTKNTSDNWSGGHAVSHPPVQQQAHSWCLTPQKLQHLEQLRANRNNLNPAQKLMLEQLESQFVLMQQHQMRPTGVAQVRSTGIPNGPTADSSLPTNSVSGQQPQLALTRVPSVSQPGVRPACPGQPLANGPFSAGHVPCSTSRTLGSTDTILIGNNHITGSGSNGNVPYLQRNALTLPHNRTNLTSSAEEPWKNQLSNSTQGLHKGQSSHSAGPNGERPLSSTGPSQHLQAAGSGIQNQNGHPTLPSNSVTQGAALNHLSSHTATSGGQQGITLTKESKPSGNILTVPETSRHTGETPNSTASVEGLPNHVHQMTADAVCSPSHGDSKSPGLLSSDNPQLSALLMGKANNNVGTGTCDKVNNIHPAVHTKTDNSVASSPSSAISTATPSPKSTEQTTTNSVTSLNSPHSGLHTINGEGMEESQSPMKTDLLLVNHKPSPQIIPSMSVSIYPSSAEVLKACRNLGKNGLSNSSILLDKCPPPRPPSSPYPPLPKDKLNPPTPSIYLENKRDAFFPPLHQFCTNPNNPVTVIRGLAGALKLDLGLFSTKTLVEANNEHMVEVRTQLLQPADENWDPTGTKKIWHCESNRSHTTIAKYAQYQASSFQESLREENEKRSHHKDHSDSESTSSDNSGRRRKGPFKTIKFGTNIDLSDDKKWKLQLHELTKLPAFVRVVSAGNLLSHVGHTILGMNTVQLYMKVPGSRTPGHQENNNFCSVNINIGPGDCEWFVVPEGYWGVLNDFCEKNNLNFLMGSWWPNLEDLYEANVPVYRFIQRPGDLVWINAGTVHWVQAIGWCNNIAWNVGPLTACQYKLAVERYEWNKLQSVKSIVPMVHLSWNMARNIKVSDPKLFEMIKYCLLRTLKQCQTLREALIAAGKEIIWHGRTKEEPAHYCSICEVEVFDLLFVTNESNSRKTYIVHCQDCARKTSGNLENFVVLEQYKMEDLMQVYDQFTLAPPLPSASS

SEQ ID NO: 7419 - protein, 1269 aa, Homo sapiens
MAAGKASGESEEASPSLTAEEREALGGLDSRLFGFVRFHEDGARTKALLGKAVRCYESLILKAEGKVESDFFCQLGHFNLLLEDYPKALSAYQRYYSLQSDYWKNAAFLYGLGLVYFHYNAFQWAIKAFQEVLYVDPSFCRAKEIHLRLGLMFKVNTDYESSLKHFQLALVDCNPCTLSNAEIQFHIAHLYETQRKYHSAKEAYEQLLQTENLSAQVKATVLQQLGWMHHTVDLLGDKATKESYAIQYLQKSLEADPNSGQSWYFLGRCYSSIGKVQDAFISYRQSIDKSEASADTWCSIGVLYQQQNQPMDALQAYICAVQLDHGHAAAWMDLGTLYESCNQPQDAIKCYLNATRSKSCSNTSALAARIKYLQACKPHHPNTEPVLGLSQTPISQQSLPLHMIPSSQVDDLSSPAKRKRTSSPTKNTSDNWSGGHAVSHPPVQQQAHSWCLTPQKLQMRPTGVAQVRSTGIPNGPTADSSLPTNSVSGQQPQLALTRVPSVSQPGVRPACPGQPLANGPFSAGHVPCSTSRTLGSTDTILIGNNHITGSGSNGNVPYLQRNALTLPHNRTNLTSSAEEPWKNQLSNSTQGLHKGQSSHSAGPNGERPLSSTGPSQHLQAAGSGIQNQNGHPTLPSNSVTQGAALNHLSSHTATSGGQQGITLTKESKPSGNILTVPETSRHTGETPNSTASVEGLPNHVHQMTADAVCSPSHGDSKSPGLLSSDNPQLSALLMGKANNNVGTGTCDKVNNIHPAVHTKTDNSVASSPSSAISTATPSPKSTEQTTTNSVTSLNSPHSGLHTINGEGMEESQSPMKTDLLLVNHKPSPQIIPSMSVSIYPSSAEVLKACRNLGKNGLSNSSILLDKCPPPRPPSSPYPPLPKDKLNPPTPSIYLENKRDAFFPPLHQFCTNPNNPVTVIRGLAGALKLDLGLFSTKTLVEANNEHMVEVRTQLLQPADENWDPTGTKKIWHCESNRSHTTIAKYAQYQASSFQESLREENEKRSHHKDHSDSESTSSDNSGRRRKGPFKTIKFGTNIDLSDDKKWKLQLHELTKLPAFVRVVSAGNLLSHVGHTILGMNTVQLYMKVPGSRTPGHQENNNFCSVNINIGPGDCEWFVVPEGYWGVLNDFCEKNNLNFLMGSWWPNLEDLYEANVPVYRFIQRPGDLVWINAGTVHWVQAIGWCNNIAWNVGPLTACQYKLAVERYEWNKLQSVKSIVPMVHLSWNMARNIKVLSSKNSEAMSDIEGSSHCCRKRDYMAWADKRRTSSLL

SEQ ID NO: 7420 - protein, 1332 aa, Homo sapiens
MAAGKASGESEEASPSLTAEEREALGGLDSRLFGFVRFHEDGARTKALLGKAVRCYESLILKAEGKVESDFFCQLGHFNLLLEDYPKALSAYQRYYSLQSDYWKNAAFLYGLGLVYFHYNAFQWAIKAFQEVLYVDPSFCRAKEIHLRLGLMFKVNTDYESSLKHFQLALVDCNPCTLSNAEIQFHIAHLYETQRKYHSAKEAYEQLLQTENLSAQVKATVLQQLGWMHHTVDLLGDKATKESYAIQYLQKSLEADPNSGQSWYFLGRCYSSIGKVQDAFISYRQSIDKSEASADTWCSIGVLYQQQNQPMDALQAYICAVQLDHGHAAAWMDLGTLYESCNQPQDAIKCYLNATRSKSCSNTSALAARIKYLQNTSDNWSGGHAVSHPPVQQQAHSWCLTPQKLQHLEQLRANRNNLNPAQKLMLEQLESQFVLMQQHQMRPTGVAQVRSTGIPNGPTADSSLPTNSVSGQQPQLALTRVPSVSQPGVRPACPGQPLANGPFSAGHVPCSTSRTLGSTDTILIGNNHITGSGSNGNVPYLQRNALTLPHNRTNLTSSAEEPWKNQLSNSTQGLHKGQSSHSAGPNGERPLSSTGPSQHLQAAGSGIQNQNGHPTLPSNSVTQGAALNHLSSHTATSGGQQGITLTKESKPSGNILTVPETSRHTGETPNSTASVEGLPNHVHQMTADAVCSPSHGDSKSPGLLSSDNPQLSALLMGKANNNVGTGTCDKVNNIHPAVHTKTDNSVASSPSSAISTATPSPKSTEQTTTNSVTSLNSPHSGLHTINGEGMEESQSPMKTDLLLVNHKPSPQIIPSMSVSIYPSSAEVLKACRNLGKNGLSNSSILLDKCPPPRPPSSPYPPLPKDKLNPPTPSIYLENKRDAFFPPLHQFCTNPNNPVTVIRGLAGALKLDLGLFSTKTLVEANNEHMVEVRTQLLQPADENWDPTGTKKIWHCESNRSHTTIAKYAQYQASSFQESLREENEKRSHHKDHSDSESTSSDNSGRRRKGPFKTIKFGTNIDLSDDKKWKLQLHELTKLPAFVRVVSAGNLLSHVGHTILGMNTVQLYMKVPGSRTPGHQENNNFCSVNINIGPGDCEWFVVPEGYWGVLNDFCEKNNLNFLMGSWWPNLEDLYEANVPVYRFIQRPGDLVWINAGTVHWVQAIGWCNNIAWNVGPLTACQYKLAVERYEWNKLQSVKSIVPMVHLSWNMARNIKVSDPKLFEMIKYCLLRTLKQCQTLREALIAAGKEIIWHGRTKEEPAHYCSICEVEVFDLLFVTNESNSRKTYIVHCQDCARKTSGNLENFVVLEQYKMEDLMQVYDQFTLAPPLPSASS

SEQ ID NO: 7421 - protein, 1429 aa, Homo sapiens
MAAGKASGESEEASPSLTAEEREALGGLDSRLFGFVRFHEDGARTKALLGKAVRCYESLILKAEGKVESDFFCQLGHFNLLLEDYPKALSAYQRYYSLQSDYWKNAAFLYGLGLVYFHYNAFQWAIKAFQEVLYVDPSFCRAKEIHLRLGLMFKVNTDYESSLKHFQLALVDCNPCTLSNAEIQFHIAHLYETQRKYHSAKEAYEQLLQTENLSAQVKATVLQQLGWMHHTVDLLGDKATKESYAIQYLQKSLEADPNSGQSWYFLGRCYSSIGKVQDAFISYRQSIDKSEASADTWCSIGVLYQQQNQPMDALQAYICAVQLDHGHAAAWMDLGTLYESCNQPQDAIKCYLNATRSKSCSNTSALAARIKYLQAQLCNLPQGSLQNKTKLLPSIEEAWSLPIPAELTSRQGAMNTAQQACKPHHPNTEPVLGLSQTPISQQSLPLHMIPSSQVDDLSSPAKRKRTSSPTKNTSDNWSGGHAVSHPPVQQQAHSWCLTPQKLQHLEQLRANRNNLNPAQKLMLEQLESQFVLMQQHQMRPTGVAQVRSTGIPNGPTADSSLPTNSVSGQQPQLALTRVPSVSQPGVRPACPGQPLANGPFSAGHVPCSTSRTLGSTDTILIGNNHITGSGSNGNVPYLQRNALTLPHNRTNLTSSAEEPWKNQLSNSTQGLHKGQSSHSAGPNGERPLSSTGPSQHLQAAGSGIQNQNGHPTLPSNSVTQGAALNHLSSHTATSGGQQGITLTKESKPSGNILTVPETSRHTGETPNSTASVEGLPNHVHQMTADAVCSPSHGDSKSPGLLSSDNPQLSALLMGKANNNVGTGTCDKVNNIHPAVHTKTDNSVASSPSSAISTATPSPKSTEQTTTNSVTSLNSPHSGLHTINGEGMEESQSPMKTDLLLVNHKPSPQIIPSMSVSIYPSSAEVLKACRNLGKNGLSNSSILLDKCPPPRPPSSPYPPLPKDKLNPPTPSIYLENKRDAFFPPLHQFCTNPNNPVTVIRGLAGALKLDLGLFSTKTLVEANNEHMVEVRTQLLQPADENWDPTGTKKIWHCESNRSHTTIAKYAQYQASSFQESLREENEKRSHHKDHSDSESTSSDNSGRRRKGPFKTIKFGTNIDLSDDKKWKLQLHELTKLPAFVRVVSAGNLLSHVGHTILGMNTVQLYMKVPGSRTPGHQENNNFCSVNINIGPGDCEWFVVPEGYWGVLNDFCEKNNLNFLMGSWWPNLEDLYEANVPVYRFIQRPGDLVWINAGTVHWVQAIGWCNNIAWNVGPLTACQYKLAVERYEWNKLQSVKSIVPMVHLSWNMARNIKVSDPKLFEMIKYCLLRTLKQCQTLREALIAAGKEIIWHGRTKEEPAHYCSICEVEVFDLLFVTNESNSRKTYIVHCQDCARKTSGNLENFVVLEQYKMEDLMQVYDQFTLAPPLPSASS

SEQ ID NO: 7422 - protein, 1401 aa, Homo sapiens
MKSCGVSLATAAAAAAAFGDEEKKMAAGKASGESEEASPSLTAEEREALGGLDSRLFGFVRFHEDGARTKALLGKAVRCYESLILKAEGKVESDFFCQLGHFNLLLEDYPKALSAYQRYYSLQSDYWKNAAFLYGLGLVYFHYNAFQWAIKAFQEVLYVDPSFCRAKEIHLRLGLMFKVNTDYESSLKHFQLALVDCNPCTLSNAEIQFHIAHLYETQRKYHSAKEAYEQLLQTENLSAQVKATVLQQLGWMHHTVDLLGDKATKESYAIQYLQKSLEADPNSGQSWYFLGRCYSSIGKVQDAFISYRQSIDKSEASADTWCSIGVLYQQQNQPMDALQAYICAVQLDHGHAAAWMDLGTLYESCNQPQDAIKCYLNATRSKSCSNTSALAARIKYLQAQLCNLPQGSLQNKTKLLPSIEEAWSLPIPAELTSRQGAMNTAQQNTSDNWSGGHAVSHPPVQQQAHSWCLTPQKLQHLEQLRANRNNLNPAQKLMLEQLESQFVLMQQHQMRPTGVAQVRSTGIPNGPTADSSLPTNSVSGQQPQLALTRVPSVSQPGVRPACPGQPLANGPFSAGHVPCSTSRTLGSTDTILIGNNHITGSGSNGNVPYLQRNALTLPHNRTNLTSSAEEPWKNQLSNSTQGLHKGQSSHSAGPNGERPLSSTGPSQHLQAAGSGIQNQNGHPTLPSNSVTQGAALNHLSSHTATSGGQQGITLTKESKPSGNILTVPETSRHTGETPNSTASVEGLPNHVHQMTADAVCSPSHGDSKSPGLLSSDNPQLSALLMGKANNNVGTGTCDKVNNIHPAVHTKTDNSVASSPSSAISTATPSPKSTEQTTTNSVTSLNSPHSGLHTINGEGMEESQSPMKTDLLLVNHKPSPQIIPSMSVSIYPSSAEVLKACRNLGKNGLSNSSILLDKCPPPRPPSSPYPPLPKDKLNPPTPSIYLENKRDAFFPPLHQFCTNPNNPVTVIRGLAGALKLDLGLFSTKTLVEANNEHMVEVRTQLLQPADENWDPTGTKKIWHCESNRSHTTIAKYAQYQASSFQESLREENEKRSHHKDHSDSESTSSDNSGRRRKGPFKTIKFGTNIDLSDDKKWKLQLHELTKLPAFVRVVSAGNLLSHVGHTILGMNTVQLYMKVPGSRTPGHQENNNFCSVNINIGPGDCEWFVVPEGYWGVLNDFCEKNNLNFLMGSWWPNLEDLYEANVPVYRFIQRPGDLVWINAGTVHWVQAIGWCNNIAWNVGPLTACQYKLAVERYEWNKLQSVKSIVPMVHLSWNMARNIKVSDPKLFEMIKYCLLRTLKQCQTLREALIAAGKEIIWHGRTKEEPAHYCSICEVEVFDLLFVTNESNSRKTYIVHCQDCARKTSGNLENFVVLEQYKMEDLMQVYDQFTLAPPLPSASS

SEQ ID NO: 7423 - protein, 224 aa, Homo sapiens
MKSCGVSLATAAAAAAAFGDEEKKMAAGKASGESEEASPSLTAEEREALGGLDSRLFGFVRFHEDGARTKALLGKAVRCYESLILKAEGKVESDFFCQLGHFNLLLEDYPKALSAYQRYYSLQSDYWKNAAFLYGLGLVYFHYNAFQWAIKAFQEVLYVDPSFCRAKEIHLRLGLMFKVNTDYESSLKHFQLALVDCNPCTLSNAEIQFHIAHLYETQVGCITL

SEQ ID NO: 7424 - protein, 161 aa, Homo sapiens
  SITE 1: note = misc_feature - Xaa can be any naturally occurring amino acid
XARNIKVSDPKLFEMIKIFSLSPNFRAEKCLRDHLVQPLRSNGEPEPLRFTGEYCLLRTLKQCQTLREALIAAGKEIIWHGRTKEEPAHYCSICEVEVFDLLFVTNESNSRKTYIVHCQDCARKTSGNLENFVVLEQYKMEDLMQVYDQFTLAPPLPSASS

SEQ ID NO: 7425 - protein, 999 aa, Homo sapiens
  SITE 1: note = misc_feature - Xaa can be any naturally occurring amino acid
XGTLYESCNQPQDAIKCYLNATRSKSCSNTSALAARIKYLQNTSDNWSGGHAVSHPPVQQQAHSWCLTPQKLQHLEQLRANRNNLNPAQKLMLEQLESQFVLMQQHQMRPTGVAQVRSTGIPNGPTADSSLPTNSVSGQQPQLALTRVPSVSQPGVRPACPGQPLANGPFSAGHVPCSTSRTLGSTDTILIGNNHITGSGSNGNVPYLQRNALTLPHNRTNLTSSAEEPWKNQLSNSTQGLHKGQSSHSAGPNGERPLSSTGPSQHLQAAGSGIQNQNGHPTLPSNSVTQGAALNHLSSHTATSGGQQGITLTKESKPSGNILTVPETSRHTGETPNSTASVEGLPNHVHQMTADAVCSPSHGDSKSPGLLSSDNPQLSALLMGKANNNVGTGTCDKVNNIHPAVHTKTDNSVASSPSSAISTATPSPKSTEQTTTNSVTSLNSPHSGLHTINGEGMEESQSPMKTDLLLVNHKPSPQIIPSMSVSIYPSSAEVLKACRNLGKNGLSNSSILLDKCPPPRPPSSPYPPLPKDKLNPPTPSIYLENKRDAFFPPLHQFCTNPNNPVTVIRGLAGALKLDLGLFSTKTLVEANNEHMVEVRTQLLQPADENWDPTGTKKIWHCESNRSHTTIAKYAQYQASSFQESLREENEKRSHHKDHSDSESTSSDNSGRRRKGPFKTIKFGTNIDLSDDKKWKLQLHELTKLPAFVRVVSAGNLLSHVGHTILGMNTVQLYMKVPGSRTPGHQENNNFCSVNINIGPGDCEWFVVPEGYWGVLNDFCEKNNLNFLMGSWWPNLEDLYEANVPVYRFIQRPGDLVWINAGTVHWVQAIGWCNNIAWNVGPLTACQYKLAVERYEWNKLQSVKSIVPMVHLSWNMARNIKVSDPKLFEMIKYCLLRTLKQCQTLREALIAAGKEIIWHGRTKEEPAHYCSICEVEVFDLLFVTNESNSRKTYIVHCQDCARKTSGNLENFVVLEQYKMEDLMQVYDQFTLAPPLPSASS

SEQ ID NO: 7426 - protein, 224 aa, Homo sapiens
  SITE 1: note = misc_feature - Xaa can be any naturally occurring amino acid
XLQAYICAVQLDHGHAAAWMDLGTLYESCNQPQDAIKCYLNATRSKSCSNTSALAARIKYLQAQLCNLPQGSLQNKTKLLPSIEEAWSLPIPAELTSRQGAMNTAQQNTSDNWSGGHAVSHPPVQQQAHSWCLTPQKLQMRPTGVAQVRSTGIPNGPTADSSLPTNSVSGQQPQLALTRVPSVSQPGVRPACPGQPLANGPFSAGHVPCSTSRTLGSTDTILIG

SEQ ID NO: 7427 - protein, 1044 aa, Homo sapiens
  SITE 1: note = misc_feature - Xaa can be any naturally occurring amino acid
XNKTKLLPSIEEAWSLPIPAELTSRQGAMNTAQQACKPHHPNTEPVLGLSQTPISQQSLPLHMIPSSQVDDLSSPAKRKRTSSPTKNTSDNWSGGHAVSHPPVQQQAHSWCLTPQKLQHLEQLRANRNNLNPAQKLMLEQLESQFVLMQQHQMRPTGVAQVRSTGIPNGPTADSSLPTNSVSGQQPQLALTRVPSVSQPGVRPACPGQPLANGPFSAGHVPCSTSRTLGSTDTILIGNNHITGSGSNGNVPYLQRNALTLPHNRTNLTSSAEEPWKNQLSNSTQGLHKGQSSHSAGPNGERPLSSTGPSQHLQAAGSGIQNQNGHPTLPSNSVTQGAALNHLSSHTATSGGQQGITLTKESKPSGNILTVPETSRHTGETPNSTASVEGLPNHVHQMTADAVCSPSHGDSKSPGLLSSDNPQLSALLMGKANNNVGTGTCDKVNNIHPAVHTKTDNSVASSPSSAISTATPSPKSTEQTTTNSVTSLNSPHSGLHTINGEGMEESQSPMKTDLLLVNHKPSPQIIPSMSVSIYPSSAEVLKACRNLGKNGLSNSSILLDKCPPPRPPSSPYPPLPKDKLNPPTPSIYLENKRDAFFPPLHQFCTNPNNPVTVIRGLAGALKLDLGLFSTKTLVEANNEHMVEVRTQLLQPADENWDPTGTKKIWHCESNRSHTTIAKYAQYQASSFQESLREENEKRSHHKDHSDSESTSSDNSGRRRKGPFKTIKFGTNIDLSDDKKWKLQLHELTKLPAFVRVVSAGNLLSHVGHTILGMNTVQLYMKVPGSRTPGHQENNNFCSVNINIGPGDCEWFVVPEGYWGVLNDFCEKNNLNFLMGSWWPNLEDLYEANVPVYRFIQRPGDLVWINAGTVHWVQAIGWCNNIAWNVGPLTACQYKLAVERYEWNKLQSVKSIVPMVHLSWNMARNIKVSDPKLFEMIKYCLLRTLKQCQTLREALIAAGKEIIWHGRTKEEPAHYCSICEVEVFDLLFVTNESNSRKTYIVHCQDCARKTSGNLENFVVLEQYKMEDLMQVYDQFTLAPPLPSASS

SEQ ID NO: 7428 - protein, 941 aa, Homo sapiens
MAGAAAAVAAGAAAGAAAAAVSVAAPGRASAPPPPPPVYCVCRQPYDVNRFMIECDICKDWFHGSCVGVEEHHAVDIDLYHCPNCAVLHGSSLMKKRRNWHRHDYTEIDDGSKPVQAGTRTFIKELRSRVFPSADEIIIKMHGSQLTQRYLEKHGFDVPIMVPKLDDLGLRLPSPTFSVMDVERYVGGDKVIDVIDVARQADSKMTLHNYVKYFMNPNRPKVLNVISLEFSDTKMSELVEVPDIAKKLSWVENYWPDDSVFPKPFVQKYCLMGVQDSYTDFHIDFGGTSVWYHVLWGEKIFYLIKPTDENLARYESWSSSVTQSEVFFGDKVDKCYKCVVKQGHTLFVPTGWIHAVLTSQDCMAFGGNFLHNLNIGMQLRCYEMEKRLKTPDLFKFPFFEAICWFVAKNLLETLKELREDGFQPQTYLVQGVKALHTALKLWMKKELVSEHAFEIPDNVRPGHLIKELSKVIRAIEEENGKPVKSQGIPIVCPVSRSSNEATSPYHSRRKMRKLRDHNVRTPSNLDILELHTREVLKRLEMCPWEEDILSSKLNGKFNKHLQPSSTVPEWRAKDNDLRLLLTNGRIIKDERQPFADQSLYTADSENEEDKRRTKKAKMKIEESSGVEGVEHEESQKPLNGFFTRVKSELRSRSSGYSDISESEDSGPECTALKSIFTTEESESSGDEKKQEITSNFKEESNVMRNFLQKSQKPSRSEIPIKRECPTSTSTEEEAIQGMLSMAGLHYSTCLQRQIQSTDCSGERNSLQDPSSCHGSNHEVRQLYRYDKPVECGYHVKTEDPDLRTSSWIKQFDTSRFHPQDLSRSQKCIRKEGSSEISQRVQSRNYVDSSGSSLQNGKYMQNSNLTSGACQISNGSLSPERPVGETSFSVPLHPTKRPASNPPPISNQATKGKRPKKGMATAKQRLGKILKLNRNGHARFFV

SEQ ID NO: 7429 - protein, 404 aa, Homo sapiens
  SITE 1: note = misc_feature - Xaa can be any naturally occurring amino acid
XAKNLLETLKELREDGFQPQTYLVQGVKALHTALKLWMKKELVSEHAFEIPDNVRPGHLIKELSKVIRAIEEENGKPVKSQGIPIVCPVSRSSNEATSPYHSRRKMRKLRDHNVRTPSNLDILELHTREVLKRLEMCPWEEDILSSKLNGKFNKHLQPSSTVPEWRAKDNDLRLLLTNGRIIKDERQPFADQSLYTADSENEEDKRRTKKAKMKIEESSGVEGVEHEESQKPLNGFFTRVKSELRSRSSGYSDISESEDSGPECTALKSIFTTEESESSGDEKKQEITSNFKEESNVMRNFLQKSQKPSRSEIPIKRECPTSTSTEEEAIQGMLSMAGLHYSTCLQRQIQSTDCSGERNSLQDPSSCHGSNHEVRQLYRYDKPVECETRSHLCCPDWSPTPELK

SEQ ID NO: 7430 - protein, 39 aa, Homo sapiens
MLLLAAAFLVAFVLLLYMVSPLISPKPLALPGAHVVFFR

SEQ ID NO: 7431 - protein, 155 aa, Homo sapiens
MLLLAAAFLVAFVLLLYMVSPLISPKPLALPGAHVVVTGGSSGIGKCIAIECYKQGAFITLVARNEDKLLQAKKEIEMHSINDKQVVLCISVDVSQDYNQVENVIKQAQEKLGPVDMLVNCAGMAVSGKFEDLERLMSINYLGSVYPSRAVITTM

SEQ ID NO: 7432 - protein, 332 aa, Homo sapiens
MLLLAAAFLVAFVLLLYMVSPLISPKPLALPGAHVVVTGGSSGIGKCIAIECYKQGAFITLVARNEDKLLQAKKEIEMHSINDKQVVLCISVDVSQDYNQVENVIKQAQEKLGPVDMLVNCAGMAVSGKFEDLEVSTFERLMSINYLGSVYPSRAVITTMKERRVGRIVFVSSQAGQLGLFGFTAYSASKFAIRGLAEALQMEVKPYNVYITVAYPPDTDTPGFAEENRTKPLETRLISETTSVCKPEQVAKQIVKDAIQGNFNSSLGSDGYMLSALTCGMAPVTSITEGLQQVVTMGLFRTIALFYLGSFDSIVRRCMMQREKSENADKTA

SEQ ID NO: 7433 - protein, 332 aa, Homo sapiens; identical to SEQ ID NO: 7432

SEQ ID NO: 7434 - protein, 298 aa, Homo sapiens
MLLLAAAFLVAFVLLLYMVSPLISPKPLALPGAHVVVTGGSSGIGKCIAIECYKQGAFITLVARNEDKLLQAKKEIEMHSINDKQVVLCISVDVSQDYNQVENVIKQAQEKLGPVDMLVNCAGMAVSGKFEDLEVSTFERLMSINYLGSVYPSRAVITTMKERRVGRIVFVSSQAGQLGLFGFTAYSASKFAIRGLAEALQMEVKPYNVYITVAYPPDTDTPGFAEENRTKPLETRLISETTSVCKPEQVAKQIVKDAIVVTMGLFRTIALFYLGSFDSIVRRCMMQREKSENADKTA

SEQ ID NO: 7435 - protein, 268 aa, Homo sapiens
MLLLAAAFLVAFVLLLYMVSPLISPKPLALPGAHVVVTGGSSGIGKCIAIECYKQGAFITLVARNEDKLLQAKKEIEMHSINDKQVVLCISVDVSQDYNQVENVIKQAQEKLGPVDMLVNCAGMAVSGKFEDLEVSTFEVKPYNVYITVAYPPDTDTPGFAEENRTKPLETRLISETTSVCKPEQVAKQIVKDAIQGNFNSSLGSDGYMLSALTCGMAPVTSITEGLQQVVTMGLFRTIALFYLGSFDSIVRRCMMQREKSENADKTA

SEQ ID NO: 7436 - protein, 39 aa, Homo sapiens
MLLLAAAFLVAFVLLLYMVSPLISPKPLALPGAHVVWEG

SEQ ID NO: 7437 - protein, 352 aa, Homo sapiens
MAGTICFIMWVLFITDTVWSRSVRQVYEVHDSDDWTIHDFECPMECFCPPSFPTALYCENRGLKEIPAIPSRIWYLYLQNNLIETIPEKPFENATQLRWINLNKNKITNYGIEKGALSQLKKLLFLFLEDNELEEVPSPLPRSLEQLQLARNKVSRIPQGTFSNLENLTLLDLQNNKLVDNAFQRDTFKGLKNLMQLNMAKNALRNMPPRLPANTMQLFLDNNSIEGIPENYFNVIPKVAFLRLNHNKLSDEGLPSRGFDVSSILDLQLSHNQLTKVPRISAHLQHLHLDHNKIKSVNVSVICPSPSMLPAERDSFSYGPHLRYLRLDGNEIKPPIPMALMTCFRLLQAVII

SEQ ID NO: 7438 - protein, 287 aa, Homo sapiens
DPSPPLPWWDKSRLLFHGDWHMDIEQANLHQLATEFVFKGDLDINVRTASKYDDCCFLHLPDLCMTLDLQWLCHGNPHDHHSVTLRAPEFLPEVPLGQLHDSYRAFRSENLNLSIKMDLTRHSGTISQPRILLYSSTLRWMQNFWATWTSVTRPICRGKLFNNLKPSKKKLGQHYKQLSYTALFPQLQVHYWASFAQQRGIQIECSQGHVFTRGTQRLIPQAGTVMRRLISDWSVTQMVSDLSQVTVHLMASPTEENADHCLDPLVTKTHLLSLSSLTYQRHSNRTA

SEQ ID NO: 7439 - protein, 2235 aa, Homo sapiens
MPLFFSALLVLLLVALSALFLGRWLVVRLATKWCQRKLQAELKIGSFRFFWIQNVSLKFQQHQQTVEIDNLWISSKLLSHDLPHYVALCFGEVRIRTDLQKVSDLSAPFSQSAGVDQKELSFSPSLLKIFCQLFSIHVDAINIMVLKVDTSESLWHIQISRSRFLLDSDGKRLICEVSLCKINSKVLKSGQLEDTCLVELSLALDLCLKVGISSRHLTAITVDVWTLHAELHEGLFQSQLLCQGPSLASKPVPCSEVTENLVEPTLPGLFLLQQLPDQVKVKMENTSVVLSMNSQKRHLTWTLKLLQFLYHRDEDQLPLRSFTANSDMAQMSTELLLEDGLLLSQSRQRIVCLNSLKASVQVTTIDLSASLVLNTCIIHYRHQEFSHWLHLLALETQGSSSPVLKQRKKRTFPQILAPIIFSTSISNVNISIQLGDTPPFALGFNSISLDYQHLRPQSIHQRGVLTVDHLCWRVGSDSHIQRAPHPPNMHVWGEALVLDSFTLQGSYNQPLGLSSTQSDTLFLDCTIRGLQVEASDTCAQCLSRILSLMGPQSGKSAVSRHSSFGESVSLLWKVDLKVEDMNLFTLSALVGASEVRLDTLTILGSAETSTVGIQGLVLALVKSVTEKMQPCCKAPDIPTPVLSLSMLSITYHSSIRSLEVQCGAGLTLLWSPPDHMYLYQHVLATLQCRDLLRATVFPETVPSLALETSGTTSELEGRAPEPLPPKRLLNLTLEVSTAKLTAFVAEDKFITLAAESVSLSRHGGSLQAYCPELAAGFDGNSIFNFKEVEVQLLPELEEMILHRNPFPALQTLRNRVWLLSFGSVSVEFPYQYDFSRTLDEAVGVQKWLKGLHQGTRAWASPSPVPLPPDLLLKVEHFSWVFLDDVFEVKLHDNYELMKDESKESAKRLQLLDAKVAALRKQHGELLPARKIEELYASLERKNIEIYIQRSRRLYGNTPMRRALLTWSLAGLELVALADASFHGPEHVVEQVQELDPGSPFPPEGLDLVIQWCRMLKCNVKSFLVRIRDYPRYLFEIRDWRLMGRLVGTEQSGQPCSRRRQILHLGLPWGNVAVERNMPPLKFYHDFHSEIFQYTVVWGPCWDPAWTLIGQCVDLLTKPSADPSPPLPWWDKSRLLFHGDWHMDIEQANLHQLATEDPYNTTENMHWEWSHLSFHWKPGQFVFKGDLDINVRTASKYDDCCFLHLPDLCMTLDLQWLCHGNPHDHHSVTLRAPEFLPEVPLGQLHDSYRAFRSENLNLSIKMDLTRHSGTISQPRILLYSSTLRWMQNFWATWTSVTRPICRGKLFNNLKPSKKKLGQHYKQLSYTALFPQLQVHYWASFAQQRGIQIECSQGHVFTRGTQRLIPQAGTVMRRLISDWSVTQMVSDLSQVTVHLMASPTEENADHCLDPLVTKTHLLSLSSLTYQRHSNRTAEEELSARDGDPTFHTHQLHLVDLRISWTTTNRDIAFGLYDGYKKAAVLKRNLSTEALKGLKIDPQMPAKKPKRGVPTSASAPPRVNTPSFSGQPDKGSSGGAYMLQKLIEETDRFVVFTEEESGMSDQLCGIAACQTDDIYNRNCLIELVNCQMVLRGAETEGCVIVSAAKAQLLQCQHHPAWYGDTLKQKTSWTCLLDGMQYFATTESSPTEQDGRQLWLEVKNIEEHRQRSLDSVQELMESGQAVGGMVTTTTDWNQPAEAQQAQQVQRIISRCNCRMYYISYSHDIDPELATQIKPPEVLENQEKEDLLKKQEGAVDTFTLIHHELEISTNPAQYAMILDIVNNLLLHVEPKRKEHSEKKQRVRFQLEISSNPEEQRSSILHLQEAVRQHVAQIRQLEKQMYSIMKSLQDDSKNENLLDLNQKLQLQLNQEKANLQLESEELNILIRCFKDFQLQRANKMELRKQQEDVSVVRRTEFYFAQARWRLTEEDGQLGIAELELQRFLYSKVNKSDDTAEHLLELGWFTMNNLLPNAVYKVVLRPQSSCQSGRQLALRLFSKVRPPVGGISVKEHFEVNVVPLTIQLTHQFFHRMMGFFFPGRSVEDDEVGDEEDKSKLVTTGIPVVKPRQLIATDDAVPLGPGKGVAQGLTRSSGVRRSFRKSPEHPVDDIDKMKERAAMNNSFIYIKIPQVPLCVSYKGEKNSVDWGDLNLVLPCLEYHNNTWTWLDFAMAVKRDSRKALVAQVIKEKLRLKSATGSEVRGKLETKSDLNMQQQEEEEKARLLIGLSVGDKNPGKKSIFGRRK

SEQ ID NO: 7440 - protein, 86 aa, Homo sapiens
MPLFFSALLVLLLVALSALFLGRWLVVRLATKWCQRKLQAELKIGSFRFFWIQNVSLKFQQHQQTVTLCGIVLWRSAYQNGPTESF

SEQ ID NO: 7441 - protein, 2092 aa, Homo sapiens
MVLKVDTSESLWHIQISRSRFLLDSDGKRLICEVSLCKINSKVLKSGQLEDTCLVELSLALDLCLKVGISSRHLTAITVDVWTLHAELHEGLFQSQLLCQGPSLASKPVPCSEVTENLVEPTLPGLFLLQQLPDQVKVKMENTSVVLSMNSQKRHLTWTLKLLQFLYHRDEDQLPLRSFTANSDMAQMSTELLLEDGLLLSQSRQRIVCLNSLKASVQVTTIDLSASLVLNTCIIHYRHQEFSHWLHLLALETQGSSSPVLKQRKKRTFPQILAPIIFSTSISNVNISIQLGDTPPFALGFNSISLDYQHLRPQSIHQRGVLTVDHLCWRVGSDSHIQRAPHPPNMHVWGEALVLDSFTLQGSYNQPLGLSSTQSDTLFLDCTIRGLQVEASDTCAQCLSRILSLMGPQSGKSAVSRHSSFGESVSLLWKVDLKVEDMNLFTLSALVGASEVRLDTLTILGSAETSTVGIQGLVLALVKSVTEKMQPCCKAPDIPTPVLSLSMLSITYHSSIRSLEVQCGAGLTLLWSPPDHMYLYQHVLATLQCRDLLRATVFPETVPSLALETSGTTSELEGRAPEPLPPKRLLNLTLEVSTAKLTAFVAEDKFITLAAESVSLSRHGGSLQAYCPELAAGFDGNSIFNFKEVEVQLLPELEEMILHRNPFPALQTLRNRVWLLSFGSVSVEFPYQYDFSRTLDEAVGVQKWLKGLHQGTRAWASPSPVPLPPDLLLKVEHFSWVFLDDVFEVKLHDNYELMKDESKESAKRLQLLDAKVAALRKQHGELLPARKIEELYASLERKNIEIYIQRSRRLYGNTPMRRALLTWSLAGLELVALADASFHGPEHVVEQVQELDPGSPFPPEGLDLVIQWCRMLKCNVKSFLVRIRDYPRYLFEIRDWRLMGRLVGTEQSGQPCSRRRQILHLGLPWGNVAVERNMPPLKFYHDFHSEIFQYTVVWGPCWDPAWTLIGQCVDLLTKPSADPSPPLPWWDKSRLLFHGDWHMDIEQANLHQLATEDPYNTTENMHWEWSHLSFHWKPGQFVFKGDLDINVRTASKYDDCCFLHLPDLCMTLDLQWLCHGNPHDHHSVTLRAPEFLPEVPLGQLHDSYRAFRSENLNLSIKMDLTRHSGTISQPRILLYSSTLRWMQNFWATWTSVTRPICRGKLFNNLKPSKKKLGQHYKQLSYTALFPQLQVHYWASFAQQRGIQIECSQGHVFTRGTQRLIPQAGTVMRRLISDWSVTQMVSDLSQVTVHLMASPTEENADHCLDPLVTKTHLLSLSSLTYQRHSNRTAEEELSARDGDPTFHTHQLHLVDLRISWTTTNRDIAFGLYDGYKKAAVLKRNLSTEALKGLKIDPQMPAKKPKRGVPTSASAPPRVNTPSFSGQPDKGSSGGAYMLQKLIEETDRFVVFTEEESGMSDQLCGIAACQTDDIYNRNCLIELVNCQMVLRGAETEGCVIVSAAKAQLLQCQHHPAWYGDTLKQKTSWTCLLDGMQYFATTESSPTEQDGRQLWLEVKNIEEHRQRSLDSVQELMESGQAVGGMVTTTTDWNQPAEAQQAQQVQRIISRCNCRMYYISYSHDIDPELATQIKPPEVLENQEKEDLLKKQEGAVDTFTLIHHELEISTNPAQYAMILDIVNNLLLHVEPKRKEHSEKKQRVRFQLEISSNPEEQRSSILHLQEAVRQHVAQIRQLEKQMYSIMKSLQDDSKNENLLDLNQKLQLQLNQEKANLQLESEELNILIRCFKDFQLQRANKMELRKQQEDVSVVRRTEFYFAQARWRLTEEDGQLGIAELELQRFLYSKVNKSDDTAEHLLELGWFTMNNLLPNAVYKAILRPQSSCQSGRQLALRLFSKVRPPVGGISVKEHFEVNVVPLTIQLTHQFFHRMMGFFFPGRSVEDDEVGDEEDKSKLVTTGIPVVKPRQLIATDDAVPLGPGKGVAQGLTRSSGVRRSFRKSPEHPVDDIDKMKERAAMNNSFIYIKIPQVPLCVSYKGEKNSVDWGDLNLVLPCLEYHNNTWTWLDFAMAVKRDSRKALVAQVIKEKLRLKSATGSEVRGKLETKSDLNMQQQEEEEKARLLIGLSVGDKNPGKKSIFGRRK

SEQ ID NO: 7442 - protein, 2092 aa, Homo sapiens
MVLKVDTSESLWHIQISRSRFLLDSDGKRLICEVSLCKINSKVLKSGQLEDTCLVELSLALDLCLKVGISSRHLTAITVDVWTLHAELHEGLFQSQLLCQGPSLASKPVPCSEVTENLVEPTLPGLFLLQQLPDQVKVKMENTSVVLSMNSQKRHLTWTLKLLQFLYHRDEDQLPLRSFTANSDMAQMSTELLLEDGLLLSQSRQRIVCLNSLKASVQVTTIDLSASLVLNTCIIHYRHQEFSHWLHLLALETQGSSSPVLKQRKKRTFPQILAPIIFSTSISNVNISIQLGDTPPFALGFNSISLDYQHLRPQSIHQRGVLTVDHLCWRVGSDSHIQRAPHPPNMHVWGEALVLDSFTLQGSYNQPLGLSSTQSDTLFLDCTIRGLQVEASDTCAQCLSRILSLMGPQSGKSAVSRHSSFGESVSLLWKVDLKVEDMNLFTLSALVGASEVRLDTLTILGSAETSTVGIQGLVLALVKSVTEKMQPCCKAPDIPTPVLSLSMLSITYHSSIRSLEVQCGAGLTLLWSPPDHMYLYQHVLATLQCRDLLRATVFPETVPSLALETSGTTSELEGRAPEPLPPKRLLNLTLEVSTAKLTAFVAEDKFITLAAESVSLSRHGGSLQAYCPELAAGFDGNSIFNFKEVEVQLLPELEEMILHRNPFPALQTLRNRVWLLSFGSVSVEFPYQYDFSRTLDEAVGVQKWLKGLHQGTRAWASPSPVPLPPDLLLKVEHFSWVFLDDVFEVKLHDNYELMKDESKESAKRLQLLDAKVAALRKQHGELLPARKIEELYASLERKNIEIYIQRSRRLYGNTPMRRALLTWSLAGLELVALADASFHGPEHVVEQVQELDPGSPFPPEGLDLVIQWCRMLKCNVKSFLVRIRDYPRYLFEIRDWRLMGRLVGTEQSGQPCSRRRQILHLGLPWGNVAVERNMPPLKFYHDFHSEIFQYTVVWGPCWDPAWTLIGQCVDLLTKPSADPSPPLPWWDKSRLLFHGDWHMDIEQANLHQLATEDPYNTTENMHWEWSHLSFHWKPGQFVFKGDLDINVRTASKYDDCCFLHLPDLCMTLDLQWLCHGNPHDHHSVTLRAPEFLPEVPLGQLHDSYRAFRSENLNLSIKMDLTRHSGTISQPRILLYSSTLRWMQNFWATWTSVTRPICRGKLFNNLKPSKKKLGQHYKQLSYTALFPQLQVHYWASFAQQRGIQIECSQGHVFTRGTQRLIPQAGTVMRRLISDWSVTQMVSDLSQVTVHLMASPTEENADHCLDPLVTKTHLLSLSSLTYQRHSNRTAEEELSARDGDPTFHTHQLHLVDLRISWTTTNRDIAFGLYDGYKKAAVLKRNLSTEALKGLKIDPQMPAKKPKRGVPTSASAPPRVNTPSFSGQPDKGSSGGAYMLQKLIEETDRFVVFTEEESGMSDQLCGIAACQTDDIYNRNCLIELVNCQMVLRGAETEGCVIVSAAKAQLLQCQHHPAWYGDTLKQKTSWTCLLDGMQYFATTESSPTEQDGRQLWLEVKNIEEHRQRSLDSVQELMESGQAVGGMVTTTTDWNQPAEAQQAQQVQRIISRCNCRMYYISYSHDIDPELATQIKPPEVLENQEKEDLLKKQEGAVDTFTLIHHELEISTNPAQYAMILDIVNNLLLHVEPKRKEHSEKKQRVRFQLEISSNPEEQRSSILHLQEAVRQHVAQIRQLEKQMYSIMKSLQDDSKNENLLDLNQKLQLQLNQEKANLQLESEELNILIRCFKDFQLQRANKMELRKQQEDVSVVRRTEFYFAQARWRLTEEDGQLGIAELELQRFLYSKVNKSDDTAEHLLELGWFTMNNLLPNAVYKVVLRPQSSCQSGRQLALRLFSKVRPPVGGISVKEHFEVNVVPLTIQLTHQFFHRMMGFFFPGRSVEDDEVGDEEDKSKLVTTGIPVVKPRQLIATDDAVPLGPGKGVAQGLTRSSGVRRSFRKSPEHPVDDIDKMKERAAMNNSFIYIKIPQVPLCVSYKGEKNSVDWGDLNLVLPCLEYHNNTWTWLDFAMAVKRDSRKALVAQVIKEKLRLKSATGSEVRGKLETKSDLNMQQQEEEEKARLLIGLSVGDKNPGKKSIFGRRK

SEQ ID NO: 7443 - protein, 21 aa, Homo sapiens
  SITE 1: note = misc_feature - Xaa can be any naturally occurring amino acid
XQGPSLASKPVPCSAARPGQG

SEQ ID NO: 7444 - protein, 1072 aa, Homo sapiens
MAPPTGVLSSLLLLVTIAGCARKQCSEGRTYSNAVISPNLETTRIMRVSHTFPVVDCTAACCDLSSCDLAWWFEGRCYLVSCPHKENCEPKKMGPIRSYLTFVLRPVQRPAQLLDYGDMMLNRGSPSGIWGDSPEDIRKDLTFLGKDWGLEEMSEYSDDYRELEKDLLQPSGKQEPRGSAEYTDWGLLPGSEGAFNSSVGDSPAVPAETQQDPELHYLNESASTPAPKLPERSVLLPLPTTPSSGEVLEKEKASQLQEQSSNSSGKEVLMPSHSLPPASLELSSVTVEKSPVLTVTPGSTEHSIPTPPTSAAPSESTPSELPISPTTAPRTVKELTVSAGDNLIITLPDNEVELKAFVAPAPPVETTYNYEWNLISHPTDYQGEIKQGHKQTLNLSQLSVGLYVFKVTVSSENAFGEGFVNVTVKPARRVNLPPVAVVSPQLQELTLPLTSALIDGSQSTDDTEIVSYHWEEINGPFIEEKTSVDSPVLRLSNLDPGNYSFRLTVTDSDGATNSTTAALIVNNAVDYPPVANAGPNHTITLPQNSITLNGNQSSDDHQIVLYEWSLGPGSEGKHVVMQGVQTPYLHLSAMQEGDYTFQLKVTDSSRQQSTAVVTVIVQPENNRPPVAVAGPDKELIFPVESATLDGSSSSDDHGIVFYHWEHVRGPSAVEMENIDKAIATVTGLQVGTYHFRLTVKDQQGLSSTSTLTVAVKKENNSPPRARAGGRHVLVLPNNSITLDGSRSTDDQRIVSYLWIRDGQSPAAGDVIDGSDHSVALQLTNLVEGVYTFHLRVTDSQGASDTDTATVEVQPDPRKSGLVELTLQVGVGQLTEQRKDTLVRQLAVLLNVLDSDIKVQKIRAHSDLSTVIVFYVQSRPPFKVLKAAEVARNLHMRLSKEKADFLLFKVLRVDTAGCLLKCSGHGHCDPLTKRCICSHLWMENLIQRYIWDGESNCEWSIFYVTVLAFTLIVLTGGFTWLCICCCKRQKRTKIRKKTKYTILDNMDEQERMELRPKYGIKHRSTEHNSSLMVSESEFDSDQDTIFSREKMERGNPKVSMNGSIRNGASFSYCSKDR

SEQ ID NO: 7445 - protein, 1011 aa, Homo sapiens
MAPPTGVLSSLLLLVTIAGCARKQCSEGRTYSNAVISPNLETTRIMRVSHTFPVVDCTAACCDLSSCDLAWWFEGRCYLVSCPHKENCEPKKMGPIRSYLTFVLRPVQRPAQLLDYGDMMLNRGSPSGIWGDSPEDIRKDLTFLGKDWGLEEMSEYSDDYRELEKDLLQPSGKQEPRGSAEYTDWGLLPGSEGAFNSSVGDSPAVPAETQQDPELHYLNESASTPAPKLPERSVLLPLPTTPSSGEVLEKEKASQLQEQSSNSSGKEVLMPSHSLPPASLELSSVTVEKSPVLTVTPGSTEHSIPTPPTSAAPSESTPSELPISPTTAPRTVKELTVSAGDNLIITLPDNEVELKAFVAPAPPVETTYNYEWNLISHPTDYQGEIKQGHKQTLNLSQLSVGLYVFKVTVSSENAFGEGFVNVTVKPARRVNLPPVAVVSPQLQELTLPLTSALIDGSQSTDDTEIVSYHWEEINGPFIEEKTSVDSPVLRLSNLDPGNYSFRLTVTDSDGATNSTTAALIVNNAVDYPPVANAGPNHTITLPQNSITLNGNQSSDDHQIVLYEWSLGPGSEGKHVVMQGVQTPYLHLSAMQEGDYTFQLKVTDSSRQQSTAVVTVIVQPENNRPPVAVAGPDKELIFPVESATLDGSSSSDDHGIVFYHWEHVRGPSAVEMENIDKAIATVTGLQVGTYHFRLTVKDQQGLSSTSTLTVAVKKENNSPPRARAGGRHVLVLPNNSITLDGSRSTDDQRIVSYLWIRDGQSPAAGDVIDGSDHSVALQLTNLVEGVYTFHLRVTDSQGASDTDTATVEVQPDPRKSGLVELTLQVGVGQLTEQRKDTLVRQLAVLLNVLDSDIKVQKIRAHSDLSTVIVFYVQSRPPFKVLKAAEVARNLHMRLSKEKADFLLFKVLRVDTAGCLLKCSGHGHCDPLTKRCICSHLWMENLIQRYIWDGESNCGIKHRSTEHNSSLMVSESEFDSDQDTIFSREKMERGNPKVSMNGSIRNGASFSYCSKDR

SEQ ID NO: 7446 - protein, 1072 aa, Homo sapiens; identical to SEQ ID NO: 7444

SEQ ID NO: 7447 - protein, 483 aa, Homo sapiens
MQEGDYTFQLKVTDSSRQQSTAVVTVIVQPENNRPPVAVAGPDKELIFPVESATLDGSSSSDDHGIVFYHWEHVRGPSAVEMENIDKAIATVTGLQVGTYHFRLTVKDQQGLSSTSTLTVAVKKENNSPPRARAGGRHVLVLPNNSITLDGSRSTDDQRIVSYLWIRDGQSPAAGDVIDGSDHSVALQLTNLVEGVYTFHLRVTDSQGASDTDTATVEVQPDPRKSGLVELTLQVGVGQLTEQRKDTLVRQLAVLLNVLDSDIKVQKIRAHSDLSTVIVFYVQSRPPFKVLKAAEVARNLHMRLSKEKADFLLFKVLRVDTAGCLLKCSGHGHCDPLTKRCICSHLWMENLIQRYIWDGESNCEWSIFYVTVLAFTLIVLTGGFTWLCICCCKRQKRTKIRKKTKYTILDNMDEQERMELRPKYGIKHRSTEHNSSLMVSESEFDSDQDTIFSREKMERGNPKVSMNGSIRNGASFSYCSKDR

SEQ ID NO: 7448 - protein, 1027 aa, Homo sapiens
MRVSHTFPVVDCTAACCDLSSCDLAWWFEGRCYLVSCPHKENCEPKKMGPIRSYLTFVLRPVQRPAQLLDYGDMMLNRGSPSGIWGDSPEDIRKDLTFLGKDWGLEEMSEYSDDYRELEKDLLQPSGKQEPRGSAEYTDWGLLPGSEGAFNSSVGDSPAVPAETQQDPELHYLNESASTPAPKLPERSVLLPLPTTPSSGEVLEKEKASQLQEQSSNSSGKEVLMPSHSLPPASLELSSVTVEKSPVLTVTPGSTEHSIPTPPTSAAPSESTPSELPISPTTAPRTVKELTVSAGDNLIITLPDNEVELKAFVAPAPPVETTYNYEWNLISHPTDYQGEIKQGHKQTLNLSQLSVGLYVFKVTVSSENAFGEGFVNVTVKPARRVNLPPVAVVSPQLQELTLPLTSALIDGSQSTDDTEIVSYHWEEINGPFIEEKTSVDSPVLRLSNLDPGNYSFRLTVTDSDGATNSTTAALIVNNAVDYPPVANAGPNHTITLPQNSITLNGNQSSDDHQIVLYEWSLGPGSEGKHVVMQGVQTPYLHLSAMQEGDYTFQLKVTDSSRQQSTAVVTVIVQPENNRPPVAVAGPDKELIFPVESATLDGSSSSDDHGIVFYHWEHVRGPSAVEMENIDKAIATVTGLQVGTYHFRLTVKDQQGLSSTSTLTVAVKKENNSPPRARAGGRHVLVLPNNSITLDGSRSTDDQRIVSYLWIRDGQSPAAGDVIDGSDHSVALQLTNLVEGVYTFHLRVTDSQGASDTDTATVEVQPDPRKSGLVELTLQVGVGQLTEQRKDTLVRQLAVLLNVLDSDIKVQKIRAHSDLSTVIVFYVQSRPPFKVLKAAEVARNLHMRLSKEKADFLLFKVLRVDTAGCLLKCSGHGHCDPLTKRCICSHLWMENLIQRYIWDGESNCEWSIFYVTVLAFTLIVLTGGFTWLCICCCKRQKRTKIRKKTKYTILDNMDEQERMELRPKYGIKHRSTEHNSSLMVSESEFDSDQDTIFSREKMERGNPKVSMNGSIRNGASFSYCSKDR

SEQ ID NO: 7449 - protein, 1063 aa, Homo sapiens
MTRLGWPSPCCARKQCSEGRTYSNAVISPNLETTRIMRVSHTFPVVDCTAACCDLSSCDLAWWFEGRCYLVSCPHKENCEPKKMGPIRSYLTFVLRPVQRPAQLLDYGDMMLNRGSPSGIWGDSPEDIRKDLTFLGKDWGLEEMSEYSDDYRELEKDLLQPSGKQEPRGSAEYTDWGLLPGSEGAFNSSVGDSPAVPAETQQDPELHYLNESASTPAPKLPERSVLLPLPTTPSSGEVLEKEKASQLQEQSSNSSGKEVLMPSHSLPPASLELSSVTVEKSPVLTVTPGSTEHSIPTPPTSAAPSESTPSELPISPTTAPRTVKELTVSAGDNLIITLPDNEVELKAFVAPAPPVETTYNYEWNLISHPTDYQGEIKQGHKQTLNLSQLSVGLYVFKVTVSSENAFGEGFVNVTVKPARRVNLPPVAVVSPQLQELTLPLTSALIDGSQSTDDTEIVSYHWEEINGPFIEEKTSVDSPVLRLSNLDPGNYSFRLTVTDSDGATNSTTAALIVNNAVDYPPVANAGPNHTITLPQNSITLNGNQSSDDHQIVLYEWSLGPGSEGKHVVMQGVQTPYLHLSAMQEGDYTFQLKVTDSSRQQSTAVVTVIVQPENNRPPVAVAGPDKELIFPVESATLDGSSSSDDHGIVFYHWEHVRGPSAVEMENIDKAIATVTGLQVGTYHFRLTVKDQQGLSSTSTLTVAVKKENNSPPRARAGGRHVLVLPNNSITLDGSRSTDDQRIVSYLWIRDGQSPAAGDVIDGSDHSVALQLTNLVEGVYTFHLRVTDSQGASDTDTATVEVQPDPRKSGLVELTLQVGVGQLTEQRKDTLVRQLAVLLNVLDSDIKVQKIRAHSDLSTVIVFYVQSRPPFKVLKAAEVARNLHMRLSKEKADFLLFKVLRVDTAGCLLKCSGHGHCDPLTKRCICSHLWMENLIQRYIWDGESNCEWSIFYVTVLAFTLIVLTGGFTWLCICCCKRQKRTKIRKKTKYTILDNMDEQERMELRPKYGIKHRSTEHNSSLMVSESEFDSDQDTIFSREKMERGNPKVSMNGSIRNGASFSYCSKDR

SEQ ID NO: 7450 - protein, 82 aa, Homo sapiens
ILLTVLTCYFWKKNQKLEYKYSKLVMNATLKDCDLPAADSCAIMEGEDVEDDLIFTSKKSLFGKIKSFTSKVSGSSPLGAES

SEQ ID NO: 7451 - protein, 62 aa, Homo sapiens
MAEPGHSHHLSARVRGRTERRIPRLWRLLLWAGTAFQVTQGTGPELHACKEPSPATPGSFWI

SEQ ID NO: 7452 - protein, 91 aa, Homo sapiens
MAEPGHSHHLSARVRGRTERRIPRLWRLLLWAGTAFQVTQGTGPELHACKESEYHYEYTACDSTGSRWRVAVPHTPGLCTSLPDPIKGTEC

SEQ ID NO: 7453 - protein, 152 aa, Homo sapiens
MAEPGHSHHLSARVRGRTERRIPRLWRLLLWAGTAFQVTQGTGPELHACKESEYHYEYTACDSTGSRWRVAVPHTPGLCTSLPDPIKGTECSFSCNAGEFLDMKDQSCKPCAEGRYSLGTGIRFDEWDELPHGFASLSANMELDDSAAESTG

SEQ ID NO: 7454 - protein, 156 aa, Homo sapiens
MAEPGHSHHLSARVRGRTERRIPRLWRLLLWAGTAFQVTQGTGPELHACKESEYHYEYTACDSTGSRWRVAVPHTPGLCTSLPDPIKGTECSFSCNAGEFLDMKDQSCKPCAEGRYSLGTGIRFDEWDELPHGFASLSANMELDDSAAESTGNCTS

SEQ ID NO: 7455 - protein, 205 aa, Homo sapiens
MAEPGHSHHLSARVRGRTERRIPRLWRLLLWAGTAFQVTQGTGPELHACKESEYHYEYTACDSTGSRWRVAVPHTPGLCTSLPDPIKGTECSFSCNAGEFLDMKDQSCKPCAEGRYSLGTGIRFDEWDELPHGFASLSANMELDDSAAESTGNCTSSKWVPRGDYIASNTDECTATLMYAVNLKQSGTVNFEYYYPDSSIIFEFF

SEQ ID NO: 7456 - protein, 1013 aa, Homo sapiens
MAEPGHSHHLSARVRGRTERRIPRLWRLLLWAGTAFQVTQGTGPELHACKESEYHYEYTACDSTGSRWRVAVPHTPGLCTSLPDPIKGTECSFSCNAGEFLDMKDQSCKPCAEGRYSLGTGIRFDEWDELPHGFASLSANMELDDSAAESTGNCTSSKWVPRGDYIASNTDECTATLMYAVNLKQSGTVNFEYYYPDSSIIFEFFVQNDQCQPNADDSRWMKTTEKGWEFHSVELNRGNNVLYWRTTAFSVWTKVPKPVLVRNIAITGVAYTSECFPCKPGTYADKQGSSFCKLCPANSYSNKGETSCHQCDPDKYSEKGSSSCNVRPACTDKDYFYTHTACDANGETQLMYKWAKPKICSEDLEGAVKLPASGVKTHCPPCNPGFFKTNNSTCQPCPYGSYSNGSDCTRCPAGTEPAVGFEYKWWNTLPTNMETTVLSGINFEYKGMTGWEVAGDHIYTAAGASDNDFMILTLVVPGFRPPQSVMADTENKEVARITFVFETLCSVNCELYFMVGVNSRTNTPVETWKGSKGKQSYTYIIEENTTTSFTWAFQRTTFHEASRKYTNDVAKIYSINVTNVMNGVASYCRPCALEASDVGSSCTSCPAGYYIDRDSGTCHSCPTNTILKAHQPYGVQACVPCGPGTKNNKIHSLCYNDCTFSRNTPTRTFNYNFSALANTVTLAGGPSFTSKGLKYFHHFTLSLCGNQGRKMSVCTDNVTDLRIPEGESGFSKSITAYVCQAVIIPPEVTGYKAGVSSQPVSLADRLIGVTTDMTLDGITSPAELFHLESLGIPDVIFFYRSNDVTQSCSSGRSTTIRVRCSPQKTVPGSLLLPGTCSDGTCDGCNFHFLWESAAACPLCSVADYHAIVSSCVAGIQKTTYVWREPKLCSGGISLPEQRVTICKTIDFWLKVGISAGTCTAILLTVLTCYFWKKNQKLEYKYSKLVMNATLKDCDLPAADSCAIMEGEDVEDDLIFTSKKSLFGKIKSFTSKRTPDGFDSVPLKTSSGGLDMDL

SEQ ID NO: 7457 - protein, 901 aa, Homo sapiens
MAEPGHSHHLSARVRGRTERRIPRLWRLLLWAGTAFQVTQGTGPELHACKESEYHYEYTACDSTGSRWRVAVPHTPGLCTSLPDPIKGTECSFSCNAGEFLDMKDQSCKPCAEGRYSLGTGIRFDEWDELPHGFASLSANMELDDSAAESTGNCTSSKWVPRGDYIASNTDECTATLMYAVNLKQSGTVNFEYYYPDSSIIFEFFVQNDQCQPNADDSRWMKTTEKGWEFHSVELNRGNNVLYWRTTAFSVWTKVPKPVLVRNIAITEKGSSSCNVRPACTDKDYFYTHTACDANGETQLMYKWAKPKICSEDLEGAVKLPASGVKTHCPPCNPGFFKTNNSTCQPCPYGSYSNGSDCTRCPAGTEPAVGFEYKWWNTLPTNMETTVLSGINFEYKGMTGWEVAGDHIYTAAGASDNDFMILTLVVPGFRPPQSVMADTENKEVARITFVFETLCSVNCELYFMVGVNSRTNTPVETWKGSKGKQSYTYIIEENTTTSFTWAFQRTTFHEASRKYTNDVAKIYSINVTNVMNGVASYCRPCALEASDVGSSCTSCPAGYYIDRDSGTCHSCPTNTILKAHQPYGVQACVPCGPGTKNNKIHSLCYNDCTFSRNTPTRTFNYNFSALANTVTLAGGPSFTSKGLKYFHHFTLSLCGNQGRKMSVCTDNVTDLRIPEGESGFSKSITAYVCQAVIIPPEVTGYKAGVSSQPVSLADRLIGVTTDMTLDGITSPAELFHLESLGIPDVIFFYRSNDVTQSCSSGRSTTIRVRCSPQKTVPGSLLLPGTCSDGTCDGCNFHFLWESAAACPLCSVADYHAIVSSCVAGIQKTTYVWREPKLCSGGISLPEQRVTICKTIDFWLKVGISAGTCTAILLTVLTCYFWKKNQKLEYKYSKLVMNATLK

SEQ ID NO: 7458 - protein, 926 aa, Homo sapiens
MAEPGHSHHLSARVRGRTERRIPRLWRLLLWAGTAFQVTQGTGPELHACKESEYHYEYTACDSTGSRWRVAVPHTPGLCTSLPDPIKGTECSFSCNAGEFLDMKDQSCKPCAEGRYSLGTGIRFDEWDELPHGFASLSANMELDDSAAESTGNCTSSKWVPRGDYIASNTDECTATLMYAVNLKQSGTVNFEYYYPDSSIIFEFFVQNDQCQPNADDSRWMKTTEKGWEFHSVELNRGNNVLYWRTTAFSVWTKVPKPVLTQLMYKWAKPKICSEDLEGAVKLPASGVKTHCPPCNPGFFKTNNSTCQPCPYGSYSNGSDCTRCPAGTEPAVGFEYKWWNTLPTNMETTVLSGINFEYKGMTGWEVAGDHIYTAAGASDNDFMILTLVVPGFRPPQSVMADTENKEVARITFVFETLCSVNCELYFMVGVNSRTNTPVETWKGSKGKQSYTYIIEENTTTSFTWAFQRTTFHEASRKYTNDVAKIYSINVTNVMNGVASYCRPCALEASDVGSSCTSCPAGYYIDRDSGTCHSCPTNTILKAHQPYGVQACVPCGPGTKNNKIHSLCYNDCTFSRNTPTRTFNYNFSALANTVTLAGGPSFTSKGLKYFHHFTLSLCGNQGRKMSVCTDNVTDLRIPEGESGFSKSITAYVCQAVIIPPEVTGYKAGVSSQPVSLADRLIGVTTDMTLDGITSPAELFHLESLGIPDVIFFYRSNDVTQSCSSGRSTTIRVRCSPQKTVPGSLLLPGTCSDGTCDGCNFHFLWESAAACPLCSVADYHAIVSSCVAGIQKTTYVWREPKLCSGGISLPEQRVTICKTIDFWLKVGISAGTCTAILLTVLTCYFWKKNQKLEYKYSKLVMNATLKDCDLPAADSCAIMEGEDVEDDLIFTSKKSLFGKIKSFTSKRTPDGFDSVPLKTSSGGLDMDL

SEQ ID NO: 7459 - protein, 838 aa, Homo sapiens
MYAFYSLLIYIFYSLFRRDGGAAAAAEPGDPAQRARKPRGRRRPDLPAPELWTELTGLAASSEPEDGSEGAAEGRAAAVSLEEALLRLAEFLSVQLGAEESCGGPADLGQSGEVPSLLTVTSQLLALLAWLRSPRGRQALLQGTQPAPRVRPPSPDGSTSQEESPSHFTAVPGEPLGDETQGQQPLQLEEDQRAWQRLEQLILGQLEELKQQLEQQEEELGRLRLGVGATDSEKRVQHLTLENEALKQSLSLMRDLLLHWGPGPPIRAPQEEAEALLELQGRLQEAQDTTEALRAQLGVQEVQLQGLQGALQQLQQETEQNCRRELQQMHGQLAGLRARMASLRQGCGDLRGLVSTFTQSCQGSLSEARGQVSWALGALSSGGPGTQLPEGQQGPPAGCPGRLPELKGNIRVLCRLRPGTSSSLVSVEPGPGGTVTTCYRGRHRRFRLDWVFPPDASQEEVFRELEPAVLSCLRGYSVCIFTYGQTGTGKTYSMEGPPEDPGIVPRALQSLFREMGAGRQHRVTLSMVEIYNEAVRDLLAPGPPERLAVRQGPEGQGGIQVAGLTHWDVPNLETLHQMLKLGRSNRATAATAMNQRSSRSHALVTLTLRAASPPRAPGTAGTLHLVDLAGSERARKAGAAGPPRGDPDGARRLREAQTINRSLLALGGVMAALRAHRPHVPFRDSQLTRLLQPALGPGTTAVLLLQVGAGAGQVCACRSPPTRARPPAPLARRSPRGRRISGRQSAPSSSPTEWVKWSWGQPGAAGSRAPPGRLLPSAPTLRSPGPPAPLRRPLAVLHAPVPTTARARLSRPQRACPSSPGSRPCPWGLRPGLCWQRR

SEQ ID NO: 7460 - protein, 744 aa, Homo sapiens
MYAFYSLLIYIFYSLFRRDGGAAAAAEPGDPAQRARKPRGRRRPDLPAPELWTELTGLAASSEPEDGSEGAAEGRAAAVSLEEALLRLAEFLSVQLGAEESCGGPADLGQSGEVPSLLTVTSQLLALLAWLRSPRGRQALLQGTQPAPRVRPPSPDGSTSQEESPSHFTAVPGEPLGDETQGQQPLQLEEDQRAWQRLEQLILGQLEELKQQLEQQEEELGRLRLGVGATDSEKRVQHLTLENEALKQSLSLMRDLLLHWGPGPPIRAPQEEAEALLELQGRLQEAQDTTEALRAQLQQETEQNCRRELQQMHGQLAGLRARMASLRQGCGDLRGLVSTFTQSCQGSLSEARGQVSWALGALSSGGPGTQLPEGQQGPPAGCPGRLPELKGNIRVLCRLRPGTSSSLVSVEPGPGGTVTTCYRGRHRRFRLDWVFPPDASQEEVFRELEPAVLSCLRGYSVCIFTYGQTGTGKTYSMEGPPEDPGIVPRALQSLFREMGAGRQHRVTLSMVEIYNEAVRDLLAPGPPERLAVRQGPEGQGGIQVAGLTHWDVPNLETLHQMLKLGRSNRATAATAMNQRSSRSHALVTLTLRAASPPRAPGTAGTLHLVDLAGSERARKAGAAGPPRGDPDGARRLREAQTINRSLLALGGVMAALRAHRPHVPFRDSQLTRLLQPALGPGTTAVLLLQISTRPEDLGETVCSLKFADRVGQVELGPARRRRVPRSSGTPSSLSTDTPLTGTPC

SEQ ID NO: 7461 - protein, 791 aa, Homo sapiens
MYAFYSLLIYIFYSLFRRDGGAAAAAEPGDPAQRARKPRGRRRPDLPAPELWTELTGLAASSEPEDGSEGAAEGRAAAVSLEEALLRLAEFLSVQLGAEESCGGPADLGQSGEVPSLLTVTSQLLALLAWLRSPRGRQALLQGTQPAPRVRPPSPDGSTSQEESPSHFTAVPGEPLGDETQGQQPLQLEEDQRAWQRLEQLILGQLEELKQQLEQQEEELGRLRLGVGATDSEKRVQHLTLENEALKQSLSLMRDLLLHWGPGPPIRAPQEEAEALLELQGRLQEAQDTTEALRAQLGVQEVQLQGLQGALQQLQQETEQNCRRELQQMHGQLAGLRARMASLRQGCGDLRGLVSTFTQSCQGSLSEARGQVSWALGALSSGGPGTQLPEGQQGPPAGCPGRLPELKGNIRVLCRLRPGTSSSLVSVEPGPGGTVTTCYRGRHRRFRLDWVFPPDASQEEVFRELEPAVLSCLRGYSVCIFTYGQTGTGKTYSMEGPPEDPGIVPRALQSLFREMGAGRQHRVTLSMVEIYNEAVRDLLAPGPPERLAVRQGPEGQGGIQVAGLTHWDVPNLETLHQMLKLGRSNRATAATAMNQRSSRSHALVTLTLRAASPPRAPGTAGTLHLVDLAGSERARKAGAAGPPRGDPDGARRLREAQTINRSLLALGGVMAALRAHRPHVPFRDSQLTRLLQPALGPGTTAVLLLQISTRPEDLGETVCSLKFADRVGQVELGPARRRRVPRSSGTPSSLSTDTPLTGTPCTPTPSPGSPPCPSPDNGSGSALAPAEGLPL

SEQ ID NO: 7462 - protein, 325 aa, Homo sapiens
MSMSPTVIILACLGFFLDQSVWAHVGGQDKPFCSAWPSAVVPQGGHVTLRCHYRRGFNIFTLYKKDGVPVPELYNRIFWNSFLISPVTPAHAGTYRCRGFHPHSPTEWSAPSNPLVIMVTGLYEKPSLTARPGPTVRAGENVTLSCSSQSSFDIYHLSREGEAHELRLPAVPSINGTFQADFPLGPATHGETYRCFGSFHGSPYEWSDPSDPLPVSVTDAAVMNQEPAGHRTVNREDSDEQDPQEVTYAQLDHCIFTQRKITGPSQRSKRPSTDTSVCIELPNAEPRALSPAHEHHSQALMGSSRETTALSQTQLASSNVPAAGI

SEQ ID NO: 7463 - protein, 342 aa, Homo sapiens
MSMSPTVIILACLGFFLDQSVWAHVGGQDKPFCSAWPSAVVPQGGHVTLRCHYRRGFNIFTLYKKDGVPVPELYNRIFWNSFLISPVTPAHAGTYRCRGFHPHSPTEWSAPSNPLVIMVTGLYEKPSLTARPGPTVRAGENVTLSCSSQSSFDIYHLSREGEAHELRLPAVPSINGTFQADFPLGPATHGETYRCFGSFHGSPYEWSDPSDPLPVSVTGNPSSSWPSPTEPSFKTDAAVMNQEPAGHRTVNREDSDEQDPQEVTYAQLDHCIFTQRKITGPSQRSKRPSTDTSVCIELPNAEPRALSPAHEHHSQALMGSSRETTALSQTQLASSNVPAAGI

SEQ ID NO: 7464 - protein, 273 aa, Homo sapiens
MSMSPTVIILACLGFFLDQSVWAHVGGQDKPFCSAWPSAVVPQGGHVTLRCHYRRGFNIFTLYKKDGVPVPELYNRIFWNSFLISPVTPAHAGTYRCRGFHPHSPTEWSAPSNPLVIMVTGLYEKPSLTARPGPTVRAGENVTLSCSSQSSFDIYHLSREGEAHELRLPAVPSINGTFQADFPLGPATHGETYRCFGSFHGSPYEWSDPSDPLPVSVTGNPSSSWPSPTEPSFKTGIARHLHAVIRYSVAIILFTILPFFLLHRWCSKKKMLL

SEQ ID NO: 7465 - protein, 230 aa, Homo sapiens
MSMSPTVIILACLGFFLDQSVWAHVGLYEKPSLTARPGPTVRAGENVTLSCSSQSSFDIYHLSREGEAHELRLPAVPSINGTFQADFPLGPATHGETYRCFGSFHGSPYEWSDPSDPLPVSVTDAAVMNQEPAGHRTVNREDSDEQDPQEVTYAQLDHCIFTQRKITGPSQRSKRPSTDTSVCIELPNAEPRALSPAHEHHSQALMGSSRETTALSQTQLASSNVPAAGI

SEQ ID NO: 7466 - protein, 247 aa, Homo sapiens
MSMSPTVIILACLGFFLDQSVWAHVGLYEKPSLTARPGPTVRAGENVTLSCSSQSSFDIYHLSREGEAHELRLPAVPSINGTFQADFPLGPATHGETYRCFGSFHGSPYEWSDPSDPLPVSVTGNPSSSWPSPTEPSFKTDAAVMNQEPAGHRTVNREDSDEQDPQEVTYAQLDHCIFTQRKITGPSQRSKRPSTDTSVCIELPNAEPRALSPAHEHHSQALMGSSRETTALSQTQLASSNVPAAGI

SEQ ID NO: 7467 - protein, 416 aa, Homo sapiens
MSPSHVVVNVSTARSGPLTTSSAPVSRAESLRPGSRSCTMSMSPTVIILACLGFFLDQSVWAHVGGQDKPFCSAWPSAVVPQGGHVTLRCHYRRGFNIFTLYKKDGVPVPELYNRIFWNSFLISPVTPAHAGTYRCRGFHPHSPTEWSAPSNPLVIMVTGLYEKPSLTARPGPTVRAGENVTLSCSSQSSFDIYHLSREGEAHELRLPAVPSINGTFQADFPLGPATHGETYRCFGSFHGSPYEWSDPSDPLPVSVTGNPSSSWPSPTEPSFKTGIARHLHAVIRYSVAIILFTILPFFLLHRWCSKKKDAAVMNQEPAGHRTVNREDSDEQDPQEVTYAQLDHCIFTQRKITGPSQRSKRPSTDTSVCIELPNAEPRALSPAHEHHSQALMGSSRETTALSQTQLASSNVPAAGI

SEQ ID NO: 7468 - protein, 398 aa, Homo sapiens
  SITE 1: note = misc_feature - Xaa can be any naturally occurring amino acid
XMSPTVIILACLGFFLDQSVWAHVGGQDKPFCSAWPSAVVPQGGHVTLRCHYRRGFNIFTLYKKDGVPVPELYNRIFWNSFLISPVTPAHAGTYRCRGFHPHSPTEWSAPSNPLVIMVTGLYEKPSLTARPGPTVRAGENVTLSCSSQSSFDIYHLSREGEAHELRLPAVPSINGTFQADFPLGPATHGETYRCFGSFHGSPYEWSDPSDPLPVSVTGNPSSSWPSPTEPSFKTGIARHLHAVIRYSVAIILFTILPFFLLHRWCSKKKVSLTKQRPENSGPCAEAGWEHADAAVMNQEPAGHRTVNREDSDEQDPQEVTYAQLDHCIFTQRKITGPSQRSKRPSTDTSVCIELPNAEPRALSPAHEHHSQALMGSSRETTALSQTQLASSNVPAAGI

SEQ ID NO: 7469 - protein, 139 aa, Homo sapiens
MAPKLITVLCLGFCLNQKICPHAGAQDKFSLSAWPSPVVPLGGRVTLSCHSHLRFVIWTIFQTTGTRSHELHTGLSNNITISPVTPEHAGTYRCVGIYKHASKWSAESNSLKIIVTAFSLHPGGPHDEAGREVDPLLQL

SEQ ID NO: 7470 - protein, 133 aa, Homo sapiens
MAPKLITVLCLGFCLNQKICPHAGAQDKFSLSAWPSPVVPLGGRVTLSCHSHLRFVIWTIFQTTGTRSHELHTGLSNNITISPVTPEHAGTYRCVGIYKHASKWSAESNSLKIIVTGGPHDEAGREVDPLLQL

SEQ ID NO: 7471 - protein, 133 aa, Homo sapiens; identical to SEQ ID NO: 7470

SEQ ID NO: 7472 - protein, 352 aa, Homo sapiens
MAPKLITVLCLGFCLNQKICPHAGAQDKFSLSAWPSPVVPLGGRVTLSCHSHLRFVIWTIFQTTGTRSHELHTGLSNNITISPVTPEHAGTYRCVGIYKHASKWSAESNSLKIIVTGLFTKPSISAHPSSLVHAGARVSLRCHSELAFDEFILYKEGHIQHSQQLDQGMEAGIHYVEAVFSMGPVTPAHAGAYRCCGCFSHSRYEWSAPSDPLDIVITGKYKKPSLSTQVDPMMRLGEKLTLFCSSEISFDQYHLFRHGVAHGQWLSGGQRHREAFQANFSVGRATPVPGGTYRCYGSFNDSPYKPPVTRCNFTPQETLRVLLCHSQNPPLNLTHLALKDSPATCICSLDSQ

SEQ ID NO: 7473 - protein, 365 aa, Homo sapiens
MAPKLITVLCLGFCLNQKICPHAGAQDKFSLSAWPSPVVPLGGRVTLSCHSHLRFVIWTIFQTTGTRSHELHTGLSNNITISPVTPEHAGTYRCVGIYKHASKWSAESNSLKIIVTGLFTKPSISAHPSSLVHAGARVSLRCHSELAFDEFILYKEGHIQHSQQLDQGMEAGIHYVEAVFSMGPVTPAHAGAYRCCGCFSHSRYEWSAPSDPLDIVITGKYKKPSLSTQVDPMMRLGEKLTLFCSSEISFDQYHLFRHGVAHGQWLSGGQRHREAFQANFSVGRATPVPGGTYRCYGSFNDSPYKPPVTRCNFTPQETLRVLLCHSQNPPLNLTPPWQTQSPRKANGRMKRSLQQKRHRRSYMPS

SEQ ID NO: 7474 - protein, 191 aa, Homo sapiens
MLRMRVPALLVLLFCFRGRAGPSPHFLQQPEDLVVLLGEEARLPCALGAYWGLVQWTKSGLALGGQRDLPGWSRYWISGNAANGQHDLHIRPVELEDEASYECQATQAGLRSRPAQLHVLVPPEAPQVLGGPSVSLVAGVPANLTCRSRGDARPTPELLWFRDGVLLDGATFHQTLLKEGTPGSVESTLTL

SEQ ID NO: 7475 - protein, 633 aa, Homo sapiens
MLRMRVPALLVLLFCFRGRAGPSPHFLQQPEDLVVLLGEEARLPCALGAYWGLVQWTKSGLALGGQRDLPGWSRYWISGNAANGQHDLHIRPVELEDEASYECQATQAGLRSRPAQLHVLVPPEAPQVLGGPSVSLVAGVPANLTCRSRGDARPTPELLWFRDGVLLDGATFHQTLLKEGTPGSVESTLTLTPFSHDDGATFVCRARSQALPTGRDTAITLSLQYPPEVTLSASPHTVQEGEKVIFLCQATAQPPVTGYRWAKGGSPVLGARGPRLEVVADASFLTEPVSCEVSNAVGSANRSTALDVLFGPILQAKPEPVSVDVGEDASFSCAWRGNPLPRVTWTRRGGAQVLGSGATLRLPSVGPEDAGDYVCRAEAGLSGLRGGAAEARLTVNAPPVVTALHSAPAFLRGPARLQCLVFASPAPDAVVWSWDEGFLEAGSQGRFLVETFPAPESRGGLGPGLISVLHISGTQESDFSRSFNCSARNRLGEGGAQASLGRRDLLPTVRIVAGVAAATTTLLMVITGVALCCWRHSKASASFSEQKNLMRIPGSSDGSSSRGPEEEETGSREDRGPIVHTDHSDLVLEEEGTLETKDPTNGYYKVRGVSPPASPDSRVTSFQWKSPGISNLP

SEQ ID NO: 7476 - protein, 708 aa, Homo sapiens
MLRMRVPALLVLLFCFRGRAGPSPHFLQQPEDLVVLLGEEARLPCALGAYWGLVQWTKSGLALGGQRDLPGWSRYWISGNAANGQHDLHIRPVELEDEASYECQATQAGLRSRPAQLHVLVPPEAPQVLGGPSVSLVAGVPANLTCRSRGDARPTPELLWFRDGVLLDGATFHQTLLKEGTPGSVESTLTLTPFSHDDGATFVCRARSQALPTGRDTAITLSLQYPPEVTLSASPHTVQEGEKVIFLCQATAQPPVTGYRWAKGGSPVLGARGPRLEVVADASFLTEPVSCEVSNAVGSANRSTALDVLFGPILQAKPEPVSVDVGEDASFSCAWRGNPLPRVTWTRRGGAQVLGSGATLRLPSVGPEDAGDYVCRAEAGLSGLRGGAAEARLTVNAPPVVTALHSAPAFLRGPARLQCLVFASPAPDAVVWSWDEGFLEAGSQGRFLVETFPAPESRGGLGPGLISVLHISGTQESDFSRSFNCSARNRLGEGGAQASLGRRDLLPTVRIVAGVAAATTTLLMVITGVALCCWRHSKASASFSEQKNLMRIPGSSDGSSSRGPEEEETGSREDRGPIVHTDHSDLVLEEEGTLETKDPTNGYYKVRGVSVSLSLGEAPGGGLFLPPPSPLGPPGTPTFYDFNPHLGMVPPCRLYRARAGYLTTPHPRAFTSYIKPTSFGPPDLAPGTPPFPYAAFPTPSHPRLQTHV

SEQ ID NO: 7477 - protein, 673 aa, Homo sapiens
MLRMRVPALLVLLFCFRGRAGPSPHFLQQPEDLVVLLGEEARLPCALGAYWGLVQWTKSGLALGGQRDLPGWSRYWISGNAANGQHDLHIRPVELEDEASYECQATQAGLRSRPAQLHVLVPPEAPQVLGGPSVSLVAGVPANLTCRSRGDARPTPELLWFRDGVLLDGATFHQTLLKEGTPGSVESTLTLTPFSHDDGATFVCRARSQALPTGRDTAITLSLQYPPEVTLSASPHTVQEGEKVIFLCQATAQPPVTGYRWAKGGSPVLGARGPRLEVVADASFLTEPVSCEVSNAVGSANRSTALDVLFGPILQAKPEPVSVDVGEDASFSCAWRGNPLPRVTWTRRGGAQVLGSGATLRLPSVGPEDAGDYVCRAEAGLSGLRGGAAEARLTVNAPPVVTALHSAPAFLRGPARLQCLVFASPAPDAVVWSWDEGFLEAGSQGRFLVETFPAPESRGGLGPGLISVLHISGTQESDFSRSFNCSARNRLGEGGAQASLGRRASASFSEQKNLMRIPGSSDGSSSRGPEEEETGSREDRGPIVHTDHSDLVLEEEGTLETKDPTNGYYKVRGVSVSLSLGEAPGGGLFLPPPSPLGPPGTPTFYDFNPHLGMVPPCRLYRARAGYLTTPHPRAFTSYIKPTSFGPPDLAPGTPPFPYAAFPTPSHPRLQTHV

SEQ ID NO: 7478 - protein, 583 aa, Homo sapiens
MLRMRVPALLVLLFCFRGRAGWSRYWISGNAANGQHDLHIRPVELEDEASYECQATQAGLRSRPAQLHVLVPPEAPQVLGGPSVSLVAGVPANLTCRSRGDARPTPELLWFRDGVLLDGATFHQTLLKEGTPGSVESTLTLTPFSHDDGATFVCRARSQALPTGRDTAITLSLQYPPEVTLSASPHTVQEGEKVIFLCQATAQPPVTGYRWAKGGSPVLGARGPRLEVVADASFLTEPVSCEVSNAVGSANRSTALDVLFGPILQAKPEPVSVDVGEDASFSCAWRGNPLPRVTWTRRGGAQVLGSGATLRLPSVGPEDAGDYVCRAEAGLSGLRGGAAEARLTVNAPPVVTALHSAPAFLRGPARLQCLVFASPAPDAVVWSWDEGFLEAGSQGRFLVETFPAPESRGGLGPGLISVLHISGTQESDFSRSFNCSARNRLGEGGAQASLGRRDLLPTVRIVAGVAAATTTLLMVITGVALCCWRHSKASASFSEQKNLMRIPGSSDGSSSRGPEEEETGSREDRGPIVHTDHSDLVLEEEGTLETKDPTNGYYKVRGVSPPASPDSRVTSFQWKSPGISNLP

SEQ ID NO: 7479 - protein, 138 aa, Homo sapiens
MNSLVSWQLLLFLCATHFGEPLEKVASVGNSRPTGQQLESLGLLAPGEQSLPCTERKPAATARLSRRGTSLSPPPESSGSPQQPGLSAPHSRQIPAPQGAVLVQREKDLPNYNWNSFGLRFGKREAAPGNHGRSAGRG

SEQ ID NO: 7480 - protein, 144 aa, Homo sapiens [sequence omitted]

SEQ ID NO: 7481 - protein, 708 aa, Homo sapiens
MAAAAVAAAAAAAAAASLQVLEMESMETAAAGSAGLAAEVRGSGTVDFGPGPGISAMEASGGDPGPEAEDFECSSHCSELSWRQNEQRRQGLFCDITLCFGGAGGREFRAHRSVLAAATEYFTPLLSGQFSESRSGRVEMRKWSSEPGPEPDTVEAVIEYMYTGRIRVSTGSVHEVLELADRFLLIRLKEFCGEFLKKKLHLSNCVAIHSLAHMYTLSQLALKAADMIRRNFHKVIQDEEFYTLPFHLIRDWLSDLEITVDSEEVLFETVLKWVQRNAEERERYFEELFKLLRLSQMKPTYLTRHVKPERLVANNEVCVKLVADAVERHALRAENIQSGTCQHPTSHVSLLPRYGQNMDVIMVIGGVSEGGDYLSECVGYFVDEDRWVNLPHIHNHLDGHAVAVTESYVYVAGSMEPGFAKTVERYNPNLNTWEHVCSLMTRKHSFGLTEVKGKLYSIGGHGNFSPGFKDVTVYNPELDKWHNLESAPKILRDVKALAIEDRFVYIAARTPVDRDTEDGLKAVITCYDTETRQWQDVESLPLIDNYCFFQMSVVNSNFYQTASCCPKSYCLENEEAVRKIASQVSDEILESLPPEVLSIEGAAICYYKDDVFIIGGWKNSDDIDKQYRKEAYRYCAERKRWMLLPPMPQPRCRATACHVRIPYRYLHGTQRYPMPQNLMWQKDRIRQMQEIHRHALNMRRVPSSQIEC

SEQ ID NO: 7482 - protein, 235 aa, Homo sapiens
MAEEQEFTQLCKLPAQPSHPHCVNNTYRSAQHSQALLRGLLALRDSGILFDVVLVVEGRHIEAHRILLAASCDYFRGMFAGGLKEMEQEEVLIHGVSYNAMCQILHFIYTSELELSLSNVQETLVAACQLQIPEIIHFCCDFLMSWVDEENILDVYRLAELFDLSRLTEQLDTYILKNFVAFSRTDKYRQLPLEKVYSLLSSNRLEVSCETEVYEGALLYHYSLEQVQADQISLH

SEQ ID NO: 7483 - protein, 634 aa, Homo sapiens
MAEEQEFTQLCKLPAQPSHPHCVNNTYRSAQHSQALLRGLLALRDSGILFDVVLVVEGRHIEAHRILLAASCDYFRGMFAGGLKEMEQEEVLIHGVSYNAMCQILHFIYTSELELSLSNVQETLVAACQLQIPEIIHFCCDFLMSWVDEENILDVYRLAELFDLSRLTEQLDTYILKNFVAFSRTDKYRQLPLEKVYSLLSSNRLEVSCETEVYEGALLYHYSLEQVQADQISLHEPPKLLETVRFPLMEAEVLQRLHDKLDPSPLRDTVASALMYHRNESLQPSLQSPQTELRSDFQCVVGFGGIHSTPSTVLSDQAKYLNPLLGEWKHFTASLAPRMSNQGIAVLNNFVYLIGGDNNVQGFRAESRCWRYDPRHNRWFQIQSLQQEHADLSVCVVGRYIYAVAGRDYHNDLNAVERYDPATNSWAYVAPLKREVYAHAGATLEGKMYITCGRRGEDYLKETHCYDPGSNTWHTLADGPVRRAWHGMATLLNKLYVIGGSNNDAGYRRDVHQVACYSCTSGQWSSVCPLPAGHGEPGIAVLDNRIYVLGGRSHNRGSRTGYVHIYDVEKDCWEEGPQLDNSISGLAACVLTLPRSLLLEPPRGTPDRSQADPDFASEVMSVSDWEEFDNSSED

SEQ ID NO: 7484 - protein, 158 aa, Homo sapiens
MAEEQEFTQLCKLPAQPSHPHCVNNTYRSAQHSQALLRGLLALRDSGILFDVVLVVEGRHIEAHRILLAASCDYFRGMFAGGLKEMEQEEVLIHGVSYNAMCQILHFIYTSELELSLSNVQETLVAACQLQMLFTSPGLNGCHSLCRSQKLSISAVIS

SEQ ID NO: 7485 - protein, 225 aa, Homo sapiens
MFAGGLKEMEQEEVLIHGVSYNAMCQILHFIYTSELELSLSNVQETLVAACQLQIPEIIHFCCDFLMSWVDEENILDVYRLAELFDLSRLTEQLDTYILKNFVAFSRTDKYRQLPLEKVYSLLSSNRLEVSCETEVYEGALLYHYSLEQVQADQISLHEPPKLLETVRFPLMEAEVLQRLHDKLDPSPLRDTVASALMYHRNESLQPSLQSPQTELRSDFQCVVG

SEQ ID NO: 7486 - protein, 252 aa, Homo sapiens
MGLGSSCHLSLPKRAEALLCSRKATVVRDLVAVRMAEEQEFTQLCKLPAQPSHPHCVNNTYRSAQHSQALLRGLLALRDSGILFDVVLVVEGRHIEAHRILLAASCDYFRGMFAGGLKEMEQEEVLIHGVSYNAMCQILHFIYTSELELSLSNVQETLVAACQLQIPEIIHFCCDFLMSWVDEENILDVYRLAELFDLSRLTEQLDTYILKNFVAFSRTDKYRQLPLEKVYSLLSSNRLEVSCETEVYEGAL

SEQ ID NO: 7487 - protein, 107 aa, Homo sapiens
MPPPWHPPPRLLAVCLLTTTQATVVRDLVAVRMAEEQEFTQLCKLPAQPSHPHCVNNTYRSAQHSQALLRGLLALRDSGILFDVVLVVEGRHIEAHRILLAASCDYF

SEQ ID NO: 7488 - protein, 295 aa, Homo sapiens
MPPPWHPPPRLLAVCLLTTTQATVVRDLVAVRMAEEQEFTQLCKLPAQPSHPHCVNNTYRSAQHSQALLRGLLALRDSGILFDVVLVVEGRHIEAHRILLAASCDYFRGMFAGGLKEMEQEEVLIHGVSYNAMCQILHFIYTSELELSLSNVQETLVAACQLQIPEIIHFCCDFLMSWVDEENILDVYRLAELFDLSRLTEQLDTYILKNFVAFSRTDKYRQLPLEKVYSLLSSNRLEVSCETEVYEGALLYHYSLEQVQADQISLHEPPKLLETVRFPLMEAEVLQRLHDKLDP

SEQ ID NO: 7489 - protein, 56 aa, Homo sapiens
MWFLVLCLALSLGGTALVFWNPTPRILNAFSASASALASPKIASKRTPYPSSTLRP

SEQ ID NO: 7490 - protein, 262 aa, Homo sapiens
MWFLVLCLALSLGGTGAAPPIQSRIVGGWECEQHSQPWQAALYHFSTFQCGGILVHRQWVLTAAHCISDNYQLWLGRHNLFDDENTAQFVHVSESFPHPGFNMSLLENHTRQADEDYSHDLMLLRLTEPADTITDAVKVVELPTEEPEVGSTCLASGWGSIEPENFSFPDDLQCVDLKILPNDECKKAHVQKVTDFMLCVGHLEGGKDTCVGDSGGPLMCDGVLQGVTSWGYVPCGTPNKPSVAVRVLSYVKWIEDTIAENS

SEQ ID NO: 7491 - protein, 143 aa, Homo sapiens
MRAPHLHLSAASGARALAKLLPLLMAQLWAAEAALLPQNDTRLDPEAYGSPCARGSQPWQVSLFNGLSFHCAGVLVDQSWVLTAAHCGNKPLWARVGDDHLLLLQGEQLRRTTRSVVHPKYHQGSGPILPRRTDEHDLMLLKL

SEQ ID NO: 7492 - protein, 276 aa, Homo sapiens
MRAPHLHLSAASGARALAKLLPLLMAQLWAAEAALLPQNDTRLDPEAYGSPCARGSQPWQVSLFNGLSFHCAGVLVDQSWVLTAAHCGNKPLWARVGDDHLLLLQGEQLRRTTRSVVHPKYHQGSGPILPRRTDEHDLMLLKLARPVVLGPRVRALQLPYRCAQPGDQCQVAGWGTTAARRVKYNKGLTCSSITILSPKECEVFYPGVVTNNMICAGLDRGQDPCQSDSGGPLVCDETLQGILSWGVYPCGSAQHPAVYTQICKYMSWINKVIRSN

SEQ ID NO: 7493 - protein, 276 aa, Homo sapiens; identical to SEQ ID NO: 7492

SEQ ID NO: 7494 - protein, 276 aa, Homo sapiens; identical to SEQ ID NO: 7492

SEQ ID NO: 7495 - protein, 43 aa, Homo sapiens
MTTCCFFRESSSAGPLALLSIPSTTRAQAPSCQGERMSTISCC

SEQ ID NO: 7496 - protein, 282 aa, Homo sapiens
MQRLRWLRDWKSSGRGLTAAKEPGARSSPLQAMRILQLILLALATGLVGGETRIIKGFECKPHSQPWQAALFEKTRLLCGATLIAPRWLLTAAHCLKPRYIVHLGQHNLQKEEGCEQTRTATESFPHPGFNNSLPNKDHRNDIMLVKMASPVSITWAVRPLTLSSRCVTAGTSCLISGWGSTSSPQLRLPHTLRCANITIIEHQKCENAYPGNITDTMVCASVQEGGKDSCQGDSGGPLVCNQSLQGIISWGQDPCAITRKPGVYTKVCKYVDWIQETMKNN

SEQ ID NO: 7497 - protein, 116 aa, Homo sapiens
MQRLRWLRDWKSSGRGLTAAKEPGARSSPLQAMRILQLILLALATGLVGGETRIIKGFECKPHSQPWQAALFEKTRLLCGATLIAPRWLLTAAHCLKPWPLHSSPGAAQPPEGGGL

SEQ ID NO: 7498 - protein, 68 aa, Homo sapiens
MRILQLILLALATGLVGGETRIIKGFECKPHSQPWQAALFEKTRLLCGATLIAPRWLLTAAHCLKPRY

SEQ ID NO: 7499 - protein, 170 aa, Homo sapiens
MRILQLILLALATGLVGGETRIIKGFECKPHSQPWQAALFEKTRLLCGATLIAPRWLLTAAHCLKPRYIVHLGQHNLQKEEGCEQTRTATESFPHPGFNNSLPNKDHRNDIMLVKMASPVSITWAVRPLTLSSRCVTAGTSCLISGWGSTSSPQLRLPHTLRCANITIIE

SEQ ID NO: 7500 - protein, 250 aa, Homo sapiens
MRILQLILLALATGLVGGETRIIKGFECKPHSQPWQAALFEKTRLLCGATLIAPRWLLTAAHCLKPRYIVHLGQHNLQKEEGCEQTRTATESFPHPGFNNSLPNKDHRNDIMLVKMASPVSITWAVRPLTLSSRCVTAGTSCLISGWGSTSSPQLRLPHTLRCANITIIEHQKCENAYPGNITDTMVCASVQEGGKDSCQGDSGGPLVCNQSLQGIISWGQDPCAITRKPGVYTKVCKYVDWIQETMKNN

SEQ ID NO: 7501 - protein, 250 aa, Homo sapiens; identical to SEQ ID NO: 7500

SEQ ID NO: 7502 - protein, 275 aa, Homo sapiens
MRILQLILLALATGLVGGETRIIKGFECKPHSQPWQAALFEKTRLLCGATLIAPRWLLTAAHCLKPWVSLTSPTHVSPDLSSSNYCLSHLSRYIVHLGQHNLQKEEGCEQTRTATESFPHPGFNNSLPNKDHRNDIMLVKMASPVSITWAVRPLTLSSRCVTAGTSCLISGWGSTSSPQLRLPHTLRCANITIIEHQKCENAYPGNITDTMVCASVQEGGKDSCQGDSGGPLVCNQSLQGIISWGQDPCAITRKPGVYTKVCKYVDWIQETMKNN

SEQ ID NO: 7503 - protein, 109 aa, Homo sapiens
MRILQLILLALATVRLPHTLRCANITIIEHQKCENAYPGNITDTMVCASVQEGGKDSCQGDSGGPLVCNQSLQGIISWGQDPCAITRKPGVYTKVCKYVDWIQETMKNN

SEQ ID NO: 7504 - protein, 141 aa, Homo sapiens
  SITE 1: note = misc_feature - Xaa can be any naturally occurring amino acid
XNSLPNKDHRNDIMLVKMASPVSITWAVRPLTLSSRCVTAGTSCLISGWGSTSSPQLRLPHTLRCANITIIEHQKCENAYPGNITDTMVCASVQEGGKDSCQSLQGIISWGQDPCAITRKPGVYTKVCKYVDWIQETMKNN

SEQ ID NO: 7505 - protein, 79 aa, Homo sapiens
MGLSIFLLLCVLGEFSRSRERAGLRLDPFTPMRRPHHPPHLSSGPQPGGEEERGFLCASIYLQLSGAQPGSHTEDFQWH

SEQ ID NO: 7506 - protein, 79 aa, Homo sapiens; identical to SEQ ID NO: 7505

SEQ ID NO: 7507 - protein, 111 aa, Homo sapiens
MGLSIFLLLCVLGLSQAATPKIFNGTECGRNSQPWQVGLFEGTSLRCGGVLIDHRWVLTAAHCSGRPIPGSAPVPQPLHRLPCHLPWCVSRENHEQHGVCRRRPGAGCLPG

SEQ ID NO: 7508 - protein, 248 aa, Homo sapiens
MGLSIFLLLCVLGLSQAATPKIFNGTECGRNSQPWQVGLFEGTSLRCGGVLIDHRWVLTAAHCSGSRYWVRLGEHSLSQLDWTEQIRHSGFSVTHPGYLGASTSHEHDLRLLRLRLPVRVTSSVQPLPLPNDCATAGTECHVSGWGITNHPRNPFPDLLQCLNLSIVSHATCHGVYPGRITSNMVCAGGVPGQDACQGDSGGPLVCGGVLQGLVSWGSVGPCGQDGIPGVYTYICKYVDWIRMIMRNN

SEQ ID NO: 7509 - protein, 248 aa, Homo sapiens; identical to SEQ ID NO: 7508

SEQ ID NO: 7510 - protein, 254 aa, Homo sapiens
MGLSIFLLLCVLGLSQAATPKIFNGTECGRNSQPWQVGLFEGTSLRCGGVLIDHRWVLTAAHCSGSRYWVRLGEHSLSQLDWTEQIRHSGFSVTHPGYLGASTSHEHDLRLLRLRLPVRVTSSVQPLPLPNDCATAGTECHVSGWGITNHPRNPFPDLLQCLNLSIVSHATCHGVYPGRITSNMVCAGGVPGQDACQGDSGGPLVCGGVLQGLVSWGSVGPCGQDGIPGVYTYICNSTLVGLGTSWNFNSCQPF

SEQ ID NO: 7511 - protein, 177 aa, Homo sapiens
MGLSIFLLLCVLGLSQAATPKIFNGTECGRNSQPWQVGLFEGTSLRCGGVLIDHRWVLTAAHCSGSRYWVRLGEHSLSQLDWTEQIRHSGFSVTHPGYLGASTSHEHDLRLLRLRLPVRVTSSVQPLPLPNDCATAGTECHVSGWGITNHPRSKGPRARGQGSGWVQVWDAGREVES

SEQ ID NO: 7512 - protein, 98 aa, Homo sapiens
MGLIYKCLPEKVTVNIETRCLPGVFQGSQHQWDQWVSPRWLHLLPPLSALAGCPTSARAATLWGSPGPPQMGPHCRTLSKGGAQSLPRQARPRACGSW

SEQ ID NO: 7513 - protein, 98 aa, Homo sapiens; identical to SEQ ID NO: 7512

SEQ ID NO: 7514 - protein, 93 aa, Homo sapiens
MWPLALVIASLTLALSGGEDFKEPSQGPRDVMAASRPEAFPKGLTLEPRPEKGGICGCLAPGTILGLKVGWLFSSGDTPWIHARATPECHTLG

SEQ ID NO: 7515 - protein, 93 aa, Homo sapiens; identical to SEQ ID NO: 7514

SEQ ID NO: 7516 - protein, 99 aa, Homo sapiens
MWPLALVIASLTLALSGGVSQESSKVLNTNGTSGFLPGGYTCFPHSQPWQAALLVQGRLLCGGVLVHPKWVLTAAHCLKEGLKVYLGKHALGRVEAGEQ

SEQ ID NO: 7517 - protein, 180 aa, Homo sapiens
MWPLALVIASLTLALSGGVSQESSKVLNTNGTSGFLPGGYTCFPHSQPWQAALLVQGRLLCGGVLVHPKWVLTAAHCLKEGLKVYLGKHALGRVEAGEQVREVVHSIPHPEYRRSPTHLNHDHDIMLLELQSPVQLTGYIQTLPLSHNNRLTPGTTCRVSGWGTTTSPQGMHPHRWPEAP

SEQ ID NO: 7518 - protein, 277 aa, Homo sapiens
MWPLALVIASLTLALSGGVSQESSKVLNTNGTSGFLPGGYTCFPHSQPWQAALLVQGRLLCGGVLVHPKWVLTAAHCLKEGLKVYLGKHALGRVEAGEQVREVVHSIPHPEYRRSPTHLNHDHDIMLLELQSPVQLTGYIQTLPLSHNNRLTPGTTCRVSGWGTTTSPQVNYPKTLQCANIQLRSDEECRQVYPGKITDNMLCAGTKEGGKDSCEGDSGGPLVCNRTLYGIVSWGDFPCGQPDRPGVYTRVSRYVLWIRETIRKYETQQQKWLKGPQ

SEQ ID NO: 7519 - protein, 204 aa, Homo sapiens
MWPLALVIASLTLALSGGVSQESSKVLNTNGTSGFLPGGYTCFPHSQPWQAALLVQGRLLCGGVLVHPKWVLTAAHCLKEGLKVYLGKHALGRVEAVNYPKTLQCANIQLRSDEECRQVYPGKITDNMLCAGTKEGGKDSCEGDSGGPLVCNRTLYGIVSWGDFPCGQPDRPGVYTRVSRYVLWIRETIRKYETQQQKWLKGPQ

SEQ ID NO: 7520 - protein, 125 aa, Homo sapiens
MWPLALVIASLTLALSGVNYPKTLQCANIQLRSDEECRQVYPGKITDNMLCAGTKEGGKDSCEGDSGGPLVCNRTLYGIVSWGDFPCGQPDRPGVYTRVSRYVLWIRETIRKYETQQQKWLKGPQ

SEQ ID NO: 7521 - protein, 267 aa, Homo sapiens
MSLRVLGSGTWPSAPKMFLLLTALQVLAIAMTQSQEDENKIIGGHTCTRSSQPWQAALLAGPRRRFLCGGALLSGQWVITAAHCGRPILQVALGKHNLRRWEATQQVLRVVRQVTHPNYNSRTHDNDLMLLQLQQPARIGRAVRPIEVTQACASPGTSCRVSGWGTISSPIARYPASLQCVNINISPDEVCQKAYPRTITPGMVCAGVPQGGKDSCQGDSGGPLVCRGQLQGLVSWGMERCALPGYPGVYTNLCKYRSWIEETMRDK

SEQ ID NO: 7522 - protein, 267 aa, Homo sapiens; identical to SEQ ID NO: 7521

SEQ ID NO: 7523 - protein, 43 aa, Homo sapiens
MRVRLGEHNLRKRDGPEQLRTTSRVIPHPRYEARSHRNDIMLL

SEQ ID NO: 7524 - protein, 256 aa, Homo sapiens
MWLLLTLSFLLASTAAQDGDKLLEGDECAPHSQPWQVALYERGRFNCGASLISPHWVLSAAHCQSRFMRVRLGEHNLRKRDGPEQLRTTSRVIPHPRYEARSHRNDIMLLRLVQPARLNPQVRPAVLPTRCPHPGEACVVSGWGLVSHNEPGTAGSPRSQVSLPDTLHCANISIISDTSCDKSYPGRLTNTMVCAGAEGRGAESCEGDSGGPLVCGGILQGIVSWGDVPCDNTTKPGVYTKVCHYLEWIRETMKRN

SEQ ID NO: 7525 - protein, 120 aa, Homo sapiens
MWLLLTLSFLLASTAQDGDKLLEGDECAPHSQPWQVALYERGRFNCGASLISPHWVLSAAHCQSRFMRVRLGEHNLRKRDGPEQLRTTSRVIPHPRYEARSHRNDIMLLRLVQPARLNPQ

SEQ ID NO: 7526 - protein, 160 aa, Homo sapiens
MWLLLTLSFLLASTAQDGDKLLEGDECAPHSQPWQVALYERGRFNCGASLISPHWVLSAAHCQSRFMRVRLGEHNLRKRDGPEQLRTTSRVIPHPRYEARSHRNDIMLLRLVQPARLNPQVRPAVLPTRCPHPGEACVVSGWGLVSHNEPGTAGSPRSQG

SEQ ID NO: 7527 - protein, 255 aa, Homo sapiens
MWLLLTLSFLLASTAQDGDKLLEGDECAPHSQPWQVALYERGRFNCGASLISPHWVLSAAHCQSRFMRVRLGEHNLRKRDGPEQLRTTSRVIPHPRYEARSHRNDIMLLRLVQPARLNPQVRPAVLPTRCPHPGEACVVSGWGLVSHNEPGTAGSPRSQVSLPDTLHCANISIISDTSCDKSYPGRLTNTMVCAGAEGRGAESCEGDSGGPLVCGGILQGIVSWGDVPCDNTTKPGVYTKVCHYLEWIRETMKRN

SEQ ID NO: 7528 - protein, 23 aa, Homo sapiens
MSLLKHQSLRPDEDSSHDLMLLR

SEQ ID NO: 7529 - protein, 44 aa, Homo sapiens
MSLLKHQSLRPDEDSSHDLMLLRLSEPAKITDVVKVLGLPTQEP

SEQ ID NO: 7530 - protein, 159 aa, Homo sapiens
MSLLKHQSLRPDEDSSHDLMLLRLSEPAKITDVVKVLGLPTQEPALGTTCYASGWGSIEPEEFLRPRSLQCVSLHLLSNDMCARAYSEKVTEFMLCAGLWTGGKDTCGGDSGGPLVCNGVLQGITSWGPEPCALPEKPAVYTKVVHYRKWIKDTIAANP

SEQ ID NO: 7531 - protein, 69 aa, Homo sapiens
MWDLVLSIALSVGCTGAVPLIQSRIVGGWECEKHSQPWQVAVYSHGWAHCGGVLVHPQWVLTAAHCLKK

SEQ ID NO: 7532 - protein, 122 aa, Homo sapiens
MWDLVLSIALSVGCTGAVPLIQSRIVGGWECEKHSQPWQVAVYSHGWAHCGGVLVHPQWVLTAAHCLKKACQDHRCCEGPGPAHPGASTGDHLLRLRLGQHRTRGVLAPQESSVCEPPSPVQ

SEQ ID NO: 7533 - protein, 164 aa, Homo sapiens
MWDLVLSIALSVGCTGAVPLIQSRIVGGWECEKHSQPWQVAVYSHGWAHCGGVLVHPQWVLTAAHCLKKNSQVWLGRHNLFEPEDTGQRVPVSHSFPHPLYNMSLLKHQSLRPDEDSSHDLMLLRLSEPAKITDVVKVLGLPTQEPALGTTCYASGWGSIEPEE

SEQ ID NO: 7534 - protein, 261 aa, Homo sapiens
MWDLVLSIALSVGCTGAVPLIQSRIVGGWECEKHSQPWQVAVYSHGWAHCGGVLVHPQWVLTAAHCLKKNSQVWLGRHNLFEPEDTGQRVPVSHSFPHPLYNMSLLKHQSLRPDEDSSHDLMLLRLSEPAKITDVVKVLGLPTQEPALGTTCYASGWGSIEPEEFLRPRSLQCVSLHLLSNDMCARAYSEKVTEFMLCAGLWTGGKDTCGGDSGGPLVCNGVLQGITSWGPEPCALPEKPAVYTKVVHYRKWIKDTIAANP

SEQ ID NO: 7535 - protein, 223 aa, Homo sapiens
MWDLVLSIALSVGCTGAVPLIQSRIVGGWECEKHSQPWQVAVYSHGWAHCGGVLVHPQWVLTAAHCLKKNSQVWLGRHNLFEPEDTGQRVPVSHSFPHPLYNMSLLKHQSLRPDEDSSHDLMLLRLSEPAKITDVVKVLGLPTQEPALGTTCYASGWGSIEPEEFLRPRSLQCVSLHLLSNDMCARAYSEKVTEFMLCAGLWTGGKDTCGVSHPYSQHLEGKG

SEQ ID NO: 7536 - protein, 49 aa, Homo sapiens
MWDLVLSIALSVGCTGIARSGWVGTTCLSLKTQARGSLSATASHTRSTI

SEQ ID NO: 7537 - protein, 49 aa, Homo sapiens; identical to SEQ ID NO: 7536

SEQ ID NO: 7538 - protein, 49 aa, Homo sapiens; identical to SEQ ID NO: 7536

SEQ ID NO: 7539 - protein, 51 aa, Homo sapiens
  SITE 1: note = misc_feature - Xaa can be any naturally occurring amino acid
XEKVTEFMLCAGLWTGGKDTCGHNSPIPVLSTCLLGTCYVTSIAVDPGKQQ

SEQ ID NO: 7540 - protein, 184 aa, Homo sapiens
  SITE 1: note = misc_feature - Xaa can be any naturally occurring amino acid
XPDEDSSHDLMLLRLSEPAKITDVVKVLGLPTQEPALGTTCYASGWGSIEPEEFLRPRSLQCVSLHLLSNDMCARAYSEKVTEFMLCAGLWTGGKDTCGESGAVDGAGQKKDRAWLRVILGVHLSVMVCFKVSHHGALSHVPCLKSLLCTPRWCITGSGSRTPSQPTPECPCPTPTSSKFKSTS

SEQ ID NO: 7541 - protein, 172 aa, Homo sapiens
MWVPVVFLTLAVCGGVLVHPQWVLTAAHCIRNKSVILLGRHSLFHPEDTGQVFQVSHSFPHPLYDMSLLKNRFLRPGDDSSHDLMLLRLSEPAELTDAVKVMDLPTQEPALGTTCYASGWGSIEPEEFLTPKKLQCVDLHVISNDVCAQVHPQKVTKFMLCAGRWTGGKSTC

SEQ ID NO: 7542 - protein, 173 aa, Homo sapiens [sequence omitted]

SEQ ID NO: 7543 - protein, 218 aa, Homo sapiens
MWVPVVFLTLSVTWIGAAPLILSRIVGGWECEKHSQPWQVLVASRGRAVCGGVLVHPQWVLTAAHCIRKPGDDSSHDLMLLRLSEPAELTDAVKVMDLPTQEPALGTTCYASGWGSIEPEEFLTPKKLQCVDLHVISNDVCAQVHPQKVTKFMLCAGRWTGGKSTCSGDSGGPLVCNGVLQGITSWGSEPCALPERPSLYTKVVHYRKWIKDTIVANP

SEQ ID NO: 7544 - protein, 195 aa, Homo sapiens
MWVPVVFLTLSVTWIGAAPLILSRIVGGWECEKHSQPWQVLVASRGRAVCGGVLVHPQWVLTAAHCIRKPGDDSSHDLMLLRLSEPAELTDAVKVMDLPTQEPALGTTCYASGWGSIEPEEFLTPKKLQCVDLHVISNDVCAQVHPQKVTKFMLCAGRWTGGKSTCSWVILITELTMPALPMVLHGSLVPWRGGV

SEQ ID NO: 7545 - protein, 90 aa, Homo sapiens
MWVPVVFLTLSVTWIGAAPLILSRIVGGWECEKHSQPWQVLVASRGRAVCGGVLVHPQWVLTAAHCIRNKSVILLGRHSLFHPEDTGQAR

SEQ ID NO: 7546 - protein, 261 aa, Homo sapiens
MWVPVVFLTLSVTWIGAAPLILSRIVGGWECEKHSQPWQVLVASRGRAVCGGVLVHPQWVLTAAHCIRNKSVILLGRHSLFHPEDTGQVFQVSHSFPHPLYDMSLLKNRFLRPGDDSSHDLMLLRLSEPAELTDAVKVMDLPTQEPALGTTCYASGWGSIEPEEFLTPKKLQCVDLHVISNDVCAQVHPQKVTKFMLCAGRWTGGKSTCSGDSGGPLVCNGVLQGITSWGSEPCALPERPSLYTKVVHYRKWIKDTIVANP

SEQ ID NO: 7547 - protein, 227 aa, Homo sapiens
MWVPVVFLTLSVTWIGAAPLILSRIVGGWECEKHSQPWQVLVASRGRAVCGGVLVHPQWVLTAAHCIRNKSVILLGRHSLFHPEDTGQVFQVSHSFPHPLYDMSLLKNRFLRPGDDSSHDLMLLRLSEPAELTDAVKVMDLPTQEPALGTTCYASGWGSIEPEEFLTPKKLQCVDLHVISNDVCAQVHPQKVTKFMLCAGRWTGGKSTCSVSHPYSQDLEGKGEWGP

SEQ ID NO: 7548 - protein, 238 aa, Homo sapiens
MWVPVVFLTLSVTWIGAAPLILSRIVGGWECEKHSQPWQVLVASRGRAVCGGVLVHPQWVLTAAHCIRNKSVILLGRHSLFHPEDTGQVFQVSHSFPHPLYDMSLLKNRFLRPGDDSSHDLMLLRLSEPAELTDAVKVMDLPTQEPALGTTCYASGWGSIEPEEFLTPKKLQCVDLHVISNDVCAQVHPQKVTKFMLCAGRWTGGKSTCSWVILITELTMPALPMVLHGSLVPWRGGV

SEQ ID NO: 7549 - protein, 220 aa, Homo sapiens
MWVPVVFLTLSVTWIGAAPLILSRIVGGWECEKHSQPWQVLVASRGRAVCGGVLVHPQWVLTAAHCIRNKSVILLGRHSLFHPEDTGQVFQVSHSFPHPLYDMSLLKNRFLRPGDDSSIEPEEFLTPKKLQCVDLHVISNDVCAQVHPQKVTKFMLCAGRWTGGKSTCSGDSGGPLVCNGVLQGITSWGSEPCALPERPSLYTKVVHYRKWIKDTIVANP

SEQ ID NO: 7550 - protein, 124 aa, Homo sapiens
MWVPVVFLTLSVTWIGAAPLILSRIVGGWECEKHSQPWQVLVASRGRAVCGGVLVHPQWVLTAAHCIRNKSVILLGRHSLFHPEDTGQVFQVSHSFPHPLYDMSLLKNRFLRPGDDSTLNQRSS

SEQ ID NO: 7551 - protein, 104 aa, Homo sapiens
MWVPVVFLTLSVTWIGERGHGWGDAGEGASPDCQAEALSPPTQHPSPDRELGSFLSLPAPLQAHTPSPSILQQSSLPHQVPAPSHLPQNFLPIAQPAPCSQLLY

SEQ ID NO: 7552 - protein, 262 aa, Homo sapiens
  SITE 1: note = misc_feature - Xaa can be any naturally occurring amino acid
XFLTLSVTWIGAAPLILSRIVGGWECEKHSQPWQVLVASRGRAVCGGVLVHPQWVLTAAHCIRNKSVILLGRHSLFHPEDTGQVFQVSHSFPHPLYDMSLLKNRFLRPGDDSSHDLMLLRLSEPAELTDAVKVMDLPTQEPALGTTCYASGWGSIEPEECTPGPDVLTPKKLQCVDLHVISNDVCAQVHPQKVTKFMLCAGRWTGGKSTCSGDSGGPLVCNGVLQGITSWGSEPCALPERPSLYTKVVHYRKWIKDTIVANP

SEQ ID NO: 7553 - protein, 75 aa, Homo sapiens
MATAGNPWGWFLGYLILGVAGSLVSGSCSQIINGEDCSPHSQPWQAALVMENELFCSGVLVHPQWVLSAAHCFQK

SEQ ID NO: 7554 - protein, 254 aa, Homo sapiens
MATAGNPWGWFLGYLILGVAGSLVSGSCSQIINGEDCSPHSQPWQAALVMENELFCSGVLVHPQWVLSAAHCFQNSYTIGLGLHSLEADQEPGSQMVEASLSVRHPEYNRPLLANDLMLIKLDESVSESDTIRSISIASQCPTAGNSCLVSGWGLLANGRMPTVLQCVNVSVVSEEVCSKLYDPLYHPSMFCAGGGQDQKDSCNGDSGGPLICNGYLQGLVSFGKAPCGQVGVPGVYTNLCKFTEWIEKTVQAS

SEQ ID NO: 7555 - protein, 110 aa, Homo sapiens
MENELFCSGVLVHPQWVLSAAHCFQNSYTIGLGLHSLEADQEPGSQMVEASLSVRHPEYNRPLLANDLMLIKLDESVSESDTIRSISIASQCPTAGNSCLVSGWGLLANG

SEQ ID NO: 7556 - protein, 71 aa, Homo sapiens
MVEASLSVRHPEYNRPLLANDLMLIKLDESVSESDTIRSISIASQCPTAGNSCLVSGWGLLANECLPCCSA

SEQ ID NO: 7557 - protein, 71 aa, Homo sapiens; identical to SEQ ID NO: 7556

SEQ ID NO: 7558 - protein, 205 aa, Homo sapiens
MATARPPWMWVLCALITALLLGVTEHVLANNDVSCDHPSNTVPSGSNQDLGAGAGEDARSDDSSSRIINGSDCDMHTQPWQAALLLRPNQLYCGAVLVHPQWLLTAAHCRKKVFRVRLGHYSLSPVYESGQQMFQGVKSIPHPGYSHPGHSNDLMLIKLNRRIRPTKDVRPINVSSHCPSAGTKCLVSGWGTTKSPQVHFPKVLQ

SEQ ID NO: 7559 - protein, 293 aa, Homo sapiens
MATARPPWMWVLCALITALLLGVTEHVLANNDVSCDHPSNTVPSGSNQDLGAGAGEDARSDDSSSRIINGSDCDMHTQPWQAALLLRPNQLYCGAVLVHPQWLLTAAHCRKKVFRVRLGHYSLSPVYESGQQMFQGVKSIPHPGYSHPGHSNDLMLIKLNRRIRPTKDVRPINVSSHCPSAGTKCLVSGWGTTKSPQVHFPKVLQCLNISVLSQKRCEDAYPRQIDDTMFCAGDKAGRDSCQGDSGGPVVCNGSLQGLVSWGDYPCARPNRPGVYTNLCKFTKWIQETIQANS

SEQ ID NO: 7560 - protein, 293 aa, Homo sapiens; identical to SEQ ID NO: 7559

SEQ ID NO: 7561 - protein, 293 aa, Homo sapiens; identical to SEQ ID NO: 7559

SEQ ID NO: 7562 - protein, 69 aa, Homo sapiens
MADPATRHLTPTKLPSTPRATCSVVGSLSIHCGSSQLPTAKNRIFRSSWGSITFGKGRVPRSRVLLSGL

SEQ ID NO: 7563 - protein, 244 aa, Homo sapiens
MKKLMVVLSLIAAAWAEEQNKLVHGGPCDKTSHPYQAALYTSGHLLCGGVLIHPLWVLTAAHCKKPNLQVFLGKHNLRQRESSQEQSSVVRAVIHPDYDAASHDQDIMLLRLARPAKLSELIQPLPLERDCSANTTSCHILGWGKTADGDFPDTIQCAYIHLVSREECEHAYPGQITQNMLCAGDEKYGKDSCQGDSGGPLVCGDHLRGLVSWGNIPCGSKEKPGVYTNVCRYTNWIQKTIQAK

SEQ ID NO: 7564 - protein, 244 aa, Homo sapiens; identical to SEQ ID NO: 7563

SEQ ID NO: 7565 - protein, 244 aa, Homo sapiens; identical to SEQ ID NO: 7563

SEQ ID NO: 7566 - protein, 40 aa, Homo sapiens
MKKLMVVLSLIAAGIFRSSWGSITFGKGRVPRSRVLLSGL

SEQ ID NO: 7567 - protein, 40 aa, Homo sapiens; identical to SEQ ID NO: 7566

SEQ ID NO: 7568 - protein, 137 aa, Homo sapiens
MLLRLARPAKLSELIQPLPLERDCSANTTSCHILGWGKTADGDFPDTIQCAYIHLVSREECEHAYPGQITQNMLCAGDEKYGKDSCQGDSGGPLVCGDHLRGLVSWGNIPCGSKEKPGVYTNVCRYTNWIQKTIQAK

SEQ ID NO: 7569 - protein, 253 aa, Homo sapiens
MARSLLLPLQILLLSLALETAGEEAQGDKIIDGAPCARGSHPWQVALLSGNQLHCGGVLVNERWVLTAAHCKMNEYTVHLGSDTLGDRRAQRIKASKSFRHPGYSTQTHVNDLMLVKLNSQARLSSMVKKVRLPSRCEPPGTTCTVSGWGTTTSPDVTFPSDLMCVDVKLISPQDCTKVYKDLLENSMLCAGIPDSKKNACNGDSGGPLVCRGTLQGLVSWGTFPCGQPNDPGVYTQVCKFTKWINDTMKKHR

SEQ ID NO: 7570 - protein, 253 aa, Homo sapiens; identical to SEQ ID NO: 7569

SEQ ID NO: 7571 - protein, 66 aa, Homo sapiens
MARSLLLPLQILLLSLALETAGEEVSTPCTWAVIRWATGELRGSRPRSHSATPATPHRPMLMTSCS

SEQ ID NO: 7572 - protein, 69 aa, Homo sapiens
MNEYTVHLGSDTLGDRRAQRIKASKSFRHPGYSTQTHVNDLMLVKLNSQARLSSMVKKVRLPSRCEPPG

SEQ ID NO: 7573 - protein, 181 aa, Homo sapiens
MNEYTVHLGSDTLGDRRAQRIKASKSFRHPGYSTQTHVNDLMLVKLNSQARLSSMVKKVRLPSRCEPPGTTCTVSGWGTTTSPDVTFPSDLMCVDVKLISPQDCTKVYKDLLENSMLCAGIPDSKKNACNGDSGGPLVCRGTLQGLVSWGTFPCGQPNDPGVYTQVCKFTKWINDTMKKHR

SEQ ID NO: 7574 - protein, 305 aa, Homo sapiens
MGRPRPRAAKTWMFLLLLGGAWAACGSLDLLTKLYAENLPCVHLNPQWPSQPSHCPRGWRSNPLPPAAGHSRAQEDKVLGGHECQPHSQPWQAALFQGQQLLCGGVLVGGNWVLTAAHCKKPKYTVRLGDHSLQNKDGPEQEIPVVQSIPHPCYNSSDVEDHNHDLMLLQLRDQASLGSKVKPISLADHCTQPGQKCTVSGWGTVTSPRENFPDTLNCAEVKIFPQKKCEDAYPGQITDGMVCAGSSKGADTCQGDSGGPLVCDGALQGITSWGSDPCGRSDKPGVYTNICRYLDWIKKIIGSKG

SEQ ID NO: 7575 - protein, 119 aa, Homo sapiens
MGRPRPRAAKTWMFLLLLGGAWAENFPDTLNCAEVKIFPQKKCEDAYPGQITDGMVCAGSSKGADTCQGDSGGPLVCDGALQGITSWGSDPCGRSDKPGVYTNICRYLDWIKKIIGSKG

SEQ ID NO: 7576 - protein, 97 aa, Homo sapiens
MGRPRPRAAKTWMFLLLLGGAWAGHSRAQEDKVLGGHECQPHSQPWQAALFQGQQLLCGGVLVGGNWVLTAAHCKKPKYTVRLGDHSLQNKDGPEQE

SEQ ID NO: 7577 - protein, 260 aa, Homo sapiens
MGRPRPRAAKTWMFLLLLGGAWAGHSRAQEDKVLGGHECQPHSQPWQAALFQGQQLLCGGVLVGGNWVLTAAHCKKPKYTVRLGDHSLQNKDGPEQEIPVVQSIPHPCYNSSDVEDHNHDLMLLQLRDQASLGSKVKPISLADHCTQPGQKCTVSGWGTVTSPRENFPDTLNCAEVKIFPQKKCEDAYPGQITDGMVCAGSSKGADTCQGDSGGPLVCDGALQGITSWGSDPCGRSDKPGVYTNICRYLDWIKKIIGSKG

SEQ ID NO: 7578 - protein, 32 aa, Homo sapiens
MGRPRPRAAKTWMFLLLLGGAWAGRFWRPPGV

SEQ ID NO: 7579 - protein, 32 aa, Homo sapiens; identical to SEQ ID NO: 7578

SEQ ID NO: 7580 - protein, 139 aa, Homo sapiens
MLLQLRDQASLGSKVKPISLADHCTQPGQKCTVSGWGTVTSPRENFPDTLNCAEVKIFPQKKCEDAYPGQITDGMVCAGSSKGADTCQGDSGGPLVCDGALQGITSWGSDPCGRSDKPGVYTNICRYLDWIKKIIGSKG

SEQ ID NO: 7581 - protein, 54 aa, Homo sapiens
  SITE 1: note = misc_feature - Xaa can be any naturally occurring amino acid
XLLLLGGAWAGNTQYAWETTAYRIKMAQSKKYLWFSPSHTPATTAAMWRTTTMI

SEQ ID NO: 7582 - protein, 250 aa, Homo sapiens
MKLGLLCALLSLLAGHGWADTRAIGAEECRPNSQPWQAGLFHLTRLFCGATLISDRWLLTAAHCRKPYLWVRLGEHHLWKWEGPEQLFRVTDFFPHPGFNKDLSANDHNDDIMLIRLPRQARLSPAVQPLNLSQTCVSPGMQCLISGWGAVSSPKALFPVTLQCANISILENKLCHWAYPGHISDSMLCAGLWEGGRGSCQGDSGGPLVCNGTLAGVVSGGAEPCSRPRRPAVYTSVCHYLDWIQEIMEN

SEQ ID NO: 7583 - protein, 61 aa, Homo sapiens
MKLGLLCALLSLLAGICGSALESTTSGNGRVRSSCSGLRTSSPTLASTRTSAPMTTMMTSC

SEQ ID NO: 7584 - protein, 148 aa, Homo sapiens
MILFKQATYFISLFATVSCGCLTQLYENAFFRGGDVASMYTPNAQYCQMRCTFHPRCLLFSFLPASSINDMEKRFGCFLKDSVTGTLPKVHRTGAVSGHSLKQCGHQISACHRDIYKGVDMRGVNFNVSKVSSVEECQKRCTSNIRCQ

SEQ ID NO: 7585 - protein, 638 aa, Homo sapiens
MILFKQATYFISLFATVSCGCLTQLYENAFFRGGDVASMYTPNAQYCQMRCTFHPRCLLFSFLPASSINDMEKRFGCFLKDSVTGTLPKVHRTGAVSGHSLKQCGHQISACHRDIYKGVDMRGVNFNVSKVSSVEECQKRCTSNIRCQFFSYATQTFHKAEYRNNCLLKYSPGGTPTAIKVLSNVESGFSLKPCALSEIGCHMNIFQHLAFSDVDVARVLTPDAFVCRTICTYHPNCLFFTFYTNVWKIESQRNVCLLKTSESGTPSSSTPQENTISGYSLLTCKRTLPEPCHSKIYPGVDFGGEELNVTFVKGVNVCQETCTKMIRCQFFTYSLLPEDCKEEKCKCFLRLSMDGSPTRIAYGTQGSSGYSLRLCNTGDNSVCTTKTSTRIVGGTNSSWGEWPWQVSLQVKLTAQRHLCGGSLIGHQWVLTAAHCFDGLPLQDVWRIYSGILNLSDITKDTPFSQIKEIIIHQNYKVSEGNHDIALIKLQAPLNYTEFQKPICLPSKGDTSTIYTNCWVTGWGFSKEKGEIQNILQKVNIPLVTNEECQKRYQDYKITQRMVCAGYKEGGKDACKGDSGGPLVCKHNGMWRLVGITSWGEGCARREQPGVYTKVAEYMDWILEKTQSSDGKAQMQSPA

SEQ ID NO: 7586 - protein, 141 aa, Homo sapiens
MYTPNAQYCQMRCTFHPRCLLFSFLPASSINDMEKRFGCFLKDSVTGTLPKVHRTGAVSGHSLKQCGHQISACHRDIYKGVDMRGVNFNVSKVSSVEECQKRCTSNIRCQFFSYATQTFHKAEYRNNCLLKYSPGGTPTAI

SEQ ID NO: 7587 - protein, 514 aa, Homo sapiens
MYTPNAQYCQMRCTFHPRCLLFSFLPASSINDMEKRFGCFLKDSVTGTLPKVHRTGAVSGHSLKQCGHQISACHRDIYKGVDMRGVNFNVSKVSSVEECQKRCTSNIRCQFFSYATQTFHKAEYRNNCLLKYSPGGTPTAIKVLSNVESGFSLKPCALSEIGCHMNIFQHLAFSDVDVARVLTPDAFVCRTICTYHPNCLFFTFYTNVWKIESQRNVCLLKTSESGTPSSSTPQENTISGYSLLTCKRTLPEPCHSKIYPGVDFGGEELNVTFVKGVNVCQETCTKMIRCQFFTYSLLPEDCKEEKCKCFLRLSMDGSPTRIAYGTQGSSGYSLRLCNTGDNSVCTTKTSTRIVGGTNSSWGEWPWQVSLQVKLTAQRHLCGGSLIGHQWVLTAAHCFDGLPLQDVWRIYSGILNLSDITKDTPFSQIKEIIIHQNYKVSEGNHDIALIKLQAPLNYTEFQKPICLPSKGDTSTIYTNCWVTGWGFSKEKGRFRWSLSLQTQWNVAFGGHHQLG

SEQ ID NO: 7588 - protein, 686 aa, Homo sapiens
  SITE 1: note = misc_feature - Xaa can be any naturally occurring amino acid
XSEDCEVAGYRVLKGTEAVIIPYALHRDPRYFPNPEEFQPERFFPENAQGRHPYAYVPFSAGPRNCIGCLTQLYENAFFRGGDVASMYTPNAQYCQMRCTFHPRCLLFSFLPASSINDMEKRFGCFLKDSVTGTLPKVHRTGAVSGHSLKQCGHQISACHRDIYKGVDMRGVNFNVSKVSSVEECQKRCTSNIRCQFFSYATQTFHKAEYRNNCLLKYSPGGTPTAIKVLSNVESGFSLKPCALSEIGCHMNIFQHLAFSDVDVARVLTPDAFVCRTICTYHPNCLFFTFYTNVWKIESQRNVCLLKTSESGTPSSSTPQENTISGYSLLTCKRTLPEPCHSKIYPGVDFGGEELNVTFVKGVNVCQETCTKMIRCQFFTYSLLPEDCKEEKCKCFLRLSMDGSPTRIAYGTQGSSGYSLRLCNTGDNSVCTTKTSTRIVGGTNSSWGEWPWQVSLQVKLTAQRHLCGGSLIGHQWVLTAAHCFDGLPLQDVWRIYSGILNLSDITKDTPFSQIKEIIIHQNYKVSEGNHDIALIKLQAPLNYTEFQKPICLPSKGDTSTIYTNCWVTGWGFSKEKGEIQNILQKVNIPLVTNEECQKRYQDYKITQRMVCAGYKEGGKDACKGDSGGPLVCKHNGMWRLVGITSWGEGCARREQPGVYTKVAEYMDWILEKTQSSDGKAQMQSPA

SEQ ID NO: 7589 - protein, 91 aa, Homo sapiens
MARGERIYRAVKDLFLHEPEQMLWNAFPPSGRELSYTSRSQMPGETISRNLQETRREKKCWERSTERHEVRGTEDQRRQERSPGTFSKPKI

SEQ ID NO: 7590 - protein, 352 aa, Homo sapiens
MARGRKMSKPRAVEAAAAAAAVAATAPGPEMVERRGPGRPRTDGENVFTGQSKIYSYMSPNKCSGMRFPLQEENSVTHHEVKCQGKPLAGIYRKREEKRNAGNAVRSAMKSEEQKIKDARKGPLVPFPNQKSEAAEPPKTPPSSCDSTNAAIAKQALKKPIKGKQAPRKKAQGKTQQNRKLTDFYPVRRSSRKSKAELQSEERKRIDELIESGKEEGMKIDLIDGKGRGVIATKQFSRGDFVVEYHGDLIEITDAKKREALYAQDPSTGCYMYYFQYLSKTYCVDATRETNRLGRLINHSKCGNCQTKLHDIDGVPHLILIASRDIAAGEELLYDYGDRSKASIEAHPWLKH

SEQ ID NO: 7591 - protein, 299 aa, Homo sapiens
MRWLWLLLFPDSPVTLREVLPSQPWRLRGCSDLRGENVFTGQSKIYSYMSPNKCSGMRFPLQEENSVTHHEVKCQGKPLAGIYRKREEKRNAGNAVRSAMKSEEQKIKDARKGPLVPFPNQKSEAAEPPKTPPSSCDSTNAAIAKQALKKPIKGKQAPRKKAQGKTQQNRKLTDFYPVRRSSRKSKAELQSEERKRIDELIESGKEEGMKIDLIDGKGRGVIATKQFSRGDFVVEYHGDLIEITDAKKREALYAQDPSTGCYMYYFQYLSKTYCVDATRETNRLGRLINHSKCGNCQTK

SEQ ID NO: 7592 - protein, 322 aa, Homo sapiens
MVERRGPGRPRTDGENVFTGQSKIYSYMSPNKCSGMRFPLQEENSVTHHEVKCQGKPLAGIYRKREEKRNAGNAVRSAMKSEEQKIKDARKGPLVPFPNQKSEAAEPPKTPPSSCDSTNAAIAKQALKKPIKGKQAPRKKAQGKTQQNRKLTDFYPVRRSSRKSKAELQSEERKRIDELIESGKEEGMKIDLIDGKGRGVIATKQFSRGDFVVEYHGDLIEITDAKKREALYAQDPSTGCYMYYFQYLSKTYCVDATRETNRLGRLINHSKCGNCQTKLHDIDGVPHLILIASRDIAAGEELLYDYGDRSKASIEAHPWLKH

SEQ ID NO: 7593 - protein, 1749 aa, Homo sapiens
MQAMDPAAADLYEEDGKDLDFYDFEPLPTLPEDEENVSLADILSLRDRGLSEQEAWAVCLECSLSMRSVAHAAIFQSLCITPDTLAFNTSGNVCFMEQLSDDPEGAFVPPEFDVTGNTFEAHIYSLGATLKAALEYVAEPTLEPRLSQDLEALLSRMQAEDPGDRPDLESIIALCEEKLQLTSSCRVCRSLSAVGRRVLSIESFGALQDVSESSWRERPAPGNAGPRRPPGDPSTDPEVLPTPEGPESETSRGPRASPTKALLSTPVRNGESHSREGLAGLVLDAERTLGELDRDALRRSRLRKVQTFPRLLSDSPEATLCLPLTRGKSQLPISELFSPDPRKAFLDRKNGLSSFQAQPKCRLWPEQEPEHQLGRVPCAGRSTDRGPGVPGSPGQPETSHPSQGPAEAPADPRDASGEAQTPRDDERIPEGARQLESAAAEQWVSLQDLLSQLGRPFREYELWALCLACLRALQTRPEHPAYLCLDSVLVAEDGAVLFQPPPANGSYDSFFLAPELAEERLVTEKASVYCVAAVLWTAAKFSVPRNHKLALPRRLKTLLLDMARRSAPERPSAAEAIKVCGSYLLQRGMDSRKILAHLRASICQVYQEEETISLQNAFSVVELKPSVAPAPEPSPGFLPVNSDTGLVAVPGPVPGQHPCGEEATQLPAAFTSEATHFKPIVLAQNASVARDQPALAQEESEERGGQREGEGEEKLSLEAHAGSPSLKTPDGPVPGPGPQGAAPEPLGASVQRDSAQGRPCPPPQAPANQPEGASSAAPGSPVPAPPTKASALPVEQGPAEPIPPGVASGGLRPDALGPTTAHHGPRHPPKPPRSKATERPGQEPEGPGATPAGERDDQSPDSVPERPRPADRRLCLPCVDASPLPGRTACPSLQEATRLIQEEFAFDGYLDNGLEALIMGEYIFALKDLTFATFCGAISEKFCDLYWDEKLLQNLFKVVNGQASPSPSTAEEAGSQLEGSQSPRSPSSKRPSLHRLGKEKPAMARTSSRAPCSPTSVSDVDSDALSRGNFEVGFRPQRSVKAERAQQPEAGEDRRPAGGASDVEAVTRLARSKGVGPALSPGPAGFQSCSPGWCSAFYEADCFGADVHNYVKDLGRQQADGALPDAQSPELEQQLMMEKRNYRKTLKFYQKLLQKEKRNKGSDVKTMLSKLKGQLEEMKSRVQFLSLVKKYLQVMYAERWGLEPCTLPVIVNIAAAPCDTLDFSPLDESSSLIFYNVNKHPGGRQKARILQAGTPLGLMAYLYSSDAFLEGYVQQFLYTFRYFCTPHDFLHFLLDRINSTLTRAHQDPTSTFTKIYRRSLCVLQAWVEDCYAVDFPRNSGLLGKLEDFISSKILPLDGSAKHLLGLLEVGMDRRAEGNPRGTDLENPREAEEDARPFNALCKRLSEDGISRKSFPWRLPRGNGLVLPPHKERPYTIAAALPKPCFLEDFYGPCAKTSEKGPYFLTEYSTHQLFSQLTLLQQELFQKCHPVHFLNSRALGVMDKSTAIPKASSSESLSAKTCSLFLPNYVQDKYLLQLLRNADDVSTWVAAEIVTSHTSKLQVNLLSKFLLIAKSCYEQRNFATAMQILSGLEHLAVRQSPAWRILPAKIAEVMEELKAVEVFLKSDSLCLMEGRRFRAQPTLPSAHLLAMHIQQLETGGFTMTNGAHRWSKLRNIAKVVSQVHAFQENPYTFSPDPKLQSYLKQRIARFSGADISTLAADSRANFHQVSSEKHSRKIQDKLRRMKATFQ

SEQ ID NO: 7594 - protein, 1141 aa, Homo sapiens
MRSVAHAAIFQSLCITPDTLAFNTSGNVCFMEQLSDDPEGAFVPPEFDVTGNTFEAHIYSLGATLKAALEYVAEPTLEPRLSQDLEALLSRMQAEDPGDRPDLESIIALCEEKLQLTSSCRVCRSLSAVGRRVLSIESFGALQDVSESSWRERPAPGNAGPRRPPGDPSTDPEVLPTPEGPESETSRGPRASPTKALLSTPVRNGESHSREGLAGLVLDAERTLGELDRDALRRSRLRKVQTFPRLLSDSPEATLCLPLTRGKSQLPISELFSPDPRKAFLDRKNGLSSFQAQPKCRLWPEQEPEHQLGRVPCAGRSTDRGPGVPGSPGQPETSHPSQGPAEAPADPRDASGEAQTPRDDERIPEGARQLESAAAEQWVSLQDLLSQLGRPFREYELWALCLACLRALQTRPEHPAYLCLDSVLVAEDGAVLFQPPPANGSYDSFFLAPELAEERLVTEKASVYCVAAVLWTAAKFSVPRNHKLALPRRLKTLLLDMARRSAPERPSAAEAIKVCGSYLLQRGMDSRKILAHLRASICQVYQEEETISLQNAFSVVELKPSVAPAPEPSPGFLPVNSDTGLVAVPGPVPGQHPCGEEATQLPAAFTSEATHFKPIVLAQNASVARDQPALAQEESEERGGQREGEGEEKLSLEAHAGSPSLKTPDGPVPGPGPQGAAPEPLGASVQRDSAQGRPCPPPQAPANQPEGASSAAPGSPVPAPPTKASALPVEQGPAEPIPPGVASGGLRPDALGPTTAHHGPRHPPKPPRSKATERPGQEPEGPGATPAGERDDQSPDSVPERPRPADRRLCLPCVDASPLPGRTACPSLQEATRLIQEEFAFDGYLDNGLEALIMGEYIFALKDLTFATFCGAISEKFCDLYWDEKLLQNLFKVVNGQASPSPSTAEEAGSQLEGSQSPRSPSSKRPSLHRLGKEKPAMARTSSRAPCSPTSVSDVDSDALSRGNFEVGFRPQRSVKAERAQQPEAGEDRRPAGGASDVEAVTRLARSKGVGPALSPGPAGFQSCSPGWCSAFYEADCFGADVHNYVKDLGRQQADGALPDAQSPELEQQLMMEKRNYRKTLKFYQKLLQKEKRNKGSDVKTMLSKLKGQLEEMKSRVQFLSLVKKYLQASGLRAPLCPVRQ

SEQ ID NO: 7595 - protein, 391 aa, Homo sapiens
MKLITILFLCSRLLLSLTQESQSEEIDCNDKDLFKAVDAALKKYNSQNQSNNQFVLYRITEATKTVGSDTFYSFKYEIKEGDCPVQSGKTWQDCEYKDAAKAATGECTATVGKRSSTKFSVATQTCQITPAEGPVVTAQYDCLGCVHPISTQSPDLEPILRHGIQYFNNNTQHSSLFMLNEVKRAQRQDTGECTDNAYIDIQLRIASFSQNCDIYPGKDFVQPPTKICVGCPRDIPTNSPELEETLTHTITKLNAENNATFYFKIDNVKKARVQVVAGKKYFIDFVARETTCSKESNEELTESCETKKLGQSLDCNAEVYVVPWEKKIYPTVNCQPLGMISLMKRPPGFSPFRSSRIGEIKEETTSHLRSCEYKGRPPKAGAEPASEREVS

SEQ ID NO: 7596 - protein, 427 aa, Homo sapiens
MKLITILFLCSRLLLSLTQESQSEEIDCNDKDLFKAVDAALKKYNSQNQSNNQFVLYRITEATKTVGSDTFYSFKYEIKEGDCPVQSGKTWQDCEYKDAAKAATGECTATVGKRSSTKFSVATQTCQITPAEGPVVTAQYDCLGCVHPISTQSPDLEPILRHGIQYFNNNTQHSSLFMLNEVKRAQRQVVAGLNFRITYSIVQTNCSKENFLFLTPDCKSLWNGDTGECTDNAYIDIQLRIASFSQNCDIYPGKDFVQPPTKICVGCPRDIPTNSPELEETLTHTITKLNAENNATFYFKIDNVKKARVQVVAGKKYFIDFVARETTCSKESNEELTESCETKKLGQSLDCNAEVYVVPWEKKIYPTVNCQPLGMISLMKRPPGFSPFRSSRIGEIKEETTSHLRSCEYKGRPPKAGAEPASEREVS

SEQ ID NO: 7597 - protein, 644 aa, Homo sapiens
MKLITILFLCSRLLLSLTQESQSEEIDCNDKDLFKAVDAALKKYNSQNQSNNQFVLYRITEATKTVGSDTFYSFKYEIKEGDCPVQSGKTWQDCEYKDAAKAATGECTATVGKRSSTKFSVATQTCQITPAEGPVVTAQYDCLGCVHPISTQSPDLEPILRHGIQYFNNNTQHSSLFMLNEVKRAQRQVVAGLNFRITYSIVQTNCSKENFLFLTPDCKSLWNGDTGECTDNAYIDIQLRIASFSQNCDIYPGKDFVQPPTKICVGCPRDIPTNSPELEETLTHTITKLNAENNATFYFKIDNVKKARVQVVAGKKYFIDFVARETTCSKESNEELTESCETKKLGQSLDCNAEVYVVPWEKKIYPTVNCQPLGMISLMKRPPGFSPFRSSRIGEIKEETTVSPPHTSMAPAQDEERDSGKEQGHTRRHDWGHEKQRKHNLGHGHKHERDQGHGHQRGHGLGHGHEQQHGLGHGHKFKLDDDLEHQGGHVLDHGHKHKHGHGHGKHKNKGKKNGKHNGWKTEHLASSSEDSTTPSAQTQEKTEGPTPIPSLAKPGVTVTFSDFQDSDLIATMMPPISPAPIQSDDDWIPDIQIDPNGLSFNPISDFPDTTSPKCPGRPWKSVSEINPTTQMKESYYFDLTDGLS

SEQ ID NO: 7598 - protein, 427 aa, Homo sapiens; identical to SEQ ID NO: 7596

SEQ ID NO: 7599 - protein, 644 aa, Homo sapiens; identical to SEQ ID NO: 7597

SEQ ID NO: 7600 - protein, 458 aa, Homo sapiens
MLFQEATAFENMTKDWNYLEGSQKDCYRDTMLDSYENTVPQGSFLQLSMMPQRAGNDPPGVSNASEMEMEISNMREKFLMSVTKLVESKSYNSKVFSKEKYFQTIKEVKEAKEKGKKSSRDYRRAAKYDVISVQGTEKLIEATHGERDRIRYYVHKEELFDILHDTHLSIGHGGRTRMLKELQGKYGNVTKEVIVLYLTLCKQCHQKNPVPKRGLAPKPMTFKDIDSTCQVEILDMQSSADGEFKFILYYQDHSTKFIILRPLRTKQAHEVVSVLLDIFTILGTPSVLDSDSGVEFTNQVVHELNELWPDLKIVSGKYHPGQSQGSLEGASRDVKNMISTWMQSNHSCHWAKGLRFMQMVRNQAFDVSLQQSPFEAMFGYKAKFGLYSSNLPRETVATLQTEEELEIAEEQLENSLWIRQEERAEIGADRSDMDDDMDPTPEASEPSTSQGTSGLLCW

SEQ ID NO: 7601 - protein, 410 aa, Homo sapiens
MMPQRAGNDPPGVSNASEMEMEISNMREKFLMSVTKLVESKSYNSKVFSKEKYFQTIKEVKEAKEKGKKSSRDYRRAAKYDVISVQGTEKLIEATHGERDRIRYYVHKEELFDILHDTHLSIGHGGRTRMLKELQGKYGNVTKEVIVLYLTLCKQCHQKNPVPKRGLAPKPMTFKDIDSTCQVEILDMQSSADGEFKFILYYQDHSTKFIILRPLRTKQAHEVVSVLLDIFTILGTPSVLDSDSGVEFTNQVVHELNELWPDLKIVSGKYHPGQSQGSLEGASRDVKNMISTWMQSNHSCHWAKGLRFMQMVRNQAFDVSLQQSPFEAMFGYKAKFGLYSSNLPRETVATLQTEEELEIAEEQLENSLWIRQEERAEIGADRSDMDDDMDPTPEASEPSTSQGTSGLLCW

SEQ ID NO: 7602 - protein, 492 aa, Homo sapiens
MPSFLVPSLVSSPVLLKLLFSPGPKTIWSLWQQPMLFQEATAFENMTKDWNYLEGSQKDCYRDTMLDSYENTVPQGSFLQLSMMPQRAGNDPPGVSNASEMEMEISNMREKFLMSVTKLVESKSYNSKVFSKEKYFQTIKEVKEAKEKGKKSSRDYRRAAKYDVISVQGTEKLIEATHGERDRIRYYVHKEELFDILHDTHLSIGHGGRTRMLKELQGKYGNVTKEVIVLYLTLCKQCHQKNPVPKRGLAPKPMTFKDIDSTCQVEILDMQSSADGEFKFILYYQDHSTKFIILRPLRTKQAHEVVSVLLDIFTILGTPSVLDSDSGVEFTNQVVHELNELWPDLKIVSGKYHPGQSQGSLEGASRDVKNMISTWMQSNHSCHWAKGLRFMQMVRNQAFDVSLQQSPFEAMFGYKAKFGLYSSNLPRETVATLQTEEELEIAEEQLENSLWIRQEERAEIGADRSDMDDDMDPTPEASEPSTSQGTSGLLCW

SEQ ID NO: 7603 - protein, 492 aa, Homo sapiens; identical to SEQ ID NO: 7602

SEQ ID NO: 7604 - protein, 462 aa, Homo sapiens
MGTQALQGFLFLLFLPLLQPRGASAGSLHSPGLSECFQVNGADYRGHQNRTGPRGAGRPCLFWDQTQQHSYSSASDPHGRWGLGAHNFCRNPDGDVQPWCYVAETEEGIYWRYCDIPSCHMPGYLGCFVDSGAPPALSGPSGTSTKLTVQVCLRFCRMKGYQLAGVEAGYACFCGSESDLARGRLAPATDCDQICFGHPGQLCGGDGRLGVYEVSVGSCQGNWTAPQGVIYSPDFPDEYGPDRNCSWALGPPGAALELTFRLFELADPRDRLELRDAASGSLLRAFDGARPPPSGPLRLGTAALLLTFRSDARGHAQGFALTYRGLQDAAEDPEAPEGSAQTPAAPLDGANVSCSPRPGAPPAAIGARVFSTVTAVSVLLLLLLGLLRPLRRRSCLLAPGKGPPALGASRGPRRSWAVWYQQPRGVALPCSPGDPQAEGSAAGYRPLSASSQSSLRSLISAL

SEQ ID NO: 7605 - protein, 420 aa, Homo sapiens
MGTQALQGFLFLLFLPLLQPRGASAGSLHSPGLSECFQVNGADYRGHQNRTGPRGAGRPCLFWDQTQQHSYSSASDPHGRWGLGAHNFCRNPDGDVQPWCYVAETEEGIYWRYCDIPSCHMPGYLGCFVDSGAPPALSGPSGTSTKLTVQVCLRFCRMKGYQLAGVEAGYACFCGSESDLARGRLAPATDCDQICFGHPGQLCGGDGRLGVYEVSVGSCQGNWTAPQGVIYSPDFPDEYGPDRNCSWALGPPGAALELTFRLFELADPRDRLELRDAASGSLLRAFDGARPPPSGPLRLGTAALLLTFRSDARGHAQGFALTYRGLQDAAEDPEAPEGSAQTPAAPLDGANVSCSPRPGAPPAAIGGAVCWLREKGPRRWGLPGAPGEAGLCGTNSPEGWPCPAPPGTPRLRVLPRATGL

SEQ ID NO: 7606 - protein, 399 aa, Homo sapiens
MGTQALQGFLFLLFLPLLQPRGASAGSLHSPGLSECFQVNGADYRGHQNRTGPRGAGRPCLFWDQTQQHSYSSASDPHGRWGLGAHNFCRNPDGDVQPWCYVAETEEGIYWRYCDIPSCHMPGYLGCFVDSGAPPALSGPSGTSTKLTVQVCLRFCRMKGYQLAGVEAGYACFCGSESDLARGRLAPATDCDQICFGHPGQLCGGDGRLGVYEVSVGSCQGNWTAPQGVIYSPDFPDEYGPDRNCSWALGPPGAALELTFRLFELADPRDRLELRDAASGSLLRAFDGARPPPSGPLRLGTAALLLTFRSDARGHAQGFALTYRGLQDAAEDPEAPEGSAQTPAAPLDGANVSCSPRPGAPPAAIGGEAGARDGSESGSRPLAPILTAAVCPQPGSSRR

SEQ ID NO: 7607 - protein, 424 aa, Homo sapiens
MGTQALQGFLFLLFLPLLQPRGASAGSLHSPGLSECFQVNGADYRGHQNRTGPRGAGRPCLFWDQTQQHSYSSASDPHGRWGLGAHNFCRNPDGDVQPWCYVAETEEGIYWRYCDIPSCHMPGYLGCFVDSGAPPALSGPSGTSTKLTVQVCLRFCRMKGYQLAGVEAGYACFCGSESDLARGRLAPATDCDQICFGHPGQLCGGDGRLGVYEVSVGSCQGNWTAPQGVIYSPDFPDEYGPDRNCSWALGPPGAALELTFRLFELADPRDRLELRDAASGSLLRAFDGARPPPSGPLRLGTAALLLTFRSDARGHAQGFALTYRGLQDAAEDPEAPEGSAQTPAAPLDGANVSCSPRPGAPPAAIGARVFSTVTAVSVLLLLLLGLLRPLRRRCGALGQGLRADRWWGAGAPEGNRARKELLGS

SEQ ID NO: 7608 - protein, 381 aa, Homo sapiens
MGTQALQGFLFLLFLPLLQPRGASAGSLHSPGLSECFQVNGADYRGHQNRTGPRGAGRPCLFWDQTQQHSYSSASDPHGRWGLGAHNFCRNPDGDVQPWCYVAETEEGIYWRYCDIPSCHMPGYLGCFVDSGAPPALSGPSGTSTKLTVQVCLRFCRMKGYQLCGGDGRLGVYEVSVGSCQGNWTAPQGVIYSPDFPDEYGPDRNCSWALGPPGAALELTFRLFELADPRDRLELRDAASGSLLRAFDGARPPPSGPLRLGTAALLLTFRSDARGHAQGFALTYRGLQDAAEDPEAPEGSAQTPAAPLDGANVSCSPRPGAPPAAIGGAVCWLREKGPRRWGLPGAPGEAGLCGTNSPEGWPCPAPPGTPRLRVLPRATGL

SEQ ID NO: 7609 - protein, 423 aa, Homo sapiens
MGTQALQGFLFLLFLPLLQPRGASAGSLHSPGLSECFQVNGADYRGHQNRTGPRGAGRPCLFWDQTQQHSYSSASDPHGRWGLGAHNFCRNPDGDVQPWCYVAETEEGIYWRYCDIPSCHMPGYLGCFVDSGAPPALSGPSGTSTKLTVQVCLRFCRMKGYQLCGGDGRLGVYEVSVGSCQGNWTAPQGVIYSPDFPDEYGPDRNCSWALGPPGAALELTFRLFELADPRDRLELRDAASGSLLRAFDGARPPPSGPLRLGTAALLLTFRSDARGHAQGFALTYRGLQDAAEDPEAPEGSAQTPAAPLDGANVSCSPRPGAPPAAIGARVFSTVTAVSVLLLLLLGLLRPLRRRSCLLAPGKGPPALGASRGPRRSWAVWYQQPRGVALPCSPGDPQAEGSAAGYRPLSASSQSSLRSLISAL

SEQ ID NO: 7610 - protein, 85 aa, Homo sapiens
MKIPVLPAVVLLSLLVLHSAQGATLGGPEEESTIENYASRPEAFKADEFLNWHALFESIKRKLPFLNWDAFPKLKGLRSATPDAQ

SEQ ID NO: 7611 - protein, 99 aa, Homo sapiens
MKIPVLPAVVLLSLLVLHSAQGATLGGPEEESTIENYASRPEAFNTPFLNIDKLRSAFKADEFLNWHALFESIKRKLPFLNWDAFPKLKGLRSATPDAQ

SEQ ID NO: 7612 - protein, 153 aa, Homo sapiens
EEKGGASLSPQYVSYNQSSYTQWDLQPDTDYEIHLFKERMFRHQMAVKTNGTVKDKEDTQVDSEARPMKDETFGEYSDNEEKAFGSSQPSLNGDIKPLGSDDSLADYGGSVDVQFNEDGSFIGQYSGKKEKEAAGGNDSSGATSPINPAVALE

SEQ ID NO: 7613 - protein, 90 aa, Homo sapiens
MVVALRYVWPLLLCSPCLLIQIPEELMEPPVITEQSPRRLVVFPTDDISLKCEASGKPEVQFRWTRDGVHFKPKEELGVTVYQSPHSGSF

SEQ ID NO: 7614 - protein, 128 aa, Homo sapiens
MVVALRYVWPLLLCSPCLLIQIPEELMEPPVITEQSPRRLVVFPTDDISLKCEASGKPEVQFRWTRDGVHFKPKEELGVTVYQSPHSGSFTITGNNSNFAQRFQGIYRCFASNKLGTAMSHEIRLMAE

SEQ ID NO: 7615 - protein, 1248 aa, Homo sapiens
MVVALRYVWPLLLCSPCLLIQIPEELMEPPVITEQSPRRLVVFPTDDISLKCEASGKPEVQFRWTRDGVHFKPKEELGVTVYQSPHSGSFTITGNNSNFAQRFQGIYRCFASNKLGTAMSHEIRLMAEGAPKWPKETVKPVEVEEGESVVLPCNPPPSAEPLRIYWMNSKILHIKQDERVTMGQNGNLYFANVLTSDNHSDYICHAHFPGTRTIIQKEPIDLRVKATNSMIDRKPRLLFPTNSSSHLVALQGQPLVLECIAEGFPTPTIKWLRPSGPMPADRVTYQNHNKTLQLLKVGEEDDGEYRCLAENSLGSARHAYYVTVEAAPYWLHKPQSHLYGPGETARLDCQVQGRPQPEVTWRINGIPVEELAKDQKYRIQRGALILSNVQPSDTMVTQCEARNRHGLLLANAYIYVVQLPAKILTADNQTYMAVQGSTAYLLCKAFGAPVPSVQWLDEDGTTVLQDERFFPYANGTLGIRDLQANDTGRYFCLAANDQNNVTIMANLKVKDATQITQGPRSTIEKKGSRVTFTCQASFDPSLQPSITWRGDGRDLQELGDSDKYFIEDGRLVIHSLDYSDQGNYSCVASTELDVVESRAQLLVVGSPGPVPRLVLSDLHLLTQSQVRVSWSPAEDHNAPIEKYDIEFEDKEMAPEKWYSLGKVPGNQTSTTLKLSPYVHYTFRVTAINKYGPGEPSPVSETVVTPEAAPEKNPVDVKGEGNETTNMVITWKPLRWMDWNAPQVQYRVQWRPQGTRGPWQEQIVSDPFLVVSNTSTFVPYEIKVQAVNSQGKGPEPQVTIGYSGEDYPQAIPELEGIEILNSSAVLVKWRPVDLAQVKGHLRGYNVTYWREGSQRKHSKRHIHKDHVVVPANTTSVILSGLRPYSSYHLEVQAFNGRGSGPASEFTFSTPEGVPGHPEALHLECQSNTSLLLRWQPPLSHNGVLTGYVLSYHPLDEGGKGQLSFNLRDPELRTHNLTDLSPHLRYRFQLQATTKEGPGEAIVREGGTMALSGISDFGNISATAGENYSVVSWVPKEGQCNFRFHILFKALGEEKGGASLSPQYVSYNQSSYTQWDLQPDTDYEIHLFKERMFRHQMAVKTNGTGRVRLPPAGFATEGWFIGFVSAIILLLLVLLILCFIKRSKGGKYSVKDKEDTQVDSEARPMKDETFGEYSDNEEKAFGSSQPSLNGDIKPLGSDDSLADYGGSVDVQFNEDGSFIGQYSGKKEKEAAGGNDSSGATSPINPAVALE

SEQ ID NO: 7616 - protein, 1248 aa, Homo sapiens; identical to SEQ ID NO: 7615

SEQ ID NO: 7617 - protein, 84 aa, Homo sapiens
MVVALRYVWPLLLCSPCLLIQIPEEYEGHHVMEPPVITEQSPRRLVVFPTDDISLKCEASGKPEVQFRWTRDGVHFKPKEELGV

SEQ ID NO: 7618 - protein, 151 aa, Homo sapiens
MVVALRYVWPLLLCSPCLLIQIPEEYEGHHVMEPPVITEQSPRRLVVFPTDDISLKCEASGKPEVQFRWTRDGVHFKPKEELGVTVYQSPHSGSFTITGNNSNFAQRFQGIYRCFASNKLGTAMSHEIRLMAEGAPKWPKETVKPVEVEEG

SEQ ID NO: 7619 - protein, 1253 aa, Homo sapiens
MVVALRYVWPLLLCSPCLLIQIPEEYEGHHVMEPPVITEQSPRRLVVFPTDDISLKCEASGKPEVQFRWTRDGVHFKPKEELGVTVYQSPHSGSFTITGNNSNFAQRFQGIYRCFASNKLGTAMSHEIRLMAEGAPKWPKETVKPVEVEEGESVVLPCNPPPSAEPLRIYWMNSKILHIKQDERVTMGQNGNLYFANVLTSDNHSDYICHAHFPGTRTIIQKEPIDLRVKATNSMIDRKPRLLFPTNSSSHLVALQGQPLVLECIAEGFPTPTIKWLRPSGPMPADRVTYQNHNKTLQLLKVGEEDDGEYRCLAENSLGSARHAYYVTVEAAPYWLHKPQSHLYGPGETARLDCQVQGRPQPEVTWRINGIPVEELAKDQKYRIQRGALILSNVQPSDTMVTQCEARNRHGLLLANAYIYVVQLPAKILTADNQTYMAVQGSTAYLLCKAFGAPVPSVQWLDEDGTTVLQDERFFPYANGTLGIRDLQANDTGRYFCLAANDQNNVTIMANLKVKDATQITQGPRSTIEKKGSRVTFTCQASFDPSLQPSITWRGDGRDLQELGDSDKYFIEDGRLVIHSLDYSDQGNYSCVASTELDVVESRAQLLVVGSPGPVPRLVLSDLHLLTQSQVRVSWSPAEDHNAPIEKYDIEFEDKEMAPEKWYSLGKVPGNQTSTTLKLSPYVHYTFRVTAINKYGPGEPSPVSETVVTPEAAPEKNPVDVKGEGNETTNMVITWKPLRWMDWNAPQVQYRVQWRPQGTRGPWQEQIVSDPFLVVSNTSTFVPYEIKVQAVNSQGKGPEPQVTIGYSGEDYPQAIPELEGIEILNSSAVLVKWRPVDLAQVKGHLRGYNVTYWREGSQRKHSKRHIHKDHVVVPANTTSVILSGLRPYSSYHLEVQAFNGRGSGPASEFTFSTPEGVPGHPEALHLECQSNTSLLLRWQPPLSHNGVLTGYVLSYHPLDEGGKGQLSFNLRDPELRTHNLTDLSPHLRYRFQLQATTKEGPGEAIVREGGTMALSGISDFGNISATAGENYSVVSWVPKEGQCNFRFHILFKALGEEKGGASLSPQYVSYNQSSYTQWDLQPDTDYEIHLFKERMFRHQMAVKTNGTGRVRLPPAGFATEGWFIGFVSAIILLLLVLLILCFIKRSKGGKYSVKDKEDTQVDSEARPMKDETFGEYSDNEEKAFGSSQPSLNGDIKPLGSDDSLADYGGSVDVQFNEDGSFIGQYSGKKEKEAAGGNDSSGATSPINPAVALE

SEQ ID NO: 7620 - protein, 1257 aa, Homo sapiens
MVVALRYVWPLLLCSPCLLIQIPEEYEGHHVMEPPVITEQSPRRLVVFPTDDISLKCEASGKPEVQFRWTRDGVHFKPKEELGVTVYQSPHSGSFTITGNNSNFAQRFQGIYRCFASNKLGTAMSHEIRLMAEGAPKWPKETVKPVEVEEGESVVLPCNPPPSAEPLRIYWMNSKILHIKQDERVTMGQNGNLYFANVLTSDNHSDYICHAHFPGTRTIIQKEPIDLRVKATNSMIDRKPRLLFPTNSSSHLVALQGQPLVLECIAEGFPTPTIKWLRPSGPMPADRVTYQNHNKTLQLLKVGEEDDGEYRCLAENSLGSARHAYYVTVEAAPYWLHKPQSHLYGPGETARLDCQVQGRPQPEVTWRINGIPVEELAKDQKYRIQRGALILSNVQPSDTMVTQCEARNRHGLLLANAYIYVVQLPAKILTADNQTYMAVQGSTAYLLCKAFGAPVPSVQWLDEDGTTVLQDERFFPYANGTLGIRDLQANDTGRYFCLAANDQNNVTIMANLKVKDATQITQGPRSTIEKKGSRVTFTCQASFDPSLQPSITWRGDGRDLQELGDSDKYFIEDGRLVIHSLDYSDQGNYSCVASTELDVVESRAQLLVVGSPGPVPRLVLSDLHLLTQSQVRVSWSPAEDHNAPIEKYDIEFEDKEMAPEKWYSLGKVPGNQTSTTLKLSPYVHYTFRVTAINKYGPGEPSPVSETVVTPEAAPEKNPVDVKGEGNETTNMVITWKPLRWMDWNAPQVQYRVQWRPQGTRGPWQEQIVSDPFLVVSNTSTFVPYEIKVQAVNSQGKGPEPQVTIGYSGEDYPQAIPELEGIEILNSSAVLVKWRPVDLAQVKGHLRGYNVTYWREGSQRKHSKRHIHKDHVVVPANTTSVILSGLRPYSSYHLEVQAFNGRGSGPASEFTFSTPEGVPGHPEALHLECQSNTSLLLRWQPPLSHNGVLTGYVLSYHPLDEGGKGQLSFNLRDPELRTHNLTDLSPHLRYRFQLQATTKEGPGEAIVREGGTMALSGISDFGNISATAGENYSVVSWVPKEGQCNFRFHILFKALGEEKGGASLSPQYVSYNQSSYTQWDLQPDTDYEIHLFKERMFRHQMAVKTNGTGRVRLPPAGFATEGWFIGFVSAIILLLLVLLILCFIKRSKGGKYSVKDKEDTQVDSEARPMKDETFGEYRSLESDNEEKAFGSSQPSLNGDIKPLGSDDSLADYGGSVDVQFNEDGSFIGQYSGKKEKEAAGGNDSSGATSPINPAVALE

SEQ ID NO: 7621 - protein, 190 aa, Homo sapiens
  SITE 1: note = misc_feature - Xaa can be any naturally occurring amino acid
XDPSLQPSITWRGDGRDLQELGDSDKYFIEDGRLVIHSLDYSDQGNYSCVASTELDVVESRAQLLVVEYDIEFEDKEMAPEKWYSLGKVPGNQTSTTLKLSPYVHYTFRVTAINKYGPGEPSPVSETVVTPEAAPEKNPVDVKGEGNETTNMVITWKPLRWMDWNAPQVQYRVQWRPQGTRGPWQEQIVS

SEQ ID NO: 7622 - protein, 232 aa, Homo sapiens
ETPSSEPMEEEEDDDLELFGGYDSFRSYNSSVGSESSSYLEESSEAENEDREAGELPTSPLHLLSPGTPRSLDGSGSEPAVCEMCGIVGTREAFFSKTKRFCSVSCSRSYSSNSKKASILARLQGKPPTKKAKVLHKAAWSAKIGAFLHSQGTGQLADGTPTGQDALVLGFDWGKFLKDHSYKAAPVSCFKHGIGCCFGMKALKMTPAMTSGATWEQWMSTPLAGVPSTARS

SEQ ID NO: 7623 - protein, 705 aa, Homo sapiens
MEKPRSIEETPSSEPMEEEEDDDLELFGGYDSFRSYNSSVGSESSSYLEESSEAENEDREAGELPTSPLHLLSPGTPRSLDGSGSEPAVCEMCGIVGTREAFFSKTKRFCSVSCSRSYSSNSKKASILARLQGKPPTKKAKVLHKAAWSAKIGAFLHSQGTGQLADGTPTGQDALVLGFDWGKFLKDHSYKAAPVSCFKHVPLYDQWEDVMKGMKVEVLNSDAVLPSRVYWIASVIQTAGYRVLLRYEGFENDASHDFWCNLGTVDVHPIGWCAINSKILVPPRTIHAKFTDWKGYLMKRLVGSRTLPVDFHIKMVESMKYPFRQGMRLEVVDKSQVSRTRMAVVDTVIGGRLRLLYEDGDSDDDFWCHMWSPLIHPVGWSRRVGHGIKMSERRSDMAHHPTFRKIYCDAVPYLFKKVRAVYTEGGWFEEGMKLEAIDPLNLGNICVATVCKVLLDGYLMICVDGGPSTDGLDWFCYHASSHAIFPATFCQKNDIELTPPKGYEAQTFNWENYLEKTKSKAAPSRLFNMDCPNHGFKVGMKLEAVDLMEPRLICVATVKRVVHRLLSIHFDGWDSEYDQWVDCESPDIYPVGWCELTGYQLQPPVAAEPATPLKAKEATKKKKKQFGKKRKRIPPTKTRPLRQGSKKPLLEDDPQGARKISSEPVPGEIIAVRVKEEHLDVASPDKASSPELPVSVENIKQETDD

SEQ ID NO: 7624 - protein, 614 aa, Homo sapiens
MEKPRSIEETPSSEPMEEEEDDDLELFGGYDSFRSYNSSVGSESSSYLEESSEAENEDREAGELPTSPLHLLSPGTPRSLDGSGSEPAVCEMCGIVGTREAFFSKTKRFCSVSCSRSYSSNSKKASILARLQGKPPTKKAKVLHKAAWSAKIGAFLHSQGTGQLADGTPTGQDALVLGFDWGKFLKDHSYKAAPVSCFKHVPLYDQWEDVMKGMKVEVLNSDAVLPSRVYWIASVIQTAGYRVLLRYEGFENDASHDFWCNLGTVDVHPIGWCAINSKILVPPRTIHAKFTDWKGYLMKRLVGSRTLPVDFHIKMVESMKYPFRQGMRLEVVDKSQVSRTRMAVVDTVIGGRLRLLYEDGDSDDDFWCHMWSPLIHPVGWSRRVGHGIKMSERRSDMAHHPTFRKIYCDAVPYLFKKVRAVYTEGGWFEEGMKLEAIDPLNLGNICVATVCKVLLDGYLMICVDGGPSTDGLDWFCYHASSHAIFPATFCQKNDIELTPPKGYEAQTFNWENYLEKTKSKAAPSRLFNMDCPNHGFKVGMKLEAVDLMEPRLICVATVKRVVHRLLSIHFDGWDSEYDQWVDCESPDIYPVGWCELTGYQLQPPVAAGKLPRSL

SEQ ID NO: 7625 - protein, 40 aa, Homo sapiens
MEKPRSIERWGVAVLPRLVSNSWVQAIHLPQPPKVLGLQM

SEQ ID NO: 7626 - protein, 288 aa, Homo sapiens
  SITE 1: note = misc_feature - Xaa can be any naturally occurring amino acid
XRPHLQNQWRKRKMTTWSCLVAMIVSGVITAVWAVRAAPIWRSQVKQKMRIGKQGNCRPPRCICSALGLLAPWMAVVLSQGKPPTKKAKVLHKAAWSAKIGAFLHSQGTGQLADGTPTGQDALVLGFDWGKFLKDHSYKAAPVSCFKHVPLYDQWEDVMKGMKVEVLNSDAVLPSRVYWIASVIQTAGYRVLLRYEGFENDASHDFWCNLGTVDVHPIGWCAINSKILVPPRTIHAKFTDWKGYLMKRLVGSRTLPVDFHIKVGSEPLTDVPPSALPFFCILHATHWS

SEQ ID NO: 7627 - protein, 127 aa, Homo sapiens
MKFTTLLFLAAVAGALVYAEDASSDSTGADPAQEAGTSKPNEEISGPAEPASPPETTTTAQETSAAAVQGTAKVTSSRQELNPLKQALAKAGKGMHGGVPGGKQFIENGSEFAQKLLKKFSLLKPWA

SEQ ID NO: 7628 - protein, 138 aa, Homo sapiens
MKFTTLLFLAAVAGALVYAEDASSDSTGADPAQEAGTSKPNEEISGPAEPASPPETTTTAQETSAAAVQGTAKVTSSRQELNPLKSIVEKSILLTEQALAKAGKGMHGGVPGGKQFIENGSEFAQKLLKKFSLLKPWA

SEQ ID NO: 7629 - protein, 85 aa, Homo sapiens
PAQEAGTSKPNEEISGPAEPASPPETTTTAQETSAAAVQGTAKVTSSRQELNPLKQALAKAGKGMHGGVPGGKQFIESECIPRWK

SEQ ID NO: 7630 - protein, 126 aa, Homo sapiens
MRIASISKSLTMVALAKLWEAGKLDLDIPVQHYVPEFPEKEYEGEKVSVTTRLLISHLSGIRHYEKDIKKVKEEKAYKALKMMKENVAFEQEKEGKSNEKNDFTKFKTEQENEAKCRNSKPGKKKN

SEQ ID NO: 7631 - protein, 547 aa, Homo sapiens
MYRLMSAVTARAAAPGGLASSCGRRGVHQRAGLPPLGHGWVGGLGLGLGLALGVKLAGGLRGAAPAQSPAAPDPEASPLAEPPQEQSLAPWSPQTPAPPCSRCFARAIESSRDLLHRIKDEVGAPGIVVGVSVDGKEVWSEGLGYADVENRVPCKPETVMRIASISKSLTMVALAKLWEAGKLDLDIPVQHYVPEFPEKEYEGEKVSVTTRLLISHLSGIRHYEKDIKKVKEEKAYKALKMMKENVAFEQEKEGKSNEKNDFTKFKTEQENEAKCRNSKPGKKKNDFEQGELYLREKFENSIESLRLFKNDPLFFKPGSQFLYSTFGYTLLAAIVERASGCKYLDYMQKIFHDLDMLTTVQEENEPVIYNRARFYVYNKKKRLVNTPYVDNSYKWAGGGFLSTVGDLLKFGNAMLYGYQVGLFKNSNENLLPGYLKPETMVMMWTPVPNTEMSWDKEGKYAMAWGVVERKQTYGSCRKQRHYASHTGGAVGASSVLLVLPEELDTETINNKVPPRGIIVSIICNMQSVGLNSTALKIALEFDKDRSD

SEQ ID NO: 7632 - protein, 373 aa, Homo sapiens
MYRLMSAVTARAAAPGGLASSCGRRGVHQRAGLPPLGHGWVGGLGLGLGLALGVKLAGGLRGAAPAQSPAAPDPEASPLAEPPQEQSLAPWSPQTPAPPCSRCFARAIESSRDLLHRIKDEVGAPGIVVGVSVDGKEVWSEGLGYADVENRVPCKPETVMRIASISKSLTMVALAKLWEAGKLDLDIPVQHYVPEFPEKEYEGEKVSVTTRLLISHLSGIRHYEKDIKKVKEEKAYKALKMMKENVAFEQEKEGKSNEKNDFTKFKTEQENEAKCRNSKPGKKKNDFEQGELYLREKFENSIESLRLFKNDPLFFKPGSQFLYSTFGYTLLAAIVERASGCKYLDYMQKIFHDLDMLTTVQEENEPVIYNRAR

SEQ ID NO: 7633 - protein, 525 aa, Homo sapiens
MWEAQFLGLLFLQPLWVAPVKPLQPGAEVPVVWAQEGAPAQLPCSPTIPLQDLSLLRRAGVTWQHQPDSGPPAAAPGHPLAPGPHPAAPSSWGPRPRRYTVLSVGPGGLRSGRLPLQPRVQLDERGRQRGDFSLWLRPARRADAGEYRAAVHLRDRALSCRLRLRLGQASMTASPPGSLRASDWVILNCSFSRPDRPASVHWFRNRGQGRVPVRESPHHHLAESFLFLPQVSPMDSGPWGCILTYRDGFNVSIMYNLTVLGLEPPTPLTVYAGAGSRVGLPCRLPAGVGTRSFLTAKWTPPGGGPDLLVTGDNGDFTLRLEDVSQAQAGTYTCHIHLQEQQLNATVTLAIITVTPKSFGSPGSLGKLLCEVTPVSGQERFVWSSLDTPSQRSFSGPWLEAQEAQLLSQPWQCQLYQGERLLGAAVYFTELSSPGAQRSGRAPGALPAGHLLLFLILGVLSLLLLVTGAFGFHLWRRQWRPRRFSALEQGIHPPQAQSKIEELEQEPEPEPEPEPEPEPEPEPEQL

SEQ ID NO: 7634 - protein, 360 aa, Homo sapiens
MWEAQFLGLLFLQPLWVAPVKPLQPGAEVPVVWAQEGAPAQLPCSPTIPLQDLSLLRRAGVTWQHQPDSGPPAAAPGHPLAPGPHPAAPSSWGPRPRRYTVLSVGPGGLRSGRLPLQPRVQLDERGRQRGDFSLWLRPARRADAGEYRAAVHLRDRALSCRLRLRLGQASMTASPPGSLRASDWVILNCSFSRPDRPASVHWFRNRGQGRVPVRESPHHHLAESFLFLPQVSPMDSGPWGCILTYRDGFNVSIMYNLTVLGLEPPTPLTVYAGAGSRVGLPCRLPAGVGTRSFLTAKWTPPGGGPDLLVTGDNGDFTLRLEDVSQAQAGTYTCHIHLQEQQLNATVTLAIITGQPQVGKE

SEQ ID NO: 7635 - protein, 77 aa, Homo sapiens
MEREMGALPRPSISAEPGTVISPGSHVTFMCRGPVGVQTFRLEREDRAKYKDSYNVFRLGPSESEARFHIDSVSEGN

SEQ ID NO: 7636 - protein, 89 aa, Homo sapiens
MEREMVLCLAQTIHTQEGALPRPSISAEPGTVISPGSHVTFMCRGPVGVQTFRLEREDRAKYKDSYNVFRLGPSESEARFHIDSVSEGN

SEQ ID NO: 7637 - protein, 152 aa, Homo sapiens
MSPHLTALLGLVLCLAQTIHTQEGALPRPSISAEPGTVISPGSHVTFMCRGPVGVQTFRLEREDRAKYKDSYNVFRLGPSESEARFHIDSVSEGNAGLYRCLYYKPPGWSEHSDFLELLVKESSGGPDSPDTEPGSSAGTVPGTEASGFDAP

SEQ ID NO: 7638 - protein, 135 aa, Homo sapiens
MSPHLTALLGLVLCLAQTIHTQEGALPRPSISAEPGTVISPGSHVTFMCRGPVGVQTFRLEREDRAKYKDSYNVFRLGPSESEARFHIDSVSEGNAGLYRCLYYKPPGWSEHSDFLELLVKGTVPGTEASGFDAP

SEQ ID NO: 7639 - protein, 123 aa, Homo sapiens
MRFFVPLFLVGILFPAILAKQFTKCELSQLLKDIDGYGGIALPELICTMFHTSGYDTQAIVENNESTEYGLFQISNKLWCKSSQVPQSRNICDISCDKFLDDDITDDIMCAKKILDIKGIDYW

SEQ ID NO: 7640 - protein, 142 aa, Homo sapiens
MRFFVPLFLVGILFPAILAKQFTKCELSQLLKDIDGYGGIALPELICTMFHTSGYDTQAIVENNESTEYGLFQISNKLWCKSSQVPQSRNICDISCDKFLDDDITDDIMCAKKILDIKGIDYWLAHKALCTEKLEQWLCEKL

SEQ ID NO: 7641 - protein, 217 aa, Homo sapiens
MLIGGNIEVHVNPGDGTGLRKALLHAPTGTCSDGQAHSISLVRNRRIITVQLDENNPVEMKLGTLVESRTINVSNLYVGGIPEGEGTSLLTMRRSFHGCIKNLIFNLELLDFNSAVGMSKSTWTPAGCQKGLSWLPMQRTKLLPEPRAFPVGAASFTISQVQSAKEGLGQRELKWGLAVKVPAKAGAGAGAGAVLKIRAGTGRERVPQATQMTRPNP

SEQ ID NO: 7642 - protein, 3075 aa, Homo sapiens
MRGGVLLVLLLCVAAQCRQRGLFPAILNLASNAHISTNATCGEKGPEMFCKLVEHVPGRPVRNPQCRICDGNSANPRERHPISHAIDGTNNWWQSPSIQNGREYHWVTITLDLRQVFQVAYVIIKAANAPRPGNWILERSLDGTTFSPWQYYAVSDSECLSRYNITPRRGPPTYRADDEVICTSYYSRLVPLEHGEIHTSLINGRPSADDLSPKLLEFTSARYIRLRLQRIRTLNADLMTLSHREPKELDPIVTRRYYYSIKDISVGGMCICYGHASSCPWDETTKKLQCQCEHNTCGESCNRCCPGYHQQPWRPGTVSSGNTCEACNCHNKAKDCYYDESVAKQKKSLNTAGQFRGGGVCINCLQNTMGINCETCIDGYYRPHKVSPYEDEPCRPCNCDPVGSLSSVCIKDDLHSDLHNGKQPGQCPCKEGYTGEKCDRCQLGYKDYPTCVSCGCNPVGSASDEPCTGPCVCKENVEGKACDRCKPGFYNLKEKNPRGCSECFCFGVSDVCSSLSWPVGQVNSMSGWLVTDLISPRKIPSQQDALGGRHQVSINNTAVMQRLAPKYYWAAPEAYLGNKLTAFGGFLKYTVSYDIPVETVDSNLMSHADVIIKGNGLTLSTQAEGLSLQPYEEYLNVVRLVPENFQDFHSKRQIDRDQLMTVLANVTHLLIRANYNSAKMALYRLESVSLDIASSNAIDLVVAADVEHCECPQGYTGTSCESCLSGYYRVDGILFGGICQPCECHGHAAECNVHGVCIACAHNTTGVHCEQCLPGFYGEPSRGTPGDCQPCACPLTIASNNFSPTCHLNDGDEVVCDWCAPGYSGAWCERCADGYYGNPTVPGESCVPCDCSGNVDPSEAGHCDSVTGECLKCLGNTDGAHCERCADGFYGDAVTAKNCRACECHVKGSHSAVCHLETGLCDCKPNVTGQQCDQCLHGYYGLDSGHGCRPCNCSVAGSVSDGCTDEGQCHCVPGVAGKRCDRCAHGFYAYQDGSCTPCDCPHTQNTCDPETGECVCPPHTQGVKCEECEDGHWGYDAEVGCQACNCSLVGSTHHRCDVVTGHCQCKSKFGGRACDQCSLGYRDFPDCVPCDCDLRGTSGDACNLEQGLCGCVEETGACPCKENVFGPQCNECREGTFALRADNPLGCSPCFCSGLSHLCSELEDYVRTPVTLGSDQPLLRVVSQSNLRGTTEGVYYQAPDFLLDAATVRQHIRAEPFYWRLPQQFQGDQLMAYGGKLKYSVAFYSLDGVGTSNFEPQVLIKGGRIRKQVIYMDAPAPENGVRQEQEVAMRENFWKYFNSVSEKPVTREDFMSVLSDIEYILIKASYGQGLQQSRISDISMEVGRKAEKLHPEEEVASLLENCVCPPGTVGFSCQDCAPGYHRGKLPAGSDRGPRPLVAPCVPCSCNNHSDTCDPNTGKCLNCGDNTAGDHCDVCTSGYYGKVTGSASDCALCACPHSPPASFSPTCVLEGDHDFRCDACLLGYEGKHCERCSSSYYGNPQTPGGSCQKCDCNPHGSVHGDCDRTSGQCVCRLGASGLRCDECEPRHILMETDCVSCDDECVGVLLNDLDEIGDAVLSLNLTGIIPVPYGILSNLENTTKYLQESLLKENMQKDLGKIKLEGVAEETDNLQKKLTRMLASTQKVNRATERIFKESQDLAIAIERLQMSITEIMEKTTLNQTLDEDFLLPNSTLQNMQQNGTSLLEIMQIRDFTQLHQNATLELKAAEDLLSQIQENYQKPLEELEVLKEAASHVLSKHNNELKAAEALVREAEAKMQESNHLLLMVNANLREFSDKKLHVQEEQNLTSELIVQGRGLIDAAAAQTDAVQDALEHLEDHQDKLLLWSAKIRHHIDDLVMHMSQRNAVDLVYRAEDHAAEFQRLADVLYSGLENIRNVSLNATSAAYVHYNIQSLIEESEELARDAHRTVTETSLLSESLVSNGKAAVQRSSRFLKEGNNLSRKLPGIALELSELRNKTNRFQENAVEITRQTNESLLILRAIPKGIRDKGAKTKELATSASQSAVSTLRDVAGLSQELLNTSASLSRVNTTLRETHQLLQDSTMATLLAGRKVKDVEIQANLLFDRLKPLKMLEENLSRNLSEIKLLISQARKQAASIKVAVSADRDCIRAYQPQISSTNYNTLTLNVKTQEPDNLLFYLGSSTASDFLAVEMRRGRVAFLWDLGSGSTRLEFPDFPIDDNRWHSIHVARFGNIGSLSVKEMSSNQKSPTKTSKSPGTANVLDVNNSTLMFVGGLGGQIKKSPAVKVTHFKGCLGEAFLNGKSIGLWNYIEREGKCRGCFGSSQNEDPSFHFDGSGYSVVEKSLPATVTQIIMLFNTFSPNGLLLYLGSYGTKDFLSIELFRGRVKVMTDLGSGPITLLTDRRYNNGTWYKIAFQRNRKQGVLAVIDAYNTSNKETKQGETPGASSDLNRLDKDPIYVGGLPRSRVVRRGVTTKSFVGCIKNLEISRSTFDLLRNSYGVRKGCLLEPIRSVSFLKGGYIELPPKSLSPESEWLVTFATTNSSGIILAALGGDVEKRGDREEAHVPFFSVMLIGGNIEVHVNPGDGTGLRKALLHAPTGTCSDGQAHSISLVRNRRIITVQLDENNPVEMKLGTLVESRTINVSNLYVGGIPEGEGTSLLTMRRSFHGCIKNLIFNLELLDFNSAVGHEQVDLDTCWLSERPKLAPDAEDSKLLPEPRAFPEQCVVDAALEYVPGAHQFGLTQNSHFILPFNQSAVRKKLSVELSIRTFASSGLIYYMAHQNQADYAVLQLHGGRLHFMFDLGKGRTKVSHPALLSDGKWHTVKTDYVKRKGFITVDGRESPMVTVVGDGTMLDVEGLFYLGGLPSQYQARKIGNITHSIPACIGDVTVNSKQLDKDSPVSAFTVNRCYAVAQEGTYFDGSGYAALVKEGYKVQSDVNITLEFRTSSQNGVLLGISTAKVDAIGLELVDGKVLFHVNNGAGRITAAYEPKTATVLCDGKWHTLQANKSKHRITLIVDGNAVGAESPHTQSTSVDTNNPIYVGGYPAGVKQKCLRSQTSFRGCLRKLALIKSPQVQSFDFSRAFELHGVFLHSCPGTES

SEQ ID NO: 7643 - protein, 3122 aa, Homo sapiens
MPGAAGVLLLLLLSGGLGGVQAQRPQQQRQSQAHQQRGLFPAVLNLASNALITTNATCGEKGPEMYCKLVEHVPGQPVRNPQCRICNQNSSNPNQRHPITNAIDGKNTWWQSPSIKNGIEYHYVTITLDLQQVFQIAYVIVKAANSPRPGNWILERSLDDVEYKPWQYHAVTDTECLTLYNIYPRTGPPSYAKDDEVICTSFYSKIHPLENGEIHISLINGRPSADDPSPELLEFTSARYIRLRFQRIRTLNADLMMFAHKDPREIDPIVTRRYYYSVKDISVGGMCICYGHARACPLDPATNKSRCECEHNTCGDSCDQCCPGFHQKPWRAGTFLTKTECEACNCHGKAEECYYDENVARRNLSLNIRGKYIGGGVCINCTQNTAGINCETCTDGFFRPKGVSPNYPRPCQPCHCDPIGSLNEVCVKDEKHARRGLAPGSCHCKTGFGGVSCDRCARGYTGYPDCKACNCSGLGSKNEDPCFGPCICKENVEGGDCSRCKSGFFNLQEDNWKGCDECFCSGVSNRCQSSYWTYGKIQDMSGWYLTDLPGRIRVAPQQDDLDSPQQISISNAEARQALPHSYYWSAPAPYLGNKLPAVGGQLTFTISYDLEEEEEDTERVLQLMIILEGNDLSISTAQDEVYLHPSEEHTNVLLLKEESFTIHGTHFPVRRKEFMTVLANLKRVLLQITYSFGMDAIFRLSSVNLESAVSYPTDGSIAAAVEVCQCPPGYTGSSCESCWPRHRRVNGTIFGGICEPCQCFGHAESCDDVTGECLNCKDHTGGPYCDKCLPGFYGEPTKGTSEDCQPCACPLNIPSNNFSPTCHLDRSLGLICDGCPVGYTGPRCERCAEGYFGQPSVPGGSCQPCQCNDNLDFSIPGSCDSLSGSCLICKPGTTGRYCELCADGYFGDAVDAKNCQPCRCNAGGSFSEVCHSQTGQCECRANVQGQRCDKCKAGTFGLQSARGCVPCNCNSFGSKSFDCEESGQCWCQPGVTGKKCDRCAHGYFNFQEGGCTACECSHLGNNCDPKTGRCICPPNTIGEKCSKCAPNTWGHSITTGCKACNCSTVGSLDFQCNVNTGQCNCHPKFSGAKCTECSRGHWNYPRCNLCDCFLPGTDATTCDSETKKCSCSDQTGQCTCKVNVEGIHCDRCRPGKFGLDAKNPLGCSSCYCFGTTTQCSEAKGLIRTWVTLKAEQTILPLVDEALQHTTTKGIVFQHPEIVAHMDLMREDLHLEPFYWKLPEQFEGKKLMAYGGKLKYAIYFEAREETGFSTYNPQVIIRGGTPTHARIIVRHMAAPLIGQLTRHEIEMTEKEWKYYGDDPRVHRTVTREDFLDILYDIHYILIKATYGNFMRQSRISEISMEVAEQGRGTTMTPPADLIEKCDCPLGYSGLSCEACLPGFYRLRSQPGGRTPGPTLGTCVPCQCNGHSSLCDPETSICQNCQHHTAGDFCERCALGYYGIVKGLPNDCQQCACPLISSSNNFSPSCVAEGLDDYRCTACPRGYEGQYCERCAPGYTGSPGNPGGSCQECECDPYGSLPVPCDPVTGFCTCRPGATGRKCDGCKHWHAREGWECVFCGDECTGLLLGDLARLEQMVMSINLTGPLPAPYKMLYGLENMTQELKHLLSPQRAPERLIQLAEGNLNTLVTEMNELLTRATKVTADGEQTGQDAERTNTRAKSLGEFIKELARDAEAVNEKAIKLNETLGTRDEAFERNLEGLQKEIDQMIKELRRKNLETQKEIAEDELVAAEALLKKVKKLFGESRGENEEMEKDLREKLADYKNKVDDAWDLLREATDKIREANRLFAVNQKNMTALEKKKEAVESGKRQIENTLKEGNDILDEANRLADEINSIIDYVEDIQTKLPPMSEELNDKIDDLSQEIKDRKLAEKVSQAESHAAQLNDSSAVLDGILDEAKNISFNATAAFKAYSNIKDYIDEAEKVAKEAKDLAHEATKLATGPRGLLKEDAKGCLQKSFRILNEAKKLANDVKENEDHLNGLKTRIENADARNGDLLRTLNDTLGKLSAIPNDTAAKLQAVKDKARQANDTAKDVLAQITELHQNLDGLKKNYNKLADSVAKTNAVVKDPSKNKIIADADATVKNLEQEADRLIDKLKPIKELEDNLKKNISEIKELINQARKQANSIKVSVSSGGDCIRTYKPEIKKGSYNNIVVNVKTAVADNLLFYLGSAKFIDFLAIEMRKGKVSFLWDVGSGVGRVEYPDLTIDDSYWYRIVASRTGRNGTISVRALDGPKASIVPSTHHSTSPPGYTILDVDANAMLFVGGLTGKLKKADAVRVITFTGCMGETYFDNKPIGLWNFREKEGDCKGCTVSPQVEDSEGTIQFDGEGYALVSRPIRWYPNISTVMFKFRTFSSSALLMYLATRDLRDFMSVELTDGHIKVSYDLGSGMASVVSNQNHNDGKWKSFTLSRIQKQANISIVDIDTNQEENIATSSSGNNFGLDLKADDKIYFGGLPTLRNLSMKARPEVNLKKYSGCLKDIEISRTPYNILSSPDYVGVTKGCSLENVYTVSFPKPGFVELSPVPIDVGTEINLSFSTKNESGIILLGSGGTPAPPRRKRRQTGQAYYAILLNRGRLEVHLSTGARTMRKIVIRPEPNLFHDGREHSVHVERTRGIFTVQVDENRRYMQNLTVEQPIEVKKLFVGGAPPEFQPSPLRNIPPFEGCIWNLVINSVPMDFARPVSFKNADIGRCAHQKLREDEDGAAPAEIVIQPEPVPTPAFPTPTPVLTHGPCAAESEPALLIGSKQFGLSRNSHIAIAFDDTKVKNRLTIELEVRTEAESGLLFYMARINHADFATVQLRNGLPYFSYDLGSGDTHTMIPTKINDGQWHKIKIMRSKQEGILYVDGASNRTISPKKADILDVVGMLYVGGLPINYTTRRIGPVTYSIDGCVRNLHMAEAPADLEQPTSSFHVGTCFANAQRGTYFDGTGFAKAVGGFKVGLDLLVEFEFRTTTTTGVLLGISSQKMDGMGIEMIDEKLMFHVDNGAGRFTAVYDAGVPGHLCDGQWHKVTANKIKHRIELTVDGNQVEAQSPNPASTSADTNDPVFVGGFPDDLKQFGLTTSIPFRGCIRSLKLTKGTGKPLEVNFAKALELRGVQPVSCPAN

SEQ ID NO: 7644 - protein, 3121 aa, Homo sapiens
MPGAAGVLLLLLLSGGLGGVQAQRPQQQRQSQAHQQRGLFPAVLNLASNALITTNATCGEKGPEMYCKLVEHVPGQPVRNPQCRICNQNSSNPNQRHPITNAIDGKNTWWQSPSIKNGIEYHYVTITLDLQQVFQIAYVIVKAANSPRPGNWILERSLDDVEYKPWQYHAVTDTECLTLYNIYPRTGPPSYAKDDEVICTSFYSKIHPLENGEIHISLINGRPSADDPSPELLEFTSARYIRLRFQRIRTLNADLMMFAHKDPREIDPIVTRRYYYSVKDISVGGMCICYGHARACPLDPATNKSRCECEHNTCGDSCDQCCPGFHQKPWRAGTFLTKTECEACNCHGKAEECYYDENVARRNLSLNIRGKYIGGGVCINCTQNTAGINCETCTDGFFRPKGVSPNYPRPCQPCHCDPIGSLNEVCVKDEKHARRGLAPGSCHCKTGFGGVSCDRCARGYTGYPDCKACNCSGLGSKNEDPCFGPCICKENVEGGDCSRCKSGFFNLQEDNWKGCDECFCSGVSNRCQSSYWTYGKIQDMSGWYLTDLPGRIRVAPQQDDLDSPQQISISNAEARQALPHSYYWSAPAPYLGNKLPAVGGQLTFTISYDLEEEEEDTERVLQLMIILEGNDLSISTAQDEVYLHPSEEHTNVLLLKEESFTIHGTHFPVRRKEFMTVLANLKRVLLQITYSFGMDAIFRLSSVNLESAVSYPTDGSIAAAVEVCQCPPGYTGSSCESCWPRHRRVNGTIFGGICEPCQCFGHAESCDDVTGECLNCKDHTGGPYCDKCLPGFYGEPTKGTSEDCQPCACPLNIPSNNFSPTCHLDRSLGLICDGCPVGYTGPRCERCAEGYFGQPSVPGGSCQPCQCNDNLDFSIPGSCDSLSGSCLICKPGTTGRYCELCADGYFGDAVDAKNCQPCRCNAGGSFSEVCHSQTGQCECRANVQGQRCDKCKAGTFGLQSARGCVPCNCNSFGSKSFDCEESGQCWCQPGVTGKKCDRCAHGYFNFQEGGCTACECSHLGNNCDPKTGRCICPPNTIGEKCSKCAPNTWGHSITTGCKACNCSTVGSLDFQCNVNTGQCNCHPKFSGAKCTECSRGHWNYPRCNLCDCFLPGTDATTCDSETKKCSCSDQTGQCTCKVNVEGIHCDRCRPGKFGLDAKNPLGCSSCYCFGTTTQCSEAKGLIRTWVTLKAEQTILPLVDEALQHTTTKGIVFQHPEIVAHMDLMREDLHLEPFYWKLPEQFEGKKLMAYGGKLKYAIYFEAREETGFSTYNPQVIIRGGTPTHARIIVRHMAAPLIGQLTRHEIEMTEKEWKYYGDDPRVHRTVTREDFLDILYDIHYILIKATYGNFMRQSRISEISMEVAEQGRGTTMTPPADLIEKCDCPLGYSGLSCEACLPGFYRLRSQPGGRTPGPTLGTCVPCQCNGHSSLCDPETSICQNCQHHTAGDFCERCALGYYGIVKGLPNDCQQCACPLISSSNNFSPSCVAEGLDDYRCTACPRGYEGQYCERCAPGYTGSPGNPGGSCQECECDPYGSLPVPCDPVTGFCTCRPGATGRKCDGCKHWHAREGWECVFCGDECTGLLLGDLARLEQMVMSINLTGPLPAPYKMLYGLENMTQELKHLLSPQRAPERLIQLAEGNLNTLVTEMNELLTRATKVTADGEQTGQDAERTNTRAKSLGEFIKELARDAEAVNEKAIKLNETLGTRDEAFERNLEGLQKEIDQMIKELRRKNLETQKEIAEDELVAAEALLKKVKKLFGESRGENEEMEKDLREKLADYKNKVDDAWDLLREATDKIREANRLFAVNQKNMTALEKKKEAVESGKRQIENTLKEGNDILDEANRLADEINSIIDYVEDIQTKLPPMSEELNDKIDDLSQEIKDRKLAEKVSQAESHAAQLNDSSAVLDGILDEAKNISFNATAAFKAYSNIKDYIDEAEKVAKEAKDLAHEATKLATGPRGLLKEDAKGCLQKSFRILNEAKKLANDVKENEDHLNGLKTRIENADARNGDLLRTLNDTLGKLSAIPNDTAAKLQAVKDKARQANDTAKDVLAQITELHQNLDGLKKNYNKLADSVAKTNAVVKDPSKNTVADADATVKNLEQEADRLIDKLKPIKELEDNLKKNISEIKELINQARKQANSIKVSVSSGGDCIRTYKPEIKKGSYNNIVVNVKTAVADNLLFYLGSAKFIDFLAIEMRKGKVSFLWDVGSGVGRVEYPDLTIDDSYWYRIVASRTGRNGTISVRALDGPKASIVPSTHHSTSPPGYTILDVDANAMLFVGGLTGKLKKADAVRVITFTGCMGETYFDNKPIGLWNFREKEGDCKGCTVSPQVEDSEGTIQFDGEGYALVSRPIRWYPNISTVMFKFRTFSSSALLMYLATRDLRDFMSVELTDGHIKVSYDLGSGMASVVSNQNHNDGKWKSFTLSRIQKQANISIVDIDTNQEENIATSSSGNNFGLDLKADDKIYFGGLPTLRNLSMKARPEVNLKKYSGCLKDIEISRTPYNILSSPDYVGVTKGCSLENVYTVSFPKPGFVELSPVPIDVGTEINLSFSTKNESGIILLGSGGTPAPPRRKRRQTGQAYYAILLNRGRLEVHLSTGARTMRKIVIRPEPNLFHDGREHSVHVERTRGIFTVQVDENRRYMQNLTVEQPIEVKKLFVGGAPPEFQPSPLRNIPPFEGCIWNLVINSVPMDFARPVSFKNADIGRCAHQKLREDEDGAAPAEIVIQPEPVPTPAFPTPTPVLTHGPCAAESEPALLIGSKQFGLSRNSHIAIAFDDTKVKNRLTIELEVRTEAESGLLFYMARINHADFATVQLRNGLPYFSYDLGSGDTHTMIPTKINDGQWHKIKIMRSKQEGILYVDGASNRTISPKKADILDVVGMLYVGGLPINYTTRRIGPVTYSIDGCVRNLHMAEAPADLEQPTSSFHVGTCFANAQRGTYFDGTGFAKAVGGFKVGLDLLVEFEFRTTTTTGVLLGISSQKMDGMGIEMIDEKLMFHVDNGAGRFTAVYDAGVPGHLCDGQWHKVTANKIKHRIELTVDGNQVEAQSPNPASTSADTNDPVFVGGFPDDLKQFGLTTSIPFRGCIRSLKLTKGTGKPLEVNFAKALELRGVQPVSCPAN

SEQ ID NO: 7645 - protein, 3118 aa, Homo sapiens
MPGAAGVLLLLLLSGGLGGVQAQRPQQQRQSQAHQQRGLFPAVLNLASNALITTNATCGEKGPEMYCKLVEHVPGQPVRNPQCRICNQNSSNPNQRHPITNAIDGKNTWWQSPSIKNGIEYHYVTITLDLQQVFQIAYVIVKAANSPRPGNWILERSLDDVEYKPWQYHAVTDTECLTLYNIYPRTGPPSYAKDDEVICTSFYSKIHPLENGEIHISLINGRPSADDPSPELLEFTSARYIRLRFQRIRTLNADLMMFAHKDPREIDPIVTRRYYYSVKDISVGGMCICYGHARACPLDPATNKSRCECEHNTCGDSCDQCCPGFHQKPWRAGTFLTKTECEACNCHGKAEECYYDENVARRNLSLNIRGKYIGGGVCINCTQNTAGINCETCTDGFFRPKGVSPNYPRPCQPCHCDPIGSLNEVCVKDEKHARRGLAPGSCHCKTGFGGVSCDRCARGYTGYPDCKACNCSGLGSKNEDPCFGPCICKENVEGGDCSRCKSGFFNLQEDNWKGCDECFCSGVSNRCQSSYWTYGKIQDMSGWYLTDLPGRIRVAPQQDDLDSPQQISISNAEARQALPHSYYWSAPAPYLGNKLPAVGGQLTFTISYDLEEEEEDTERVLQLMIILEGNDLSISTAQDEVYLHPSEEHTNVLLLKEESFTIHGTHFPVRRKEFMTVLANLKRVLLQITYSFGMDAIFRLSSVNLESAVSYPTDGSIAAAVEVCQCPPGYTGSSCESCWPRHRRVNGTIFGGICEPCQCFGHAESCDDVTGECLNCKDHTGGPYCDKCLPGFYGEPTKGTSEDCQPCACPLNIPSNNFSPTCHLDRSLGLICDGCPVGYTGPRCERCAEGYFGQPSVPGGSCQPCQCNDNLDFSIPGSCDSLSGSCLICKPGTTGRYCELCADGYFGDAVDAKNCQPCRCNAGGSFSEVCHSQTGQCECRANVQGQRCDKCKAGTFGLQSARGCVPCNCNSFGSKSFDCEESGQCWCQPGVTGKKCDRCAHGYFNFQEGGCTACECSHLGNNCDPKTGRCICPPNTIGEKCSKCAPNTWGHSITTGCKACNCSTVGSLDFQCNVNTGQCNCHPKFSGAKCTECSRGHWNYPRCNLCDCFLPGTDATTCDSETKKCSCSDQTGQCTCKVNVEGIHCDRCRPGKFGLDAKNPLGCSSCYCFGTTTQCSEAKGLIRTWVTLKAEQTILPLVDEALQHTTTKGIVFQHPEIVAHMDLMREDLHLEPFYWKLPEQFEGKKLMAYGGKLKYAIYFEAREETGFSTYNPQVIIRGGTPTHARIIVRHMAAPLIGQLTRHEIEMTEKEWKYYGDDPRVHRTVTREDFLDILYDIHYILIKATYGNFMRQSRISEISMEVAEQGRGTTMTPPADLIEKCDCPLGYSGLSCEACLPGFYRLRSQPGGRTPGPTLGTCVPCQCNGHSSLCDPETSICQNCQHHTAGDFCERCALGYYGIVKGLPNDCQQCACPLISSSNNFSPSCVAEGLDDYRCTACPRGYEGQYCERCAPGYTGSPGNPGGSCQECECDPYGSLPVPCDPVTGFCTCRPGATGRKCDGCKHWHAREGWECVFCGDECTGLLLGDLARLEQMVMSINLTGPLPAPYKMLYGLENMTQELKHLLSPQRAPERLIQLAEGNLNTLVTEMNELLTRATKVTADGEQTGQDAERTNTRAKSLGEFIKELARDAEAVNEKAIKLNETLGTRDEAFERNLEGLQKEIDQMIKELRRKNLETQKEIAEDELVAAEALLKKVKKLFGESRGENEEMEKDLREKLADYKNKVDDAWDLLREATDKIREANRLFAVNQKNMTALEKKKEAVESGKRQIENTLKEGNDILDEANRLADEINSIIDYVEDIQTKLPPMSEELNDKIDDLSQEIKDRKLAEKVSQAESHAAQLNDSSAVLDGILDEAKNISFNATAAFKAYSNIKDYIDEAEKVAKEAKDLAHEATKLATGPRGLLKEDAKGCLQKSFRILNEAKKLANDVKENEDHLNGLKTRIENADARNGDLLRTLNDTLGKLSAIPNDTAAKLQAVKDKARQANDTAKDVLAQITELHQNLDGLKKNYNKLADSVAKTNAVVKDPSKNNAVADADATVKNLEQEADRLIDKLKPIKELEDNLKKNISEIKELINQARKQANSIKVSVSSGGDCIRTYKPEIKKGSYNNIVVNVKTAVADNLLFYLGSAKFIDFLAIEMRKGKVSFLWDVGSGVGRVEYPDLTIDDSYWYRIVASRTGRNGTISVRALDGPKASIVPSTHHSTSPPGYTILDVDANAMLFVGGLTGKLKKADAVRVITFTGCMGETYFDNKPIGLWNFREKEGDCKGCTVSPQVEDSEGTIQFDGEGYALVSRPIRWYPNISTVMFKFRTFSSSALLMYLATRDLRDFMSVELTDGHIKVSYDLGSGMASVVSNQNHNDGKWKSFTLSRIQKQANISIVDIDTNQEENIATSSSGNNFGLDLKADDKIYFGGLPTLRNLRPEVNLKKYSGCLKDIEISRTPYNILSSPDYVGVTKGCSLENVYTVSFPKPGFVELSPVPIDVGTEINLSFSTKNESGIILLGSGGTPAPPRRKRRQTGQAYYAILLNRGRLEVHLSTGARTMRKIVIRPEPNLFHDGREHSVHVERTRGIFTVQVDENRRYMQNLTVEQPIEVKKLFVGGAPPEFQPSPLRNIPPFEGCIWNLVINSVPMDFARPVSFKNADIGRCAHQKLREDEDGAAPAEIVIQPEPVPTPAFPTPTPVLTHGPCAAESEPALLIGSKQFGLSRNSHIAIAFDDTKVKNRLTIELEVRTEAESGLLFYMARINHADFATVQLRNGLPYFSYDLGSGDTHTMIPTKINDGQWHKIKIMRSKQEGILYVDGASNRTISPKKADILDVVGMLYVGGLPINYTTRRIGPVTYSIDGCVRNLHMAEAPADLEQPTSSFHVGTCFANAQRGTYFDGTGFAKAVGGFKVGLDLLVEFEFRTTTTTGVLLGISSQKMDGMGIEMIDEKLMFHVDNGAGRFTAVYDAGVPGHLCDGQWHKVTANKIKHRIELTVDGNQVEAQSPNPASTSADTNDPVFVGGFPDDLKQFGLTTSIPFRGCIRSLKLTKGTGKPLEVNFAKALELRGVQPVSCPAN

SEQ ID NO: 7646 - protein, 184 aa, Homo sapiens
  SITE 1: note = misc_feature - Xaa can be any naturally occurring amino acid
XCRCNAGGSFSEVCHSQTGQCECRANVQGQRCDKCKPNMWRDPEKRFCVLCDCDPVGSVSPQCDITGRCVCKSGFVGKQCNLGRQVHQQEEQPRRAQRVLGSPQRWAIGSSSGCPRGAYRAPAPAGTFGLQSARGCVPCNCNSFGSKSFDCEESGQCWCQPGVTGKKCDRCAHGYFNFQEGGCT

SEQ ID NO: 7647 - protein, 94 aa, Homo sapiens
LVRSASFSRGGQLSFTDLGLPPTDHLQASFGFQTFQPSGILLDHQTWTRNLQVTLEDGYIELSTSDSGGPIFKSPQTYMDGLLHYVSVISDNSG

SEQ ID NO: 7648 - protein, 3333 aa, Homo sapiens
MAAAARPRGRALGPVLPPTPLLLLVLRVLPACGATARDPGAAAGLSLHPTYFNLAEAARIWATATCGERGPGEGRPQPELYCKLVGGPTAPGSGHTIQGQFCDYCNSEDPRKAHPVTNAIDGSERWWQSPPLSSGTQYNRVNLTLDLGQLFHVAYILIKFANSPRPDLWVLERSVDFGSTYSPWQYFAHSKVDCLKEFGREANMAVTRDDDVLCVTEYSRIVPLENGEVVVSLINGRPGAKNFTFSHTLREFTKATNIRLRFLRTNTLLGHLISKAQRDPTVTRRYYYSIKDISIGGQCVCNGHAEVCNINNPEKLFRCECQHHTCGETCDRCCTGYNQRRWRPAAWEQSHECEACNCHGHASNCYYDPDVERQQASLNTQGIYAGGGVCINCQHNTAGVNCEQCAKGYYRPYGVPVDAPDGCIPCSCDPEHADGCEQGSGRCHCKPNFHGDNCEKCAIGYYNFPFCLRIPIFPVSTPSSEDPVAGDIKGCDCNLEGVLPEICDAHGRCLCRPGVEGPRCDTCRSGFYSFPICQACWCSALGSYQMPCSSVTGQCECRPGVTGQRCDRCLSGAYDFPHCQGSSSACDPAGTINSNLGYCQCKLHVEGPTCSRCKLLYWNLDKENPSGCSECKCHKAGTVSGTGECRQGDGDCHCKSHVGGDSCDTCEDGYFALEKSNYFGCQGCQCDIGGALSSMCSGPSGVCQCREHVVGKVCQRPENNYYFPDLHHMKYEIEDGSTPNGRDLRFGFDPLAFPEFSWRGYAQMTSVQNDVRITLNVGKSSGSLFRVILRYVNPGTEAVSGHITIYPSWGAAQSKEIIFLPSKEPAFVTVPGNGFADPFSITPGIWVACIKAEGVLLDYLVLLPRDYYEASVLQLPVTEPCAYAGPPQENCLLYQHLPVTRFPCTLACEARHFLLDGEPRPVAVRQPTPAHPVMVDLSGREVELHLRLRIPQVGHYVVVVEYSTEAAQLFVVDVNVKSSGSVLAGQVNIYSCNYSVLCRSAVIDHMSRIAMYELLADADIQLKGHMARFLLHQVCIIPIEEFSAEYVRPQVHCIASYGRFVNQSATCVSLAHETPPTALILDVLSGRPFPHLPQQSSPSVDVLPGVTLKAPQNQVTLRGRVPHLGRYVFVIHFYQAAHPTFPAQVSVDGGWPRAGSFHASFCPHVLGCRDQVIAEGQIEFDISEPEVAATVKVPEGKSLVLVRVLVVPAENYDYQILHKKSMDKSLEFITNCGKNSFYLDPQTASRFCKNSARSLVAFYHKGALPCECHPTGATGPHCSPEGGQCPCQPNVIGRQCTRCATGHYGFPRCKPCSCGRRLCEEMTGQCRCPPRTVRPQCEVCETHSFSFHPMAGCEGCNCSRRGTIEAAMPECDRDSGQCRCKPRITGRQCDRCASGFYRFPECVPCNCNRDGTEPGVCDPGTGACLCKENVEGTECNVCREGSFHLDPANLKGCTSCFCFGVNNQCHSSHKRRTKFVDMLGWHLETADRVDIPVSFNPGSNSMVADLQELPATIHSASWVAPTSYLGDKVSSYGGYLTYQAKSFGLPGDMVLLEKKPDVQLTGQHMSIIYEETNTPRPDRLHHGRVHVVEGNFRHASSRAPVSREELMTVLSRLADVRIQGLYFTETQRLTLSEVGLEEASDTGSGRIALAVEICACPPAYAGDSCQGCSPGYYRDHKGLYTGRCVPCNCNGHSNQCQDGSGICVNCQHNTAGEHCERCQEGYYGNAVHGSCRACPCPHTNSFATGCVVNGGDVRCSCKAGYTGTQCERCAPGYFGNPQKFGGSCQPCSCNSNGQLGSCHPLTGDCINQEPKDSSPAEECDDCDSCVMTLLNDLATMGEQLRLVKSQLQGLSASAGLLEQMRHMETQAKDLRNQLLNYRSAISNHGSKIEGLERELTDLNQEFETLQEKAQVNSRKAQTLNNNVNRATQSAKELDVKIKNVIRNVHILLKQISGTDGEGNNVPSGDFSREWAEAQRMMRELRNRNFGKHLREAEADKRESQLLLNRIRTWQKTHQGENNGLANSIRDSLNEYEAKLSDLRARLQEAAAQAKQANGLNQENERALGAIQRQVKEINSLQSDFTKYLTTADSSLLQTNIALQLMEKSQKEYEKLAASLNEARQELSDKVRELSRSAGKTSLVEEAEKHARSLQELAKQLEEIKRNASGDELVRCAVDAATAYENILNAIKAAEDAANRAASASESALQTVIKEDLPRKAKTLSSNSDKLLNEAKMTQKKLKQEVSPALNNLQQTLNIVTVQKEVIDTNLTTLRDGLHGIQRGDIDAMISSAKSMVRKANDITDEVLDGLNPIQTDVERIKDTYGRTQNEDFKKALTDADNSVNKLTNKLPDLWRKIESINQQLLPLGNISDNMDRIRELIQQARDAASKVAVPMRFNGKSGVEVRLPNDLEDLKGYTSLSLFLQRPNSRENGGTENMFVMYLGNKDASRDYIGMAVVDGQLTCVYNLGDREAELQVDQILTKSETKEAVMDRVKFQRIYQFARLNYTKGATSSKPETPGVYDMDGRNSNTLLNLDPENVVFYVGGYPPDFKLPSRLSFPPYKGCIELDDLNENVLSLYNFKKTFNLNTTEVEPCRRRKEESDKNYFEGTGYARVPTQPHAPIPTFGQTIQTTVDRGLLFFAENGDRFISLNIEDGKLMVRYKLNSELPKERGVGDAINNGRDHSIQIKIGKLQKRMWINVDVQNTIIDGEVFDFSTYYLGGIPIAIRERFNISTPAFRGCMKNLKKTSGVVRLNDTVGVTKKCSEDWKLVRSASFSRGGQLSFTDLGLPPTDHLQASFGFQTFQPSGILLDHQTWTRNLQVTLEDGYIELSTSDSGGPIFKSPQTYMDGLLHYVSVISDNSGLRLLIDDQLLRNSKRLKHISSSRQSLRLGGSNFEGCISNVFVQRLSLSPEVLDLTSNSLKRDVSLGGCSLNKPPFLMLLKGSTRFNKTKTFRINQLLQDTPVASPRSVKVWQDACSPLPKTQANHGALQFGDIPTSHLLFKLPQELLKPRSQFAVDMQTTSSRGLVFHTGTKNSFMALYLSKGRLVFALGTDGKKLRIKSKEKCNDGKWHTVVFGHDGEKGRLVVDGLRAREGSLPGNSTISIRAPVYLGSPPSGKPKSLPTNSFVGCLKNFQLDSKPLYTPSSSFGVSSCLGGPLEKGIYFSEEGGHVVLAHSVLLGPEFKLVFSIRPRSLTGILIHIGSQPGKHLCVYLEAGKVTASMDSGAGGTSTSVTPKQSLCDGQWHSVAVTIKQHILHLELDTDSSYTAGQIPFPPASTQEPLHLGGAPANLTTLRIPVWKSFFGCLRNIHVNHIPVPVTEALEVQGPVSLNGCPDQ

SEQ ID NO: 7649 - protein, 3277 aa, Homo sapiens
MAAAARPRGRALGPVLPPTPLLLLVLRVLPACGATARDPGAAAGLSLHPTYFNLAEAARIWATATCGERGPGEGRPQPELYCKLVGGPTAPGSGHTIQGQFCDYCNSEDPRKAHPVTNAIDGSERWWQSPPLSSGTQYNRVNLTLDLGQLFHVAYILIKFANSPRPDLWVLERSVDFGSTYSPWQYFAHSKVDCLKEFGREANMAVTRDDDVLCVTEYSRIVPLENGEVVVSLINGRPGAKNFTFSHTLREFTKATNIRLRFLRTNTLLGHLISKAQRDPTVTRRYYYSIKDISIGGQCVCNGHAEVCNINNPEKLFRCECQHHTCGETCDRCCTGYNQRRWRPAAWEQSHECEACNCHGHASNCYYDPDVERQQASLNTQGIYAGGGVCINCQHNTAGVNCEQCAKGYYRPYGVPVDAPDGCIPCSCDPEHADGCEQGSGRCHCKPNFHGDNCEKCAIGYYNFPFCLRIPIFPVSTPSSEDPVAGDIKGCDCNLEGVLPEICDAHGRCLCRPGVEGPRCDTCRSGFYSFPICQACWCSALGSYQMPCSSVTGQCECRPGVTGQRCDRCLSGAYDFPHCQGSSSACDPAGTINSNLGYCQCKLHVEGPTCSRCKLLYWNLDKENPSGCSECKCHKAGTVSGTGECRQGDGDCHCKSHVGGDSCDTCEDGYFALEKSNYFGCQGCQCDIGGALSSMCSGPSGVCQCREHVVGKVCQRPENNYYFPDLHHMKYEIEDGSTPNGRDLRFGFDPLAFPEFSWRGYAQMTSVQNDVRITLNVGKSSGSLFRVILRYVNPGTEAVSGHITIYPSWGAAQSKEIIFLPSKEPAFVTVPGNGFADPFSITPGIWVACIKAEGVLLDYLVLLPRDYYEASVLQLPVTEPCAYAGPPQENCLLYQHLPVTRFPCTLACEARHFLLDGEPRPVAVRQPTPAHPVMVDLSGREVELHLRLRIPQVGHYVVVVEYSTEAAQLFVVDVNVKSSGSVLAGQVNIYSCNYSVLCRSAVIDHMSRIAMYELLADADIQLKGHMARFLLHQVCIIPIEEFSAEYVRPQVHCIASYGRFVNQSATCVSLAHETPPTALILDVLSGRPFPHLPQQSSPSVDVLPGVTLKAPQNQVTLRGRVPHLGRYVFVIHFYQAAHPTFPAQVSVDGGWPRAGSFHASFCPHVLGCRDQVIAEGQIEFDISEPEVAATVKVPEGKSLVLVRVLVVPAENYDYQILHKKSMDKSLEFITNCGKNSFYLDPQTASRFCKNSARSLVAFYHKGALPCECHPTGATGPHCSPEGGQCPCQPNVIGRQCTRCATGHYGFPRCKPCSCGRRLCEEMTGQCRCPPRTVRPQCEVCETHSFSFHPMAGCEGCNCSRRGTIEAAMPECDRDSGQCRCKPRITGRQCDRCASGFYRFPECVPCNCNRDGTEPGVCDPGTGACLCKENVEGTECNVCREGSFHLDPANLKGCTSCFCFGVNNQCHSSHKRRTKFVDMLGWHLETADRVDIPVSFNPGSNSMVADLQELPATIHSASWVAPTSYLGDKVSSYGGYLTYQAKSFGLPGDMVLLEKKPDVQLTGQHMSIIYEETNTPRPDRLHHGRVHVVEGNFRHASSRAPVSREELMTVLSRLADVRIQGLYFTETQRLTLSEVGLEEASDTGSGRIALAVEICACPPAYAGDSCQGCSPGYYRDHKGLYTGRCVPCNCNGHSNQCQDGSGICVNCQHNTAGEHCERCQEGYYGNAVHGSCRACPCPHTNSFATGCVVNGGDVRCSCKAGYTGTQCERCAPGYFGNPQKFGGSCQPCSCNSNGQLGSCHPLTGDCINQEPKDSSPAEECDDCDSCVMTLLNDLATMGEQLRLVKSQLQGLSASAGLLEQMRHMETQAKDLRNQLLNYRSAISNHGSKIEGLERELTDLNQEFETLQEKAQVNSRKAQTLNNNVNRATQSAKELDVKIKNVIRNVHMLNRIRTWQKTHQGENNGLANSIRDSLNEYEAKLSDLRARLQEAAAQAKQANGLNQENERALGAIQRQVKEINSLQSDFTKYLTTADSSLLQTNIALQLMEKSQKEYEKLAASLNEARQELSDKVRELSRSAGKTSLVEEAEKHARSLQELAKQLEEIKRNASGDELVRCAVDAATAYENILNAIKAAEDAANRAASASESALQTVIKEDLPRKAKTLSSNSDKLLNEAKMTQKKLKQEVSPALNNLQQTLNIVTVQKEVIDTNLTTLRDGLHGIQRGDIDAMISSAKSMVRKANDITDEVLDGLNPIQTDVERIKDTYGRTQNEDFKKALTDADNSVNKLTNKLPDLWRKIESINQQLLPLGNISDNMDRIRELIQQARDAASKVAVPMRFNGKSGVEVRLPNDLEDLKGYTSLSLFLQRPNSRENGGTENMFVMYLGNKDASRDYIGMAVVDGQLTCVYNLGDREAELQVDQILTKSETKEAVMDRVKFQRIYQFARLNYTKGATSSKPETPGVYDMDGRNSNTLLNLDPENVVFYVGGYPPDFKLPSRLSFPPYKGCIELDDLNENVLSLYNFKKTFNLNTTEVEPCRRRKEESDKNYFEGTGYARVPTQPHAPIPTFGQTIQTTVDRGLLFFAENGDRFISLNIEDGKLMVRYKLNSELPKERGVGDAINNGRDHSIQIKIGKLQKRMWINVDVQNTIIDGEVFDFSTYYLGGIPIAIRERFNISTPAFRGCMKNLKKTSGVVRLNDTVGVTKKCSEDWKLVRSASFSRGGQLSFTDLGLPPTDHLQASFGFQTFQPSGILLDHQTWTRNLQVTLEDGYIELSTSDSGGPIFKSPQTYMDGLLHYVSVISDNSGLRLLIDDQLLRNSKRLKHISSSRQSLRLGGSNFEGCISNVFVQRLSLSPEVLDLTSNSLKRDVSLGGCSLNKPPFLMLLKGSTRFNKTKTFRINQLLQDTPVASPRSVKVWQDACSPLPKTQANHGALQFGDIPTSHLLFKLPQELLKPRSQFAVDMQTTSSRGLVFHTGTKNSFMALYLSKGRLVFALGTDGKKLRIKSKEKCNDGKWHTVVFGHDGEKGRLVVDGLRAREGSLPGNSTISIRAPVYLGSPPSGKPKSLPTNSFVGCLKNFQLDSKPLYTPSSSFGVSSCLGGPLEKGIYFSEEGGHVVLAHSVLLGPEFKLVFSIRPRSLTGILIHIGSQPGKHLCVYLEAGKVTASMDSGAGGTSTSVTPKQSLCDGQWHSVAVTIKQHILHLELDTDSSYTAGQIPFPPASTQEPLHLGGAPANLTTLRIPVWKSFFGCLRNIHVNHIPVPVTEALEVQGPVSLNGCPDQ

SEQ ID NO: 7650 - protein, 576 aa, Homo sapiens
MAAAARPRGRALGPVLPPTPLLLLVLRVLPACGATARDPGAAAGLSLHPTYFNLAEAARIWATATCGERGPGEGRPQPELYCKLVGGPTAPGSGHTIQGQFCDYCNSEDPRKAHPVTNAIDGSERWWQSPPLSSGTQYNRVNLTLDLGQLFHVAYILIKFANSPRPDLWVLERSVDFGSTYSPWQYFAHSKVDCLKEFGREANMAVTRDDDVLCVTEYSRIVPLENGEVVVSLINGRPGAKNFTFSHTLREFTKATNIRLRFLRTNTLLGHLISKAQRDPTVTRRYYYSIKDISIGGQCVCNGHAEVCNINNPEKLFRCECQHHTCGETCDRCCTGYNQRRWRPAAWEQSHECEACNCHGHASNCYYDPDVERQQASLNTQGIYAGGGVCINCQHNTAGVNCEQCAKGYYRPYGVPVDAPDGCIPCSCDPEHADGCEQGSGRCHCKPNFHGDNCEKCAIGYYNFPFCLRIPIFPVSTPSSEDPVAGDIKGCDCNLEGVLPEICDAHGRCLCRPGVEGPRCDTCRSGFYSFPICQGPSEKVAIYKPESRPSAETEPASTWILDFPASRTGEINFYCL

SEQ ID NO: 7651 - protein, 1724 aa, Homo sapiens
MPPAVRRSACSMGWLWIFGAALGQCLGYSSQQQRVPFLQPPGQSQLQASYVEFRPSQGCSPGYYRDHKGLYTGRCVPCNCNGHSNQCQDGSGICVNCQHNTAGEHCERCQEGYYGNAVHGSCRACPCPHTNSFATGCVVNGGDVRCSCKAGYTGTQCERCAPGYFGNPQKFGGSCQPCSCNSNGQLGSCHPLTGDCINQEPKDSSPAEECDDCDSCVMTLLNDLATMGEQLRLVKSQLQGLSASAGLLEQMRHMETQAKDLRNQLLNYRSAISNHGSKIEGLERELTDLNQEFETLQEKAQVNSRKAQTLNNNVNRATQSAKELDVKIKNVIRNVHILLKQISGTDGEGNNVPSGDFSREWAEAQRMMRELRNRNFGKHLREAEADKRESQLLLNRIRTWQKTHQGENNGLANSIRDSLNEYEAKLSDLRARLQEAAAQAKQANGLNQENERALGAIQRQVKEINSLQSDFTKYLTTADSSLLQTNIALQLMEKSQKEYEKLAASLNEARQELSDKVRELSRSAGKTSLVEEAEKHARSLQELAKQLEEIKRNASGDELVRCAVDAATAYENILNAIKAAEDAANRAASASESALQTVIKEDLPRKAKTLSSNSDKLLNEAKMTQKKLKQEVSPALNNLQQTLNIVTVQKEVIDTNLTTLRDGLHGIQRGDIDAMISSAKSMVRKANDITDEVLDGLNPIQTDVERIKDTYGRTQNEDFKKALTDADNSVNKLTNKLPDLWRKIESINQQLLPLGNISDNMDRIRELIQQARDAASKVAVPMRFNGKSGVEVRLPNDLEDLKGYTSLSLFLQRPNSRENGGTENMFVMYLGNKDASRDYIGMAVVDGQLTCVYNLGDREAELQVDQILTKSETKEAVMDRVKFQRIYQFARLNYTKGATSSKPETPGVYDMDGRNSNTLLNLDPENVVFYVGGYPPDFKLPSRLSFPPYKGCIELDDLNENVLSLYNFKKTFNLNTTEVEPCRRRKEESDKNYFEGTGYARVPTQPHAPIPTFGQTIQTTVDRGLLFFAENGDRFISLNIEDGKLMVRYKLNSELPKERGVGDAINNGRDHSIQIKIGKLQKRMWINVDVQNTIIDGEVFDFSTYYLGGIPIAIRERFNISTPAFRGCMKNLKKTSGVVRLNDTVGVTKKCSEDWKLVRSASFSRGGQLSFTDLGLPPTDHLQASFGFQTFQPSGILLDHQTWTRNLQVTLEDGYIELSTSDSGGPIFKSPQTYMDGLLHYVSVISDNSGLRLLIDDQLLRNSKRLKHISSSRQSLRLGGSNFEGCISNVFVQRLSLSPEVLDLTSNSLKRDVSLGGCSLNKPPFLMLLKGSTRFNKTKTFRINQLLQDTPVASPRSVKVWQDACSPLPKTQANHGALQFGDIPTSHLLFKLPQELLKPRSQFAVDMQTTSSRGLVFHTGTKNSFMALYLSKGRLVFALGTDGKKLRIKSKEKCNDGKWHTVVFGHDGEKGRLVVDGLRAREGSLPGNSTISIRAPVYLGSPPSGKPKSLPTNSFVGCLKNFQLDSKPLYTPSSSFGVSSCLGGPLEKGIYFSEEGGHVVLAHSVLLGPEFKLVFSIRPRSLTGILIHIGSQPGKHLCVYLEAGKVTASMDSGAGGTSTSVTPKQSLCDGQWHSVAVTIKQHILHLELDTDSSYTAGQIPFPPASTQEPLHLGGAPANLTTLRIPVWKSFFGCLRNIHVNHIPVPVTEALEVQGPVSLNGCPDQ

SEQ ID NO: 7652 - protein, 1668 aa, Homo sapiens
MPPAVRRSACSMGWLWIFGAALGQCLGYSSQQQRVPFLQPPGQSQLQASYVEFRPSQGCSPGYYRDHKGLYTGRCVPCNCNGHSNQCQDGSGICVNCQHNTAGEHCERCQEGYYGNAVHGSCRACPCPHTNSFATGCVVNGGDVRCSCKAGYTGTQCERCAPGYFGNPQKFGGSCQPCSCNSNGQLGSCHPLTGDCINQEPKDSSPAEECDDCDSCVMTLLNDLATMGEQLRLVKSQLQGLSASAGLLEQMRHMETQAKDLRNQLLNYRSAISNHGSKIEGLERELTDLNQEFETLQEKAQVNSRKAQTLNNNVNRATQSAKELDVKIKNVIRNVHMLNRIRTWQKTHQGENNGLANSIRDSLNEYEAKLSDLRARLQEAAAQAKQANGLNQENERALGAIQRQVKEINSLQSDFTKYLTTADSSLLQTNIALQLMEKSQKEYEKLAASLNEARQELSDKVRELSRSAGKTSLVEEAEKHARSLQELAKQLEEIKRNASGDELVRCAVDAATAYENILNAIKAAEDAANRAASASESALQTVIKEDLPRKAKTLSSNSDKLLNEAKMTQKKLKQEVSPALNNLQQTLNIVTVQKEVIDTNLTTLRDGLHGIQRGDIDAMISSAKSMVRKANDITDEVLDGLNPIQTDVERIKDTYGRTQNEDFKKALTDADNSVNKLTNKLPDLWRKIESINQQLLPLGNISDNMDRIRELIQQARDAASKVAVPMRFNGKSGVEVRLPNDLEDLKGYTSLSLFLQRPNSRENGGTENMFVMYLGNKDASRDYIGMAVVDGQLTCVYNLGDREAELQVDQILTKSETKEAVMDRVKFQRIYQFARLNYTKGATSSKPETPGVYDMDGRNSNTLLNLDPENVVFYVGGYPPDFKLPSRLSFPPYKGCIELDDLNENVLSLYNFKKTFNLNTTEVEPCRRRKEESDKNYFEGTGYARVPTQPHAPIPTFGQTIQTTVDRGLLFFAENGDRFISLNIEDGKLMVRYKLNSELPKERGVGDAINNGRDHSIQIKIGKLQKRMWINVDVQNTIIDGEVFDFSTYYLGGIPIAIRERFNISTPAFRGCMKNLKKTSGVVRLNDTVGVTKKCSEDWKLVRSASFSRGGQLSFTDLGLPPTDHLQASFGFQTFQPSGILLDHQTWTRNLQVTLEDGYIELSTSDSGGPIFKSPQTYMDGLLHYVSVISDNSGLRLLIDDQLLRNSKRLKHISSSRQSLRLGGSNFEGCISNVFVQRLSLSPEVLDLTSNSLKRDVSLGGCSLNKPPFLMLLKGSTRFNKTKTFRINQLLQDTPVASPRSVKVWQDACSPLPKTQANHGALQFGDIPTSHLLFKLPQELLKPRSQFAVDMQTTSSRGLVFHTGTKNSFMALYLSKGRLVFALGTDGKKLRIKSKEKCNDGKWHTVVFGHDGEKGRLVVDGLRAREGSLPGNSTISIRAPVYLGSPPSGKPKSLPTNSFVGCLKNFQLDSKPLYTPSSSFGVSSCLGGPLEKGIYFSEEGGHVVLAHSVLLGPEFKLVFSIRPRSLTGILIHIGSQPGKHLCVYLEAGKVTASMDSGAGGTSTSVTPKQSLCDGQWHSVAVTIKQHILHLELDTDSSYTAGQIPFPPASTQEPLHLGGAPANLTTLRIPVWKSFFGCLRNIHVNHIPVPVTEALEVQGPVSLNGCPDQ

SEQ ID NO: 7653 - protein, 59 aa, Homo sapiens
  SITE 1: note = misc_feature - Xaa can be any naturally occurring amino acid
XAGQVNIYSCNYRCDAMNSLLSPQRLCQVPGCIAQGKRLILSNVRGCTPTFATHLQNWG

SEQ ID NO: 7654 - protein, 1147 aa, Homo sapiens
  SITE 1: note = misc_feature - Xaa can be any naturally occurring amino acid
XFATGCVVNGGDVRCSCKAGYTGTQCERCAPGYFGNPQKFGGSCQPCSCNSNGQLGSCHPLTGDCINQEPKDSSPAEECDDCDSCVMTLLNDLATMGEQLRLVKSQLQGLSASAGLLEQMRHMETQAKDLRNQLLNYRSAISNHGSKIEGLERELTDLNQEFETLQEKAQVNSRKAQTLNNNVNRATQSAKELDVKIKNVIRNVHILLKQISGTDGEGNNVPSGDFSREWAEAQRMMRELRNRNFGKHLREAEADKRESQLLLNRIRTWQKTHQGENNGLANSIRDSLNEYEAKLSDLRARLQEAAAQAKQANGLNQENERALGAIQRQVKEINSLQSDFTKYLTTADSSLLQTNIALQLMEKSQKEYEKLAASLNEARQELSDKVRELSRSAGKTSLVEEAEKHARSLQELAKQLEEIKRNASGDELVRCAVDAATAYENILNAIKAAEDAANRAASASESALQTVIKEDLPRKAKTLSSNSDKLLNEAKMTQKKLKQEVSPALNNLQQTLNIVTVQKEVIDTNLTTLRDGLHGIQRGDIDAMISSAKSMVRKANDITDEVLDGLNPIQTDVERIKDTYGRTQNEDFKKALTDADNSVNKLTNKLPDLWRKIESINQQLLPLGNISDNMDRIRELIQQARDAASKVAVPMRFNGKSGVEVRLPNDLEDLKGYTSLSLFLQRPNSRENGGTENMFVMYLGNKDASRDYIGMAVVDGQLTCVYNLGDREAELQVDQILTKSETKEAVMDRVKFQRIYQFARLNYTKGATSSKPETPGVYDMDGRNSNTLLNLDPENVVFYVGGYPPDFKLPSRLSFPPYKGCIELDDLNENVLSLYNFKKTFNLNTTEVEPCRRRKEESDKNYFEGTGYARVPTQPHAPIPTFGQTIQTTVDRGLLFFAENGDRFISLNIEDGKLMVRYKLNSELPKERGVGDAINNGRDHSIQIKIGKLQKRMWINVDVQNTIIDGEVFDFSTYYLGGIPIAIRERFNISTPAFRGCMKNLKKTSGVVRLNDTVGVTKKCSEDWKLVRSASFSRGGQLSFTDLGLPPTDHLQASFGFQTFQPSGILLDHQTWTRNLQVTLEDGYIELSTSDSGGPIFKSPQTYMDGLLHYVSVISDNSGLRQEGCLRPRVRDQSWKHSETMSLRKLK

SEQ ID NO: 7655 - protein, 134 aa, Homo sapiens
  SITE 1: note = misc_feature - Xaa can be any naturally occurring amino acid
XFSEEGGHVVLAHSVLLGPEFKLVFSIRPRSLTGILIHIGSQPGKHLCVYLEAGKVTASMDSGAGGTSTSVTPKQSLCDGQWHSVAANLTTLRIPVWKSFFGCLRNIHVNHIPVPVTEALEVQGPVSLNGCPDQ

SEQ ID NO: 7656 - protein, 37 aa, Homo sapiens
  SITE 1: note = misc_feature - Xaa can be any naturally occurring amino acid
XGWTEGPGGKFAWKLHHQHQSASLPGITSIRETKGAG

SEQ ID NO: 7657 - protein, 81 aa, Homo sapiens
MALSSAWRSVLPLWLLWSAACSRAASGDDNAFPFDIEGSSAVGRQDPPETSEPRVALGRLPPAAEKCNAGFFHTLSGECVP

SEQ ID NO: 7658 - protein, 88 aa, Homo sapiens
MALSSAWRSVLPLWLLWSAACSRAASGDDNAFPFDIEGSSAVGRQDPPETSEPRVALGRLPPAAEKCNAGFFHTLSGECVPCDCNGNS

SEQ ID NO: 7659 - protein, 107 aa, Homo sapiens
MALSSAWRSVLPLWLLWSAACSRAASGDDNAFPFDIEGSSAVGRQDPPETSEPRVALGRLPPAAEKCNAGFFHTLSGECVPCDCNGNSNECLDGSGYCVHCQRNTTG

SEQ ID NO: 7660 - protein, 1823 aa, Homo sapiens
MALSSAWRSVLPLWLLWSAACSRAASGDDNAFPFDIEGSSAVGRQDPPETSEPRVALGRLPPAAEKCNAGFFHTLSGECVPCDCNGNSNECLDGSGYCVHCQRNTTGEHCEKCLDGYIGDSIRGAPQFCQPCPCPLPHLANFAESCYRKNGAVRCICNENYAGPNCERCAPGYYGNPLLIGSTCKKCDCSGNSDPNLIFEDCDEVTGQCRNCLRNTTGFKCERCAPGYYGDARIAKNCAVCNCGGGPCDSVTGECLEEGFEPPTGMDCPTISCDKCVWDLTDDLRLAALSIEEGKSGVLSVSSGAAAHRHVNEINATIYLLKTKLSERENQYALRKIQINNAENTMKSLLSDVEELVEKENQASRKGQLVQKESMDTINHASQLVEQAHDMRDKIQEINNKMLYYGEEHELSPKEISEKLVLAQKMLEEIRSRQPFFTQRELVDEEADEAYELLSQAESWQRLHNETRTLFPVVLEQLDDYNAKLSDLQEALDQALNYVRDAEDMNRATAARQRDHEKQQERVREQMEVVNMSLSTSADSLTTPRLTLSELDDIIKNASGIYAEIDGAKSELQVKLSNLSNLSHDLVQEAIDHAQDLQQEANELSRKLHSSDMNGLVQKALDASNVYENIVNYVSEANETAEFALNTTDRIYDAVSGIDTQIIYHKDESENLLNQARELQAKAESSSDEAVADTSRRVGGALARKSALKTRLSDAVKQLQAAERGDAQQRLGQSRLITEEANRTTMEVQQATAPMANNLTNWSQNLQHFDSSAYNTAVNSARDAVRNLTEVVPQLLDQLRTVEQKRPASNVSASIQRIRELIAQTRSVASKIQVSMMFDGQSAVEVHSRTSMDDLKAFTSLSLYMKPPVKRPELTETADQFILYLGSKNAKKEYMGLAIKNDNLVYVYNLGTKDVEIPLDSKPVSSWPAYFSIVKIERVGKHGKVFLTVPSLSSTAEEKFIKKGEFSGDDSLLDLDPEDTVFYVGGVPSNFKLPTSLNLPGFVGCLELATLNNDVISLYNFKHIYNMDPSTSVPCARDKLAFTQSRAASYFFDGSGYAVVRDITRRGKFGQVTRFDIEVRTPADNGLILLMVNGSMFFRLEMRNGYLHVFYDFGFSGGPVHLEDTLKKAQINDAKYHEISIIYHNDKKMILVVDRRHVKSMDNEKMKIPFTDIYIGGAPPEILQSRALRAHLPLDINFRGCMKGFQFQKKDFNLLEQTETLGVGYGCPEDSLISRRAYFNGQSFIASIQKISFFDGFEGGFNFRTLQPNGLLFYYASGSDVFSISLDNGTVIMDVKGIKVQSVDKQYNDGLSHFVISSVSPTRYELIVDKSRVGSKNPTKGKIEQTQASEKKFYFGGSPISAQYANFTGCISNAYFTRVDRDVEVEDFQRYTEKVHTSLYECPIESSPLFLLHKKGKNLSKPKASQNKKGGKSKDAPSWDPVALKLPERNTPRNSHCHLSNSPRAIEHAYQYGGTANSRQEFEHLKGDFGAKSQFSIRLRTRSSHGMIFYVSDQEENDFMTLFLAHGRLVYMFNVGHKKLKIRSQEKYNDGLWHDVIFIRERSSGRLVIDGLRVLEESLPPTEATWKIKGPIYLGGVAPGKAVKNVQINSIYSFSGCLSNLQLNGASITSASQTFSVTPCFEGPMETGTYFSTEGGYVVLDESFNIGLKFEIAFEVRPRSSSGTLVHGHSVNGEYLNVHMKNGQVIVKVNNGIRDFSTSVTPKQSLCDGRWHRITVIRDSNVVQLDVDSEVNHVVGPLNPKPIDHREPVFVGGVPESLLTPRLAPSKPFTGCIRHFVIDGHPVSFSKAALVSGAVSINSCPAA

SEQ ID NO: 7661 - protein, 1816 aa, Homo sapiens
MALSSAWRSVLPLWLLWSAACSRAASGDDNAFPFDIEGSSAVGRQDPPETSEPRVALGRLPPAAEKCNAGFFHTLSGECVPCDCNGNSNECLDGSGYCVHCQRNTTGEHCEKCLDGYIGDSIRGAPQFCQPCPCPLPHLANFAESCYRKNGAVRCICNENYAGPNCERCAPGYYGNPLLIGSTCKKCDCSGNSDPNLIFEDCDEVTGQCRNCLRNTTGFKCERCAPGYYGDARIAKNCAVCNCGGGPCDSVTGECLEEGFEPPTGCDKCVWDLTDDLRLAALSIEEGKSGVLSVSSGAAAHRHVNEINATIYLLKTKLSERENQYALRKIQINNAENTMKSLLSDVEELVEKENQASRKGQLVQKESMDTINHASQLVEQAHDMRDKIQEINNKMLYYGEEHELSPKEISEKLVLAQKMLEEIRSRQPFFTQRELVDEEADEAYELLSQAESWQRLHNETRTLFPVVLEQLDDYNAKLSDLQEALDQALNYVRDAEDMNRATAARQRDHEKQQERVREQMEVVNMSLSTSADSLTTPRLTLSELDDIIKNASGIYAEIDGAKSELQVKLSNLSNLSHDLVQEAIDHAQDLQQEANELSRKLHSSDMNGLVQKALDASNVYENIVNYVSEANETAEFALNTTDRIYDAVSGIDTQIIYHKDESENLLNQARELQAKAESSSDEAVADTSRRVGGALARKSALKTRLSDAVKQLQAAERGDAQQRLGQSRLITEEANRTTMEVQQATAPMANNLTNWSQNLQHFDSSAYNTAVNSARDAVRNLTEVVPQLLDQLRTVEQKRPASNVSASIQRIRELIAQTRSVASKIQVSMMFDGQSAVEVHSRTSMDDLKAFTSLSLYMKPPVKRPELTETADQFILYLGSKNAKKEYMGLAIKNDNLVYVYNLGTKDVEIPLDSKPVSSWPAYFSIVKIERVGKHGKVFLTVPSLSSTAEEKFIKKGEFSGDDSLLDLDPEDTVFYVGGVPSNFKLPTSLNLPGFVGCLELATLNNDVISLYNFKHIYNMDPSTSVPCARDKLAFTQSRAASYFFDGSGYAVVRDITRRGKFGQVTRFDIEVRTPADNGLILLMVNGSMFFRLEMRNGYLHVFYDFGFSGGPVHLEDTLKKAQINDAKYHEISIIYHNDKKMILVVDRRHVKSMDNEKMKIPFTDIYIGGAPPEILQSRALRAHLPLDINFRGCMKGFQFQKKDFNLLEQTETLGVGYGCPEDSLISRRAYFNGQSFIASIQKISFFDGFEGGFNFRTLQPNGLLFYYASGSDVFSISLDNGTVIMDVKGIKVQSVDKQYNDGLSHFVISSVSPTRYELIVDKSRVGSKNPTKGKIEQTQASEKKFYFGGSPISAQYANFTGCISNAYFTRVDRDVEVEDFQRYTEKVHTSLYECPIESSPLFLLHKKGKNLSKPKASQNKKGGKSKDAPSWDPVALKLPERNTPRNSHCHLSNSPRAIEHAYQYGGTANSRQEFEHLKGDFGAKSQFSIRLRTRSSHGMIFYVSDQEENDFMTLFLAHGRLVYMFNVGHKKLKIRSQEKYNDGLWHDVIFIRERSSGRLVIDGLRVLEESLPPTEATWKIKGPIYLGGVAPGKAVKNVQINSIYSFSGCLSNLQLNGASITSASQTFSVTPCFEGPMETGTYFSTEGGYVVLDESFNIGLKFEIAFEVRPRSSSGTLVHGHSVNGEYLNVHMKNGQVIVKVNNGIRDFSTSVTPKQSLCDGRWHRITVIRDSNVVQLDVDSEVNHVVGPLNPKPIDHREPVFVGGVPESLLTPRLAPSKPFTGCIRHFVIDGHPVSFSKAALVSGAVSINSCPAA

SEQ ID NO: 7662 - protein, 1816 aa, Homo sapiens; identical to SEQ ID NO: 7661

SEQ ID NO: 7663 - protein, 1816 aa, Homo sapiens; identical to SEQ ID NO: 7661

SEQ ID NO: 7664 - protein, 331 aa, Homo sapiens
MALSSAWRSVLPLWLLWSAACSRAASGDDNAFPFDIEGSSAVGRQDPPETSEPRVALGRLPPAAEKCNAGFFHTLSGECVPCDCNGNSNECLDGSGYCVHCQRNTTGEHCEKCLDGYIGDSIRGAPQFCQPCPCPLPHLANFAESCYRKNGAVRCICNENYAGPNCERCAPGYYGNPLLIGSTCKKCDCSGNSDPNLIFEDCDEVTGQCRNCLRNTTGFKCERCAPGYYGDARIAKNCAVCNCGGGPCDSVTGECLEEGFEPPTGMDCPTISCDKCVWDLTDDLRLAALSIEEGKSGVLSVSSGAAAHRHVNEINATIYLLKTKLSERENQ

SEQ ID NO: 7665 - protein, 129 aa, Homo sapiens
MALSSAWRSVLPLWLLWSAACSRAASGDDNAFPFDIEGSSAVGRQDPPETSEPRVALGRLPPAAEKCNAGFFHTLSGECVPCDCNGNSNECLDGSGYCVTTDGEDPGFSASALSFILSSQGAREARAPT

SEQ ID NO: 7666 - protein, 120 aa, Homo sapiens
MALSSAWRSVLPLWLLWSAACSRAASGDDNAFPFDIEGSSAVGRQDPPETSEPRVALGRLPPAAEVQCPCHCHPAGAPAPPRAVPHSSFSLSPPLSSPQCLESFTWARSVRKLEIKSFPL

SEQ ID NO: 7667 - protein, 120 aa, Homo sapiens; identical to SEQ ID NO: 7666

SEQ ID NO: 7668 - protein, 120 aa, Homo sapiens; identical to SEQ ID NO: 7666

SEQ ID NO: 7669 - protein, 178 aa, Homo sapiens
  SITE 1: note = misc_feature - Xaa can be any naturally occurring amino acid
XIFEDCDEVTGQCRNCLRNTTGFKCERCAPGYYGDARIAKNCAVCNCGGGPCDSVTGECLEEGFEPPTGMDCPTISCDKCVWDLTDDLRLAALSIEEGKSGVLSVSSGAAAHRHVNEINATIYLLKTKLSERENQYALRKIQINNAENTMKSLLSDVEELVEKHWNKPRRRLELQEGV

SEQ ID NO: 7670 - protein, 188 aa, Homo sapiens
  SITE 1: note = misc_feature - Xaa can be any naturally occurring amino acid
XKNASGIYAEIDGAKSELQVKLSNLSNLSHDLVQEAIDHAQDLQQEANELSRKLHSSDMNGLVQKALDASNVYENIVNYVSEANETAEFALNTTDRIYDAVSGIDTQIIYHKDESENLLNQARELQAKAESSSDEAVADTSRRVGGALARKSALKTRLSDAVKQLQAAERGKHQRELKSHLLIHWSVR

SEQ ID NO: 7671 - protein, 187 aa, Homo sapiens
  SITE 1: note = misc_feature - Xaa can be any naturally occurring amino acid
XSTCKKCDCSGNSDPNLIFEDCDEVTGQCRNCLRNTTGFKCERCAPGYYGDARIAKNCAVCNCGGGPCDSVTGECLEEGFEPPTGCDKCVWDLTDDLRLAALSIEEGKSGVLSVSSGAAAHRHVNEINATIYLLKTKLSERENQYALRKIQINNAENTMKSLLSDVEELVEKHWNKPRRRLELQEGV

SEQ ID NO: 7672 - protein, 38 aa, Homo sapiens
CVPGAYNFPYCEGAVWWDGTSVAAEGAGRCVFSGRPCG

SEQ ID NO: 7673 - protein, 3695 aa, Homo sapiens
MAKRLCAGSALCVRGPRGPAPLLLVGLALLGAARAREEAGGGFSLHPPYFNLAEGARIAASATCGEEAPARGSPRPTEDLYCKLVGGPVAGGDPNQTIRGQYCDICTAANSNKAHPASNAIDGTERWWQSPPLSRGLEYNEVNVTLDLGQVFHVAYVLIKFANSPRPDLWVLERSMDFGRTYQPWQFFASSKRDCLERFGPQTLERITRDDAAICTTEYSRIVPLENGEIVVSLVNGRPGAMNFSYSPLLREFTKATNVRLRFLRTNTLLGHLMGKALRDPTVTRRYYYSIKDISIGGRCVCHGHADACDAKDPTDPFRLQCTCQHNTCGGTCDRCCPGFNQQPWKPATANSANECQSCNCYGHATDCYYDPEVDRRRASQSLDGTYQGGGVCIDCQHHTTGVNCERCLPGFYRSPNHPLDSPHVCRRCNCESDFTDGTCEDLTGRCYCRPNFSGERCDVCAEGFTGFPSCYPTPSSSNDTREQVLPAGQIVNCDCSAAGTQGNACRKDPRVGRCLCKPNFQGTHCELCAPGFYGPGCQPCQCSSPGVADDRCDPDTGQCRCRVGFEGATCDRCAPGYFHFPLCQLCGCSPAGTLPEGCDEAGRCLCQPEFAGPHCDRCRPGYHGFPNCQACTCDPRGALDQLCGAGGLCRCRPGYTGTACQECSPGFHGFPSCVPCHCSAEGSLHAACDPRSGQCSCRPRVTGLRCDTCVPGAYNFPYCEAGSCHPAGLAPVDPALPEAQVPCMCRAHVEGPSCDRCKPGFWGLSPSNPEGCTRCSCDLRGTLGGVAECQPGTGQCFCKPHVCGQACASCKDGFFGLDQADYFGCRSCRCDIGGALGQSCEPRTGVCRCRPNTQGPTCSEPARDHYLPDLHHLRLELEEAATPEGHAVRFGFNPLEFENFSWRGYAQMAPVQPRIVARLNLTSPDLFWLVFRYVNRGAMSVSGRVSVREEGRSATCANCTAQSQPVAFPPSTEPAFITVPQRGFGEPFVLNPGTWALRVEAEGVLLDYVVLLPSAYYEAALLQLRVTEACTYRPSAQQSGDNCLLYTHLPLDGFPSAAGLEALCRQDNSLPRPCPTEQLSPSHPPLITCTGSDVDVQLQVAVPQPGRYALVVEYANEDARQEVGVAVHTPQRAPQQGLLSLHPCLYSTLCRGTARDTQDHLAVFHLDSEASVRLTAEQARFFLHGVTLVPIEEFSPEFVEPRVSCISSHGAFGPNSAACLPSRFPKPPQPIILRDCQVIPLPPGLPLTHAQDLTPAMSPAGPRPRPPTAVDPDAEPTLLREPQATVVFTTHVPTLGRYAFLLHGYQPAHPTFPVEVLINAGRVWQGHANASFCPHGYGCRTLVVCEGQALLDVTHSELTVTVRVPKGRWLWLDYVLVVPENVYSFGYLREEPLDKSYDFISHCAAQGYHISPSSSSLFCRNAAASLSLFYNNGARPCGCHEVGATGPTCEPFGGQCPCHAHVIGRDCSRCATGYWGFPNCRPCDCGARLCDELTGQCICPPRTIPPDCLLCQPQTFGCHPLVGCEECNCSGPGIQELTDPTCDTDSGQCKCRPNVTGRRCDTCSPGFHGYPRCRPCDCHEAGTAPGVCDPLTGQCYCKENVQGPKCDQCSLGTFSLDAANPKGCTRCFCFGATERCRSSSYTRQEFVDMEGWVLLSTDRQVVPHERQPGTEMLRADLRHVPEAVPEAFPELYWQAPPSYLGDRVSSYGGTLRYELHSETQRGDVFVPMESRPDVVLQGNQMSITFLEPAYPTPGHVHRGQLQLVEGNFRHTETRNTVSREELMMVLASLEQLQIRALFSQISSAVFLRRVALEVASPAGQGALASNVELCLCPASYRGDSCQECAPGFYRDVKGLFLGRCVPCQCHGHSDRCLPGSGVCVDCQHNTEGAHCERCQAGFVSSRDDPSAPCVSCPCPLSVPSNNFAEGCVLRGGRTQCLCKPGYAGASCERCAPGFFGNPLVLGSSCQPCDCSGNGDPNLLFSDCDPLTGACRGCLRHTTGPRCEICAPGFYGNALLPGNCTRCDCTPCGTEACDPHSGHCLCKAGVTGRRCDRCQEGHFGFDGCGGCRPCACGPAAEGSECHPQSGQCHCRPGTMGPQCRECAPGYWGLPEQGCRRCQCPGGRCDPHTGRCNCPPGLSGERCDTCSQQHQVPVPGGPVGHSIHCEVCDHCVVLLLDDLERAGALLPAIHEQLRGINASSMAWARLHRLNASIADLQSQLRSPLGPRHETAQQLEVLEQQSTSLGQDARRLGGQAVGTRDQASQLLAGTEATLGHAKTLLAAIRAVDRTLSELMSQTGHLGLANASAPSGEQLLRTLAEVERLLWEMRARDLGAPQAAAEAELAAAQRLLARVQEQLSSLWEENQALATQTRDRLAQHEAGLMDLREALNRAVDATREAQELNSRNQERLEEALQRKQELSRDNATLQATLHAARDTLASVFRLLHSLDQAKEELERLAASLDGARTPLLQRMQTFSPAGSKLRLVEAAEAHAQQLGQLALNLSSIILDVNQDRLTQRAIEASNAYSRILQAVQAAEDAAGQALQQADHTWATVVRQGLVDRAQQLLANSTALEEAMLQEQQRLGLVWAALQGARTQLRDVRAKKDQLEAHIQAAQAMLAMDTDETSKKIAHAKAVAAEAQDTATRVQSQLQAMQENVERWQGQYEGLRGQDLGQAVLDAGHSVSTLEKTLPQLLAKLSILENRGVHNASLALSASIGRVRELIAQARGAASKVKVPMKFNGRSGVQLRTPRDLADLAAYTALKFYLQGPEPEPGQGTEDRFVMYMGSRQATGDYMGVSLRDKKVHWVYQLGEAGPAVLSIDEDIGEQFAAVSLDRTLQFGHMSVTVERQMIQETKGDTVAPGAEGLLNLRPDDFVFYVGGYPSTFTPPPLLRFPGYRGCIEMDTLNEEVVSLYNFERTFQLDTAVDRPCARSKSTGDPWLTDGSYLDGTGFARISFDSQISTTKRFEQELRLVSYSGVLFFLKQQSQFLCLAVQEGSLVLLYDFGAGLKKAVPLQPPPPLTSASKAIQVFLLGGSRKRVLVRVERATVYSVEQDNDLELADAYYLGGVPPDQLPPSLRRLFPTGGSVRGCVKGIKALGKYVDLKRLNTTGVSAGCTADLLVGRAMTFHGHGFLRLALSNVAPLTGNVYSGFGFHSAQDSALLYYRASPDGLCQVSLQQGRVSLQLLRTEVKTQAGFADGAPHYVAFYSNATGVWLYVDDQLQQMKPHRGPPPELQPQPEGPPRLLLGGLPESGTIYNFSGCISNVFVQRLLGPQRVFDLQQNLGSVNVSTGCAPALQAQTPGLGPRGLQATARKASRRSRQPARHPACMLPPHLRTTRDSYQFGGSLSSHLEFVGILARHRNWPSLSMHVLPRSSRGLLLFTARLRPGSPSLALFLSNGHFVAQMEGLGTRLRAQSRQRSRPGRWHKVSVRWEKNRILLVTDGARAWSQEGPHRQHQGAEHPQPHTLFVGGLPASSHSSKLPVTVGFSGCVKRLRLHGRPLGAPTRMAGVTPCILGPLEAGLFFPGSGGVITLDLPGATLPDVGLELEVRPLAVTGLIFHLGQARTPPYLQLQVTEKQVLLRADDGAGEFSTSVTRPSVLCDGQWHRLAVMKSGNVLRLEVDAQSNHTVGPLLAAAAGAPAPLYLGGLPEPMAVQPWPPAYCGCMRRLAVNRSPVAMTRSVEVHGAVGASGCPAA

SEQ ID NO: 7674 - protein, 241 aa, Homo sapiens
RLRFLRTNTLLGHLMGKALRDPTVTRRYYYSIKDISIGGRCVCHGHADACDAKDPTDPFSSPNLSGHNRQLPCCPSPDLHSSQAGTKAQDGDGRVGAANTPHLLCPVCLLSGAAEGTAEHPPPGSPSQDGQQPWCWHRHIPGPHPESSVRLQCTCQHNTCGGTCDRCCPGFNQQPWKPATANSANECQSCNCYGHATDCYYDPEVDRRRASQSLDGTYQGGGVCIDCQHHTTGVNCERCLP

SEQ ID NO: 7675 - protein, 1810 aa, Homo sapiens
MDCPLSAPTPPPPLVRFFRAPLPACVPPTLLPVLPAALCRARVRAQEPEFSYGCAEGSCYPATGDLLIGRAQKLSVTSTCGLHKPEPYCIVSHLQEDKKCFICNSQDPYHETLNPDSHLIENVVTTFAPNRLKIWWQSENGVENVTIQLDLEAEFHFTHLIMTFKTFRPAAMLIERSSDFGKTWGVYRYFAYDCEASFPGISTGPMKKVDDIICDSRYSDIEPSTEGEVIFRALDPAFKIEDPYSPRIQNLLKITNLRIKFVKLHTLGDNLLDSRMEIREKYYYAVYDMVVRGNCFCYGHASECAPVDGFNEEVEGMVHGHCMCRHNTKGLNCELCMDFYHDLPWRPAEGRNSNACKKCNCNEHSISCHFDMAVYLATGNVSGGVCDDCQHNTMGRNCEQCKPFYYQHPERDIRDPNFCERCTCDPAGSQNEGICDSYTDFSTGLIAGQCRCKLNVEGEHCDVCKEGFYDLSSEDPFGCKSCACNPLGTIPGGNPCDSETGHCYCKRLVTGQHCDQCLPEHWGLSNDLDGCRPCDCDLGGALNNSCFAESGQCSCRPHMIGRQCNEVEPGYYFATLDHYLYEAEEANLGPGVSIVERQYIQDRIPSWTGAGFVRVPEGAYLEFFIDNIPYSMEYDILIRYEPQLPDHWEKAVITVQRPGRIPTSSRCGNTIPDDDNQVVSLSPGSRYVVLPRPVCFEKGTNYTVRLELPQYTSSDSDVESPYTLIDSLVLMPYCKSLDIFTVGGSGDGVVTNSAWETFQRYRCLENSRSVVKTPMTDVCRNIIFSISALLHQTGLACECDPQGSLSSVCDPNGGQCQCRPNVVGRTCNRCAPGTFGFGPSGCKPCECHLQGSVNAFCNPVTGQCHCFQGVYARQCDRCLPGHWGFPSCQPCQCNGHADDCDPVTGECLNCQDYTMGHNCERCLAGYYGDPIIGSGDHCRPCPCPDGPDSGRQFARSCYQDPVTLQLACVCDPGYIGSRCDDCASGYFGNPSEVGGSCQPCQCHNNIDTTDPEACDKETGRCLKCLYHTEGEHCQFCRFGYYGDALQQDCRKCVCNYLGTVQEHCNGSDCQCDKATGQCLCLPNVIGQNCDRCAPNTWQLASGTGCDPCNCNAAHSFGPSCNEFTGQCQCMPGFGGRTCSECQELFWGDPDVECRACDCDPRGIETPQCDQSTGQCVCVEGVEGPRCDKCTRGYSGVFPDCTPCHQCFALWDVIIAELTNRTHRFLEKAKALKISGVIGPYRETVDSVERKVSEIKDILAQSPAAEPLKNIGNLFEEAEKLIKDVTEMMAQVEVKLSDTTSQSNSTAKELDSLQTEAESLDNTVKELAEQLEFIKNSDIRGALDSITKYFQMSLEAEERVNASTTEPNSTVEQSALMRDRVEDVMMERESQFKEKQEEQARLLDELAGKLQSLDLSAAAEMTCGTPPGASCSETECGGPNCRTDEGERKCGGPGCGGLVTVAHNAWQKAMDLDQDVLSALAEVEQLSKMVSEAKLRADEAKQSAEDILLKTNATKEKMDKSNEELRNLIKQIRNFLTQDSADLDSIEAVANEVLKMEMPSTPQQLQNLTEDIRERVESLSQVEVILQHSAADIARAEMLLEEAKRASKSATDVKVTADMVKEALEEAEKAQVAAEKAIKQADEDIQGTQNLLTSIESETAASEETLFNASQRISELERNVEELKRKAAQNSGEAEYIEKVVYTVKQSAEDVKKTLDGELDEKYKKVENLIAKKTEESADARRKAEMLQNEAKTLLAQANSKLQLLKDLERKYEDNQRYLEDKAQELARLEGEVRSLLKDISQKVAVYSTCL

SEQ ID NO: 7676 - protein, 91 aa, Homo sapiens
MGLLQLLAFSFLALCRARVRAQEPEFSYGCAEGSCYPATGDLLIGRAQKLSVTSTCGLHKPEPYCIVSHLQEDKKCFICNSQDPYHETLNP

SEQ ID NO: 7677 - protein, 1786 aa, Homo sapiens
MGLLQLLAFSFLALCRARVRAQEPEFSYGCAEGSCYPATGDLLIGRAQKLSVTSTCGLHKPEPYCIVSHLQEDKKCFICNSQDPYHETLNPDSHLIENVVTTFAPNRLKIWWQSENGVENVTIQLDLEAEFHFTHLIMTFKTFRPAAMLIERSSDFGKTWGVYRYFAYDCEASFPGISTGPMKKVDDIICDSRYSDIEPSTEGEVIFRALDPAFKIEDPYSPRIQNLLKITNLRIKFVKLHTLGDNLLDSRMEIREKYYYAVYDMVVRGNCFCYGHASECAPVDGFNEEVEGMVHGHCMCRHNTKGLNCELCMDFYHDLPWRPAEGRNSNACKKCNCNEHSISCHFDMAVYLATGNVSGGVCDDCQHNTMGRNCEQCKPFYYQHPERDIRDPNFCERCTCDPAGSQNEGICDSYTDFSTGLIAGQCRCKLNVEGEHCDVCKEGFYDLSSEDPFGCKSCACNPLGTIPGGNPCDSETGHCYCKRLVTGQHCDQCLPEHWGLSNDLDGCRPCDCDLGGALNNSCFAESGQCSCRPHMIGRQCNEVEPGYYFATLDHYLYEAEEANLGPGVSIVERQYIQDRIPSWTGAGFVRVPEGAYLEFFIDNIPYSMEYDILIRYEPQLPDHWEKAVITVQRPGRIPTSSRCGNTIPDDDNQVVSLSPGSRYVVLPRPVCFEKGTNYTVRLELPQYTSSDSDVESPYTLIDSLVLMPYCKSLDIFTVGGSGDGVVTNSAWETFQRYRCLENSRSVVKTPMTDVCRNIIFSISALLHQTGLACECDPQGSLSSVCDPNGGQCQCRPNVVGRTCNRCAPGTFGFGPSGCKPCECHLQGSVNAFCNPVTGQCHCFQGVYARQCDRCLPGHWGFPSCQPCQCNGHADDCDPVTGECLNCQDYTMGHNCERCLAGYYGDPIIGSGDHCRPCPCPDGPDSGRQFARSCYQDPVTLQLACVCDPGYIGSRCDDCASGYFGNPSEVGGSCQPCQCHNNIDTTDPEACDKETGRCLKCLYHTEGEHCQFCRFGYYGDALQQDCRKCVCNYLGTVQEHCNGSDCQCDKATGQCLCLPNVIGQNCDRCAPNTWQLASGTGCDPCNCNAAHSFGPSCNEFTGQCQCMPGFGGRTCSECQELFWGDPDVECRACDCDPRGIETPQCDQSTGQCVCVEGVEGPRCDKCTRGYSGVFPDCTPCHQCFALWDVIIAELTNRTHRFLEKAKALKISGVIGPYRETVDSVERKVSEIKDILAQSPAAEPLKNIGNLFEEAEKLIKDVTEMMAQVEVKLSDTTSQSNSTAKELDSLQTEAESLDNTVKELAEQLEFIKNSDIRGALDSITKYFQMSLEAEERVNASTTEPNSTVEQSALMRDRVEDVMMERESQFKEKQEEQARLLDELAGKLQSLDLSAAAEMTCGTPPGASCSETECGGPNCRTDEGERKCGGPGCGGLVTVAHNAWQKAMDLDQDVLSALAEVEQLSKMVSEAKLRADEAKQSAEDILLKTNATKEKMDKSNEELRNLIKQIRNFLTQDSADLDSIEAVANEVLKMEMPSTPQQLQNLTEDIRERVESLSQVEVILQHSAADIARAEMLLEEAKRASKSATDVKVTADMVKEALEEAEKAQVAAEKAIKQADEDIQGTQNLLTSIESETAASEETLFNASQRISELERNVEELKRKAAQNSGEAEYIEKVVYTVKQSAEDVKKTLDGELDEKYKKVENLIAKKTEESADARRKAEMLQNEAKTLLAQANSKLQLLKDLERKYEDNQRYLEDKAQELARLEGEVRSLLKDISQKVAVYSTCL

SEQ ID NO: 7678 - protein, 850 aa, Homo sapiens
MGLLQLLAFSFLALCRARVRAQEPEFSYGCAEGSCYPATGDLLIGRAQKLSVTSTCGLHKPEPYCIVSHLQEDKKCFICNSQDPYHETLNPDSHLIENVVTTFAPNRLKIWWQSENGVENVTIQLDLEAEFHFTHLIMTFKTFRPAAMLIERSSDFGKTWGVYRYFAYDCEASFPGISTGPMKKVDDIICDSRYSDIEPSTEGEVIFRALDPAFKIEDPYSPRIQNLLKITNLRIKFVKLHTLGDNLLDSRMEIREKYYYAVYDMVVRGNCFCYGHASECAPVDGFNEEVEGMVHGHCMCRHNTKGLNCELCMDFYHDLPWRPAEGRNSNACKKCNCNEHSISCHFDMAVYLATGNVSGGVCDDCQHNTMGRNCEQCKPFYYQHPERDIRDPNFCERCTCDPAGSQNEGICDSYTDFSTGLIAGQCRCKLNVEGEHCDVCKEGFYDLSSEDPFGCKSCACNPLGTIPGGNPCDSETGHCYCKRLVTGQHCDQCLPEHWGLSNDLDGCRPCDCDLGGALNNSCFAESGQCSCRPHMIGRQCNEVEPGYYFATLDHYLYEAEEANLGPGVSIVERQYIQDRIPSWTGAGFVRVPEGAYLEFFIDNIPYSMEYDILIRYEPQLPDHWEKAVITVQRPGRIPTSSRCGNTIPDDDNQVVSLSPGSRYVVLPRPVCFEKGTNYTVRLELPQYTSSDSDVESPYTLIDSLVLMPYCKSLDIFTVGGSGDGVVTNSAWETFQRYRCLENSRSVVKTPMTDVCRNIIFSISALLHQTGLACECDPQGSLSSVCDPNGGQCQCRPNVVGRTCNRCAPGTFGFGPSGCKRRFLKSIVMHSFRLTQPLWQGSIAAEPMLPS

SEQ ID NO: 7679 - protein, 183 aa, Homo sapiens
MGLLQLLAFSFLETAGPGASLEWRSLETTPEPQGLSMGSPSSGKRRPPRAPAPRPQRSAGDPRACTHTHSRFPSSQISTRTLTPRMRGLPRARGFTCVALCRARVRAQEPEFSYGCAEGSCYPATGDLLIGRAQKLSVTSTCGLHKPEPYCIVSHLQEDKKCFICNSQDPYHETLNPDSHLIE

SEQ ID NO: 7680 - protein, 1798 aa, Homo sapiens
MELTSRERGRGQPLPWELRLGLLLSVLAATLAQAPAPDVPGCSRGSCYPATGDLLVGRADRLTASSTCGLNGPQPYCIVSHLQDEKKCFLCDSRRPFSARDNPHSHRIQNVVTSFAPQRRAAWWQSENGIPAVTIQLDLEAEFHFTHLIMTFKTFRPAAMLVERSADFGRTWHVYRYFSYDCGADFPGVPLAPPRHWDDVVCESRYSEIEPSTEGEVIYRVLDPAIPIPDPYSSRIQNLLKITNLRVNLTRLHTLGDNLLDPRREIREKYYYALYELVVRGNCFCYGHASECAPAPGAPAHAEGMVHGACICKHNTRGLNCEQCQDFYRDLPWRPAEDGHSHACRKCECHGHTHSCHFDMAVYLASGNVSGGVCDGCQHNTAGRHCELCRPFFYRDPTKDLRDPAVCRSCDCDPMGSQDGGRCDSHDDPALGLVSGQCRCKEHVVGTRCQQCRDGFFGLSISDRLGCRRCQCNARGTVPGSTPCDPNSGSCYCKRLVTGRGCDRCLPGHWGLSHDLLGCRPCDCDVGGALDPQCDEGTGQCHCRQHMVGRRCEQVQPGYFRPFLDHLIWEAEDTRGQVLDVVERLVTPGETPSWTGSGFVRLQEGQTLEFLVASVPKAMDYDLLLRLEPQVPEQWAELELIVQRPGPVPAHSLCGHLVPKDDRIQGTLQPHARYLIFPNPVCLEPGISYKLHLKLVRTGGSAQPETPYSGPGLLIDSLVLLPRVLVLEMFSGGDAAALERQATFERYQCHEEGLVPSKTSPSEACAPLLISLSTLIYNGALPCQCNPQGSLSSECNPHGGQCLCKPGVVGRRCDLCAPGYYGFGPTGCQACQCSHEGALSSLCEKTSGQCLCRTGAFGLRCDRCQRGQWGFPSCRPCVCNGHADECNTHTGACLGCRDHTGGEHCERCIAGFHGDPRLPYGGQCRPCPCPEGPGSQRHFATSCHQDEYSQQIVCHCRAGYTGLRCEACAPGHFGDPSRPGGRCQLCECSGNIDPMDPDACDPHTGQCLRCLHHTEGPHCAHCKPGFHGQAARQSCHRCTCNLLGTNPQQCPSPDQCHCDPSSGQCPCLPNVQGPSCDRCAPNFWNLTSGHGCQPCACHPSRARGPTCNEFTGQCHCRAGFGGRTCSECQELHWGDPGLQCHACDCDSRGIDTPQCHRFTGHCSCRPGVSGVRCDQCARGFSGIFPACHPCHACFGDWDRVVQDLAARTQRLEQRAQELQQTGVLGAFESSFWHMQEKLGIVQGIVGARNTSAASTAQLVEATEELRREIGEATEHLTQLEADLTDVQDENFNANHALSGLERDRLALNLTLRQLDQHLDLLKHSNFLGAYDSIRHAHSQSAEAERRANTSALAVPSPVSNSASARHRTEALMDAQKEDFNSKHMANQRALGKLSAHTHTLSLTDINELVCGAPGDAPCATSPCGGAGCRDEDGQPRCGGLSCNGAAATADLALGRARHTQAELQRALAEGGSILSRVAETRRQASEAQQRAQAALDKANASRGQVEQANQELQELIQSVKDFLNQEGADPDSIEMVATRVLELSIPASAEQIQHLAGAIAERVRSLADVDAILARTVGDVRRAEQLLQDARRARSWAEDEKQKAETVQAALEEAQRAQGIAQGAIRGAVADTRDTEQTLYQVQERMAGAERALSSAGERARQLDALLEALKLKRAGNSLAASTAEETAGSAQGRAQEAEQLLRGPLGDQYQTVKALAERKAQGVLAAQARAEQLRDEARDLLQAAQDKLQRLQELEGTYEENERALESKAAQLDGLEARMRSVLQAINLQVQIYNTCQ

SEQ ID NO: 7681 - protein, 1798 aa, Homo sapiens; identical to SEQ ID NO: 7680

SEQ ID NO: 7682 - protein, 151 aa, Homo sapiens
MTFKTFRPAAMLVERSADFGRTWHVYRYFSYDCGADFPGVPLAPPRHWDDVVCESRYSEIEPSTEGEVIYRVLDPAIPIPDPYSSRIQNLLKITNLRVNLTRLHTLGDNLLDPRREIREKYYYALYELVVRGNCFCYGHASECAPAPGAPA

SEQ ID NO: 7683 - protein, 160 aa, Homo sapiens
MNEIQAIAARLPNVDLVLSQTKQDIARARRLQAEAEEARSRAHAVEGQVEDVVGNLRQGTVALQEAQDTMQGTSRSLRLIQDRVAEVQQVLRPAEKLVTSMTKQLGDFWTRMEELRHQARQQGAEAVQAQQLAEGASEQALSAQEGFERIKQKYAELKDR

SEQ ID NO: 7684 - protein, 188 aa, Homo sapiens
MRPFFLLCFALPGLLHAQQACSRGACYPPVGDLLVGRTRFLRASSTCGLTKPETYCTQYGEWQMKCCKCDSRQPHNYYSHRVENVASSSGPMRWWQSQNDVNPVSLQLDLDRRFQLQEVMMEFQGPMPAGMLIERSSDFGKTWRVYQYLAADCTSTFPRVRQGRPQSWQDVRCQSLPQRPNARLNGGK

SEQ ID NO: 7685 - protein, 1172 aa, Homo sapiens [sequence omitted]

SEQ ID NO: 7686 - protein, 1172 aa, Homo sapiens [sequence omitted]

SEQ ID NO: 7687 - protein, 1172 aa, Homo sapiens [sequence omitted]

SEQ ID NO: 7688 - protein, 1761 aa, Homo sapiens
MQFQLTLFLHLGWLSYSKAQDDCNRGACHPTTGDLLVGRNTQLMASSTCGLSRAQKYCILSYLEGEQKCFICDSRFPYDPYDQPNSHTIENVIVSFEPDREKKWWQSENGLDHVSIRLDLEALFRFSHLILTFKTFRPAAMLVERSTDYGHNWKVFKYFAKDCATSFPNITSGQAQGVGDIVCDSKYSDIEPSTGGEVVLKVLDPSFEIENPYSPYIQDLVTLTNLRINFTKLHTLGDALLGRRQNDSLDKYYYALYEMIVRGSCFCNGHASECRPMQKMRGDVFSPPGMVHGQCVCQHNTDGPNCERCKDFFQDAPWRPAADLQDNACRSCSCNSHSSRCHFDMTTYLASGGLSGGVCEDCQHNTEGQHCDRCRPLFYRDPLKTISDPYACIPCECDPDGTISGGICVSHSDPALGSVAGQCLCKENVEGAKCDQCKPNHYGLSATDPLGCQPCDCNPLGSLPFLTCDVDTGQCLCLSYVTGAHCEECTVGYWGLGNHLHGCSPCDCDIGGAYSNVCSPKNGQCECRPHVTGRSCSEPAPGYFFAPLNFYLYEAEEATTLQGLAPLGSETFGQSPAVHVVLGEPVPGNPVTWTGPGFARVLPGAGLRFAVNNIPFPVDFTIAIHYETQSAADWTVQIVVNPPGGSEHCIPKTLQSKPQSFALPAATRIMLLPTPICLEPDVQYSIDVYFSQPLQGESHAHSHVLVDSLGLIPQINSLENFCSKQDLDEYQLHNCVEIASAMGPQVLPGACERLIISMSAKLHDGAVACKCHPQGSVGSSCSRLGGQCQCKPLVVGRCCDRCSTGSYDLGHHGCHPCHCHPQGSKDTVCDQVTGQCPCHGEVSGRRCDRCLAGYFGFPSCHPCPCNRFAELCDPETGSCFNCGGFTTGRNCERCIDGYYGNPSSGQPCRPCLCPDDPSSNQYFAHSCYQNLWSSDVICNCLQGYTGTQCGECSTGFYGNPRISGAPCQPCACNNNIDVTDPESCSRVTGECLRCLHNTQGANCQLCKPGHYGSALNQTCRRCSCHASGVSPMECPPGGGACLCDPVTGACPCLPNVTGLACDRCADGYWNLVPGRGCQSCDCDPRTSQSSHCDQLTGQCPCKLGYGGKRCSECQENYYGDPPGRCIPCDCNRAGTQKPICDPDTGMCRCREGVSGQRCDRCARGHSQEFPTCLQCHLCFDQWDHTISSLSKAVQGLMRLAANMEDKRETLPVCEADFKDLRGNVSEIERILKHPVFPSGKFLKVKDYHDSVRRQIMQLNEQLKAVYEFQDLKDTIERAKNEADLLLEDLQEEIDLQSSVLNASIADSSENIKKYYHISSSAEKKINETSSTINTSANTRNDLLTILDTLTSKGNLSLERLKQIKIPDIQILNEKVCGDPGNVPCVPLPCGGALCTGRKGHRKCRGPGCHGSLTLSTNALQKAQEAKSIIRNLDKQVRGLKNQIESISEQAEVSKNNALQLREKLGNIRNQSDSEEENINLFIKKVKNFLLEENVPPEDIEKVANGVLDIHLPIPSQNLTDELVKIQKHMQLCEDYRTDENRLNEEADGAQKLLVKAKAAEKAANILLNLDKTLNQLQQAQITQGRANSTITQLTANITKIKKNVLQAENQTREMKSELELAKQRSGLEDGLSLLQTKLQRHQDHAVNAKVQAESAQHQAGSLEKEFVELKKQYAILQRKTSTTGLTKETLGKVKQLKDAAEKLAGDTEAKIRRITDLERKIQDLNLSRQAKADQLRILEDQVVAIKNEIVEQEKKYARCYS

SEQ ID NO: 7689 - protein, 1761 aa, Homo sapiens; identical to SEQ ID NO: 7688

SEQ ID NO: 7690 - protein, 772 aa, Homo sapiens
MQFQLTLFLHLGWLSYSKAQDDCNRGACHPTTGDLLVGRNTQLMASSTCGLSRAQKYCILSYLEGEQKCFICDSRFPYDPYDQPNSHTIENVIVSFEPDREKKWWQSENGLDHVSIRLDLEALFRFSHLILTFKTFRPAAMLVERSTDYGHNWKVFKYFAKDCATSFPNITSGQAQGVGDIVCDSKYSDIEPSTGGEVVLKVLDPSFEIENPYSPYIQDLVTLTNLRINFTKLHTLGDALLGRRQNDSLDKYYYALYEMIVRGSCFCNGHASECRPMQKMRGDVFSPPGMVHGQCVCQHNTDGPNCERCKDFFQDAPWRPAADLQDNACRSCSCNSHSSRCHFDMTTYLASGGLSGGVCEDCQHNTEGQHCDRCRPLFYRDPLKTISDPYACIPCECDPDGTISGGICVSHSDPALGSVAGQCLCKENVEGAKCDQCKPNHYGLSATDPLGCQPCDCNPLGSLPFLTCDVDTGQCLCLSYVTGAHCEECTVGYWGLGNHLHGCSPCDCDIGGAYSNVCSPKNGQCECRPHVTGRSCSEPAPGYFFAPLNFYLYEAEEATTLQGLAPLGSETFGQSPAVHVVLGEPVPGNPVTWTGPGFARVLPGAGLRFAVNNIPFPVDFTIAIHYETQSAADWTVQIVVNPPGGSEHCIPKTLQSKPQSFALPAATRIMLLPTPICLEPDVQYSIDVYFSQPLQGESHAHSHVLVDSAAVQWHNLGSLQPPPPECKQFSCFSFPSSWDYRHPPPHLANFCIFSRDGVSPHWPGWSQTPDLR

SEQ ID NO: 7691 - protein, 749 aa, Homo sapiens
NIDVTDPESCSRVTGECLRCLHNTQGANCQLCKPGHYGSALNQTCRRCSCHASGVSPMECPPGGGACLCDPVTGACPCLPNVTGLACDRCADGYWNLVPGRGCQSCDCDPRTSQSSHCDQLTGQCPCKLGYGGKRCSECQENYYGDPPGRCIPCDCNRAGTQKPICDPDTGMCRCREGVSGQRCDRCARGHSQEFPTCLQCHLCFDQWDHTISSLSKAVQGLMRLAANMEDKRETLPVCEADFKDLRGNVSEIERILKHPVFPSGKFLKVKDYHDSVRRQIMQLNEQLKAVYEFQDLKDTIERAKNEADLLLEDLQEEIDLQSSVLNASIADSSENIKKYYHISSSAEKKINETSSTINTSANTRNDLLTILDTLTSKGNLSLERLKQIKIPDIQILNEKVCGDPGNVPCVPLPCGGALCTGRKGHRKCRGPGCHGSLTLSTNALQKAQEAKSIIRNLDKQVRGLKNQIESISEQAEVSKNNALQLREKLGNIRNQSDSEEENINLFIKKVKNFLLEENVPPEDIEKVANGVLDIHLPIPSQNLTDELVKIQKHMQLCEDYRTDENRLNEEADGAQKLLVKAKAAEKAANILLNLDKTLNQLQQAQITQGRANSTITQLTANITKIKKNVLQAENQTREMKSELELAKQRSGLEDGLSLLQTKLQRHQDHAVNAKVQAESAQHQAGSLEKEFVELKKQYAILQRKTSTTGLTKETLGKVKQLKDAAEKLAGDTEAKIRRITGCFQNSAR

SEQ ID NO: 7692 - protein, 38 aa, Homo sapiens
MKNEFDKLVCNCKHNTYGVDCEKCLPFFNDRPWRRATA

SEQ ID NO: 7693 - protein, 1609 aa, Homo sapiens
MRGSHRAAPALRPRGRLWPVLAVLAAAAAAGCAQAAMDECTDEGGRPQRCMPEFVNAAFNVTVVATNTCGTPPEEYCVQTGVTGVTKSCHLCDAGQPHLQHGAAFLTDYNNQADTTWWQSQTMLAGVQYPSSINLTLHLGKAFDITYVRLKFHTSRPESFAIYKRTREDGPWIPYQYYSGSCENTYSKANRGFIRTGGDEQQALCTDEFSDISPLTGGNVAFSTLEGRPSAYNFDNSPVLQEWVTATDIRVTLNRLNTFGDEVFNDPKVLKSYYYAISDFAVGGRCKCNGHASECMKNEFDKLVCNCKHNTYGVDCEKCLPFFNDRPWRRATAESASECLPCDCNGRSQECYFDPELYRSTGHGGHCTNCQDNTDGAHCERCRENFFRLGNNEACSSCHCSPVGSLSTQCDSYGRCSCKPGVMGDKCDRCQPGFHSLTEAGCRPCSCDPSGSIDECNIETGRCVCKDNVEGFNCERCKPGFFNLESSNPRGCTPCFCFGHSSVCTNAVGYSVYSISSTFQIDEDGWRAEQRDGSEASLEWSSERQDIAVISDSYFPRYFIAPAKFLGKQVLSYGQNLSFSFRVDRRDTRLSAEDLVLEGAGLRVSVPLIAQGNSYPSETTVKYVFRLHEATDYPWRPALTPFEFQKLLNNLTSIKIRGTYSERSAGYLDDVTLASARPGPGVPATWVESCTCPVGYGGQFCEMCLSGYRRETPNLGPYSPCVLCACNGHSETCDPETGVCNCRDNTAGPHCEKCSDGYYGDSTAGTSSDCQPCPCPGGSSCAVVPKTKEVVCTNCPTGTTGKRCELCDDGYFGDPLGRNGPVRLCRLCQCSDNIDPNAVGNCNRLTGECLKCIYNTAGFYCDRCKDGFFGNPLAPNPADKCKACNCNLYGTMKQQSSCNPVTGQCECLPHVTGQDCGACDPGFYNLQSGQGCERCDCHALGSTNGQCDIRTGQCECQPGITGQHCERCEVNHFGFGPEGCKPCDCHPEGSLSLQCKDDGRCECREGFVGNRCDQCEENYFYNRSWPGCQECPACYRLVKDKVADHRVKLQELESLIANLGTGDEMVTDQAFEDRLKEAEREVMDLLREAQDVKDVDQNLMDRLQRVNNTLSSQISRLQNIRNTIEETGNLAEQARAHVENTERLIEIASRELEKAKVAAANVSVTQPESTGDPNNMTLLAEEARKLAERHKQEADDIVRVAKTANDTSTEAYNLLLRTLAGENQTAFEIEELNRKYEQAKNISQDLEKQAARVHEEAKRAGDKAVEIYASVAQLSPLDSETLENEANNIKMEAENLEQLIDQKLKDYEDLREDMRGKELEVKNLLEKGKTEQQTADQLLARADAAKALAEEAAKKGRDTLQEANDILNNLKDFDRRVNDNKTAAEEALRKIPAINQTITEANEKTREAQQALGSAAADATEAKNKAHEAERIASAVQKNATSTKAEAERTFAEVTDLDNEVNNMLKQLQEAEKELKRKQDDADQDMMMAGMASQAAQEAEINARKAKNSVTSLLSIINDLLEQLGQLDTVDLNKLNEIEGTLNKAKDEMKVSDLDRKVSDLENEAKKQEAAIMDYNRDIEEIMKDIRNLEDIRKTLPSGCFNTPSIEKP

SEQ ID NO: 7694 - protein, 1193 aa, Homo sapiens
MPALWLGCCLCFSLLLPAARATSRREVCDCNGKSRQCIFDRELHRQTGNGFRCLNCNDNTDGIHCEKCKNGFYRHRERDRCLPCNCNSKGSLSARCDNSGRCSCKPGVTGARCDRCLPGFHMLTDAGCTQDQRLLDSKCDCDPAGIAGPCDAGRCVCKPAVTGERCDRCRSGYYNLDGGNPEGCTQCFCYGHSASCRSSAEYSVHKITSTFHQDVDGWKAVQRNGSPAKLQWSQRHQDVFSSAQRLDPVYFVAPAKFLGNQQVSYGQSLSFDYRVDRGGRHPSAHDVILEGAGLRITAPLMPLGKTLPCGLTKTYTFRLNEHPSNNWSPQLSYFEYRRLLRNLTALRIRATYGEYSTGYIDNVTLISARPVSGAPAPWVEQCICPVGYKGQFCQDCASGYKRDSARLGPFGTCIPCNCQGGGACDPDTGDCYSGDENPDIECADCPIGFYNDPHDPRSCKPCPCHNGFSCSVMPETEEVVCNNCPPGVTGARCELCADGYFGDPFGEHGPVRPCQPCQCNNNVDPSASGNCDRLTGRCLKCIHNTAGIYCDQCKAGYFGDPLAPNPADKCRACNCNPMGSEPVGCRSDGTCVCKPGFGGPNCEHGAFSCPACYNQVKIQMDQFMQQLQRMEALISKAQGGDGVVPDTELEGRMQQAEQALQDILRDAQISEGASRSLGLQLAKVRSQENSYQSRLDDLKMTVERVRALGSQYQNRVRDTHRLITQMQLSLAESEASLGNTNIPASDHYVGPNGFKSLAQEATRLAESHVESASNMEQLTRETEDYSKQALSLVRKALHEGVGSGSGSPDGAVVQGLVEKLEKTKSLAQQLTREATQAEIEADRSYQHSLRLLDSVSRLQGVSDQSFQVEEAKRIKQKADSLSSLVTRHMDEFKRTQKNLGNWKEEAQQLLQNGKSGREKSDQLLSRANLAKSRAQEALSMGNATFYEVESILKNLREFDLQVDNRKAEAEEAMKRLSYISQKVSDASDKTQQAERALGSAAADAQRAKNGAGEALEISSEIEQEIGSLNLEANVTADGALAMEKGLASLKSEMREVEGELERKELEFDTNMDAVQMVITEAQKVDTRAKNAGVTIQDTLNTLDGLLHLMDQPLSVDEEGLVLLEQKLSRAKTQINSQLRPMMSELEERARQQRGHLHLLETSIDGILADVKNLENIRDNLPPGCYNTQALEQQ

SEQ ID NO: 7695 - protein, 1111 aa, Homo sapiens
MPALWLGCCLCFSLLLPAARATSRREVCDCNGKSRQCIFDRELHRQTGNGFRCLNCNDNTDGIHCEKCKNGFYRHRERDRCLPCNCNSKGSLSARCDNSGRCSCKPGVTGARCDRCLPGFHMLTDAGCTQDQRLLDSKCDCDPAGIAGPCDAGRCVCKPAVTGERCDRCRSGYYNLDGGNPEGCTQCFCYGHSASCRSSAEYSVHKITSTFHQDVDGWKAVQRNGSPAKLQWSQRHQDVFSSAQRLDPVYFVAPAKFLGNQQVSYGQSLSFDYRVDRGGRHPSAHDVILEGAGLRITAPLMPLGKTLPCGLTKTYTFRLNEHPSNNWSPQLSYFEYRRLLRNLTALRIRATYGEYSTGYIDNVTLISARPVSGAPAPWVEQCICPVGYKGQFCQDCASGYKRDSARLGPFGTCIPCNCQGGGACDPDTGDCYSGDENPDIECADCPIGFYNDPHDPRSCKPCPCHNGFSCSVMPETEEVVCNNCPPGVTGARCELCADGYFGDPFGEHGPVRPCQPCQCNNNVDPSASGNCDRLTGRCLKCIHNTAGIYCDQCKAGYFGDPLAPNPADKCRACNCNPMGSEPVGCRSDGTCVCKPGFGGPNCEHGAFSCPACYNQVKIQMDQFMQQLQRMEALISKAQGGDGVVPDTELEGRMQQAEQALQDILRDAQISEGASRSLGLQLAKVRSQENSYQSRLDDLKMTVERVRALGSQYQNRVRDTHRLITQMQLSLAESEASLGNTNIPASDHYVGPNGFKSLAQEATRLAESHVESASNMEQLTRETEDYSKQALSLVRKALHEGVGSGSGSPDGAVVQGLVEKLEKTKSLAQQLTREATQAEIEADRSYQHSLRLLDSVSRLQGVSDQSFQVEEAKRIKQKADSLSSLVTRHMDEFKRTQKNLGNWKEEAQQLLQNGKSGREKSDQLLSRANLAKSRAQEALSMGNATFYEVESILKNLREFDLQVDNRKAEAEEAMKRLSYISQKVSDASDKTQQAERALGSAAADAQRAKNGAGEALEISSEIEQEIGSLNLEANVTADGALAMEKGLASLKSEMREVEGELERKELEFDTNMDAVQMVITEAQKVDTRAKNAGVTIQDTLNTLDGLLHLMGM

SEQ ID NO: 7696 - protein, 1575 aa, Homo sapiens
MAAAALLLGLALLAPRAAGAGMGACYDGAGRPQRCLPVFENAAFGRLAQASHTCGSPPEDFCPHVGAAGAGAHCQRCDAADPQRHHNASYLTDFHSQDESTWWQSPSMAFGVQYPTSVNITLRLGKAYEITYVRLKFHTSRPESFAIYKRSRADGPWEPYQFYSASCQKTYGRPEGQYLRPGEDERVAFCTSEFSDISPLSGGNVAFSTLEGRPSAYNFEESPGLQEWVTSTELLISLDRLNTFGDDIFKDPKVLQSYYYAVSDFSVGGRCKCNGHASECGPDVAGQLACRCQHNTTGTDCERCLPFFQDRPWARGTAEAAHECLPCNCSGRSEECTFDRELFRSTGHGGRCHHCRDHTAGPHCERCQENFYHWDPRMPCQPCDCQSAGSLHLQCDDTGTCACKPTVTGWKCDRCLPGFHSLSEGGCRPCTCNPAGSLDTCDPRSGRCPCKENVEGNLCDRCRPGTFNLQPHNPAGCSSCFCYGHSKVCASTAQFQVHHILSDFHQGAEGWWARSVGGSEHPPQWSPNGVLLSPEDEEELTAPEKFLGDQRFSYGQPLILTFRVPPGDSPLPVQLRLEGTGLALSLRHSSLSGPQDAGHPREVELRFHLQETSEDVAPPLPPFHFQRLLANLTSLRLRVSPGPSPAGPVFLTEVRLTSARPGLSPPASWVEICSCPTGYTGQFCESCAPGYKREMPQGGPYASCVPCTCNQHGTCDPNTGICVCSHHTEGPSCERCLPGFYGNPFAGQADDCQPCPCPGQSACTTIPESREVVCTHCPPGQRGRRCEVCDDGFFGDPLGLFGHPQPCHQCQCSGNVDPNAVGNCDPLSGHCLRCLHNTTGDHCEHCQEGFYGSALAPRPADKCMPCSCHPQGSVSEQMPCDPVTGQCSCLPHVTARDCSRCYPGFFDLQPGRGCRSCKCHPLGSQEDQCHPKTGQCTCRPGVTGQACDRCQLGFFGFSIKGCRACRCSPLGAASAQCHENGTCVCRPGFEGYKCDRCHDNFFLTADGTHCQQCPSCYALVKEEAAKLKARLTLTEGWLQGSDCGSPWGPLDILLGEAPRGDVYQGHHLLPGAREAFLEQMMSLEGAVKAAREQLQRLNKGARCAQAGSQKTCTQLADLEAVLESSEEEILHAAAILASLEIPQEGPSQPTKWSHLATEARALARSHRDTATKIAATAWRALLASNTSYALLWNLLEGRVALETQRDLEDRYQEVQAAQKALRTAVAEVLPEAESVLATVQQVGADTAPYLALLASPGALPQKSRAEDLGLKAKALEKTVASWQHMATEAARTLQTAAQATLRQTEPLTKLHQEARAALTQASSSVQAATVTVMGARTLLADLEGMKLQFPRPKDQAALQRKADSVSDRLLADTRKKTKQAERMLGNAAPLSSSAKKKGREAEVLAKDSAKLAKALLRERKQAHRRASRLTSQTQATLQQASQQVLASEARRQELEEAERVGAGLSEMEQQIRESRISLEKDIETLSELLARLGSLDTHQAPAQALNETQWALERLRLQLGSPGSLQRKLSLLEQESQQQELQIQGFESDLAEIRADKQNLEAILHSLPENCASWQ

SEQ ID NO: 7697 - protein, 257 aa, Homo sapiens
  SITE 1: note = misc_feature - Xaa can be any naturally occurring amino acid
XTLQTAAQATLRQTEPLTKLHQEARAALTQASSSVQAATVTVMGARTLLADLEDTRKKTKQAERMLGNAAPLSSSAKKKGREAEVLAKDSAKLAKALLRERKQAHRRASRLTSQTQATLQQASQQVLASEARRQELEEAERVGAGLSEMEQQIRESRISLEKDIETLSELLARLGSLDTHQAPAQALNETQWALERLRLQLGSPGSLQRKLSLLEQESQQQELQIQGFESDLAEIRADKQNLEAILHSLPENCASWQ

SEQ ID NO: 7698 - protein, 180 aa, Homo sapiens
MPRQLSAAAALFASLAVILHDGSQMRAKAFPETRDYSQPTAAATVQDIKKPVQQPAKQAPHQTLAARFMDGHITFQTAATVKIPTTTPATTKNTATTSPITYTLVTTQATPNNSHTAPPVTEVTVGPSLAPYSLPPTITPPAHTTGTSSSTVSHTTGNTTQPSNQTTLPATLSIALHKST

SEQ ID NO: 7699 - protein, 416 aa, Homo sapiens
MPRQLSAAAALFASLAVILHDGSQMRAKAFPETRDYSQPTAAATVQDIKKPVQQPAKQAPHQTLAARFMDGHITFQTAATVKIPTTTPATTKNTATTSPITYTLVTTQATPNNSHTAPPVTEVTVGPSLAPYSLPPTITPPAHTTGTSSSTVSHTTGNTTQPSNQTTLPATLSIALHKSTTGQKPVQPTHAPGTTAAAHNTTRTAAPASTVPGPTLAPQPSSVKTGIYQVLNGSRLCIKAEMGIQLIVQDKESVFSPRRYFNIDPNATQASGNCGTRKSNLLLNFQGGFVNLTFTKDEESYYISEVGAYLTVSDPETIYQGIKHAVVMFQTAVGHSFKCVSEQSLQLSAHLQVKTTDVQLQAFDFEDDHFGNVDECSSDYTIVLPVIGAIVVGLCLMGMGVYKIRLRCQSSGYQRI

SEQ ID NO: 7700 - protein, 143 aa, Homo sapiens
MRAKAFPETRDYSQPTAAATVQDIKKPVQQPAKQAPHQTLAARFMDGHITFQTAATVKIPTTTPATTKNTATTSPITYTLVTTQATPNNSHTAPPVTEVTVGPSLAPYSLPPTITPPAHTTGTSSSTVSHTTGNTTQPSNQTT

SEQ ID NO: 7701 - protein, 392 aa, Homo sapiens
MRAKAFPETRDYSQPTAAATVQDIKKPVQQPAKQAPHQTLAARFMDGHITFQTAATVKIPTTTPATTKNTATTSPITYTLVTTQATPNNSHTAPPVTEVTVGPSLAPYSLPPTITPPAHTTGTSSSTVSHTTGNTTQPSNQTTLPATLSIALHKSTTGQKPVQPTHAPGTTAAAHNTTRTAAPASTVPGPTLAPQPSSVKTGIYQVLNGSRLCIKAEMGIQLIVQDKESVFSPRRYFNIDPNATQASGNCGTRKSNLLLNFQGGFVNLTFTKDEESYYISEVGAYLTVSDPETIYQGIKHAVVMFQTAVGHSFKCVSEQSLQLSAHLQVKTTDVQLQAFDFEDDHFGNVDECSSDYTIVLPVIGAIVVGLCLMGMGVYKIRLRCQSSGYQRI

SEQ ID NO: 7702 - protein, 690 aa, Homo sapiens
MLPRGRPRALGAAALLLLLLLLGFLLFDGRLRRAAALDGDPGAGPGDHNRSDCGPQPPPPPKCELLHVAIVCAGHNSSRDVITLVKSMLFYRKNPLHLHLVTDAVARNILETLFHTWMVPAVRVSFYHADQLKPQVSWIPNKHYSGLYGLMKLVLPSALPAELARVIVLDTDVTFASDISELWALFAHFSDTQAIGLVENQSDWYLGNLWKNHRPWPALGRGFNTGVILLRLDRLRQAGWEQMWRLTARRELLSLPATSLADQDIFNAVIKEHPGLVQRLPCVWNVQLSDHTLAERCYSEASDLKVIHWNSPKKLRVKNKHVEFFRNFYLTFLEYDGNLLRRELFVCPSQPPPGAEQLQQALAQLDEEDPCFEFRQQQLTVHRVHVTFLPHEPPPPRPHDVTLVAQLSMDRLQMLEALCRHWPGPMSLALYLTDAEAQQFLHFVEASPVLAARQDVAYHVVYREGPLYPVNQLRNVALAQALTPYVFLSDIDFLPAYSLYDYLRASIEQLGLGSRRKAALVVPAFETLRYRFSFPHSKVELLALLDAGTLYTFRYHEWPRGHAPTDYARWREAQAPYRVQWAANYEPYVVVPRDCPRYDPRFVGFGWNKVAHIVELDAQEYELLVLPEAFTIHLPHAPSLDISRFRSSPTYRDCLQALKDEFHQDLSRHHGAAALKYLPALQQPQSPARG

SEQ ID NO: 7703 - protein, 721 aa, Homo sapiens
MLPRGRPRALGAAALLLLLLLLGFLLFGGDLGCERREPGGRAGAPGCFPGPLMPRVPPDGRLRRAAALDGDPGAGPGDHNRSDCGPQPPPPPKCELLHVAIVCAGHNSSRDVITLVKSMLFYRKNPLHLHLVTDAVARNILETLFHTWMVPAVRVSFYHADQLKPQVSWIPNKHYSGLYGLMKLVLPSALPAELARVIVLDTDVTFASDISELWALFAHFSDTQAIGLVENQSDWYLGNLWKNHRPWPALGRGFNTGVILLRLDRLRQAGWEQMWRLTARRELLSLPATSLADQDIFNAVIKEHPGLVQRLPCVWNVQLSDHTLAERCYSEASDLKVIHWNSPKKLRVKNKHVEFFRNFYLTFLEYDGNLLRRELFVCPSQPPPGAEQLQQALAQLDEEDPCFEFRQQQLTVHRVHVTFLPHEPPPPRPHDVTLVAQLSMDRLQMLEALCRHWPGPMSLALYLTDAEAQQFLHFVEASPVLAARQDVAYHVVYREGPLYPVNQLRNVALAQALTPYVFLSDIDFLPAYSLYDYLRASIEQLGLGSRRKAALVVPAFETLRYRFSFPHSKVELLALLDAGTLYTFRYHEWPRGHAPTDYARWREAQAPYRVQWAANYEPYVVVPRDCPRYDPRFVGFGWNKVAHIVELDAQEYELLVLPEAFTIHLPHAPSLDISRFRSSPTYRDCLQALKDEFHQDLSRHHGAAALKYLPALQQPQSPARG

SEQ ID NO: 7704 - protein, 721 aa, Homo sapiens; identical to SEQ ID NO: 7703

SEQ ID NO: 7705 - protein, 721 aa, Homo sapiens; identical to SEQ ID NO: 7703

SEQ ID NO: 7706 - protein, 158 aa, Homo sapiens
WNSPKKLRVKNKHVEFFRNFYLTFLEYDGNLLRRELFVCPSQPPPGAEQLQQALAQLDEEDPCFEFRQQQLTVHRVHVTFLPHEPPPPRPHDVTLVAQLSMDRTWPTMWCTVRGPYTPSTSFATWPWPRPSRLTSSSVTLTSCLPILSTTTSGPPLSS

SEQ ID NO: 7707 - protein, 109 aa, Homo sapiens
  SITE 1: note = misc_feature - Xaa can be any naturally occurring amino acid
XLLDAGTLYTFRNMSSWCCPRPSPSICPTLQAWTSPASAPAPPIVTASRPSRTNSTRTCPATMGLLPSNTSQPCSSPRALPEAEAGPALPLILALGRHQGNLPSAIPAI

SEQ ID NO: 7708 - protein, 166 aa, Homo sapiens
IPRSPQPLGGSHRTPSSRRDSDGANSVASYENEEPACEDADEDEDDYHNPGYLVVLPDSTPATSTAAPSAPALSTPGIRDSAFSMESIDDYVNVPESGESAEASLDGSREYVNVSQELHPGAAKTEPVEAESVLEPGLPGTAELGSWKWLWGPHMASCPCSSLTTA

SEQ ID NO: 7709 - protein, 269 aa, Homo sapiens
MEATAASWQVAVPVLGGASRPLGPRGAASLLRAPLQMEEAILVPCVLGLLLLPILAMLMALCVHCHRLPGSYDSTSSDSLYPRGIQFKRPHTVAPWPPAYPPVTSYPPLSQPDLLPIPRSPQPLGGSHRTPSSRRDSDGANSVASYENEEPACEDADEDEDDYHNPGYLVVLPDSTPATSTAAPSAPALSTPGIRDSAFSMESIDDYVNVPESGESAEASLDGSREYVNVSQELHPGAAKTEPAALSSQEAEEVEEEGAPDYENLQELN

SEQ ID NO: 7710 - protein, 85 aa, Homo sapiens
MEEAILVPCVLGLLLLPILAMLMALCVHCHRLPGSYDSTSSDSLYPRGIQFKRPHTVAPWPPAYPPVTSYPPLSQPDLLPIPHDP

SEQ ID NO: 7711 - protein, 85 aa, Homo sapiens; identical to SEQ ID NO: 7710

SEQ ID NO: 7712 - protein, 233 aa, Homo sapiens
MEEAILVPCVLGLLLLPILAMLMALCVHCHRLPGSYDSTSSDSLYPRGIQFKRPHTVAPWPPAYPPVTSYPPLSQPDLLPIPRSPQPLGGSHRTPSSRRDSDGANSVASYENEEPACEDADEDEDDYHNPGYLVVLPDSTPATSTAAPSAPALSTPGIRDSAFSMESIDDYVNVPESGESAEASLDGSREYVNVSQELHPGAAKTEPAALSSQEAEEVEEEGAPDYENLQELN

SEQ ID NO: 7713 - protein, 262 aa, Homo sapiens
MEEAILVPCVLGLLLLPILAMLMALCVHCHRLPGSYDSTSSDSLYPRGIQFKRPHTVAPWPPAYPPVTSYPPLSQPDLLPIPRSPQPLGGSHRTPSSRRDSDGANSVASYENEGASGIRGAQAGWGVWGPSWTRLTPVSLPPEPACEDADEDEDDYHNPGYLVVLPDSTPATSTAAPSAPALSTPGIRDSAFSMESIDDYVNVPESGESAEASLDGSREYVNVSQELHPGAAKTEPAALSSQEAEEVEEEGAPDYENLQELN

SEQ ID NO: 7714 - protein, 252 aa, Homo sapiens
MEEAILVPCVLGLLLLPILAMLMALCVHCHRLPGSYDSTSSDSLYPRGIQFKRPHTVAPWPPAYPPVTSYPPLSQPDLLPIPRSPQPLRDSDGANSVASYENEGASGIRGAQAGWGVWGPSWTRLTPVSLPPEPACEDADEDEDDYHNPGYLVVLPDSTPATSTAAPSAPALSTPGIRDSAFSMESIDDYVNVPESGESAEASLDGSREYVNVSQELHPGAAKTEPAALSSQEAEEVEEEGAPDYENLQELN

SEQ ID NO: 7715 - protein, 232 aa, Homo sapiens
MEEAILVPCVLGLLLLPILAMLMALCVHCHRLPGSYDSTSSDSLYPRGIQFKRPHTVAPWPPAYPPVTSYPPLSQPDLLPIPSPQPLGGSHRTPSSRRDSDGANSVASYENEEPACEDADEDEDDYHNPGYLVVLPDSTPATSTAAPSAPALSTPGIRDSAFSMESIDDYVNVPESGESAEASLDGSREYVNVSQELHPGAAKTEPAALSSQEAEEVEEEGAPDYENLQELN

SEQ ID NO: 7716 - protein, 232 aa, Homo sapiens; identical to SEQ ID NO: 7715

SEQ ID NO: 7717 - protein, 261 aa, Homo sapiens
MEEAILVPCVLGLLLLPILAMLMALCVHCHRLPGSYDSTSSDSLYPRGIQFKRPHTVAPWPPAYPPVTSYPPLSQPDLLPIPSPQPLGGSHRTPSSRRDSDGANSVASYENEGASGIRGAQAGWGVWGPSWTRLTPVSLPPEPACEDADEDEDDYHNPGYLVVLPDSTPATSTAAPSAPALSTPGIRDSAFSMESIDDYVNVPESGESAEASLDGSREYVNVSQELHPGAAKTEPAALSSQEAEEVEEEGAPDYENLQELN

SEQ ID NO: 7718 - protein, 100 aa, Homo sapiens
MSSGTELLWPGAALLVLLGVAASLCVRCSRPGAKRREDQQSFTGSRTYSLVGQAWPGPLADMAPTRKDKLLQFYPSLEDPASSRYQNFSKGSRHGSEEAY

SEQ ID NO: 7719 - protein, 58 aa, Homo sapiens
MSSGTELLWPGAALLVLLGVAASLCVRCSRPGAKRSEKIYQQRSLREDQQSFTGSRTY

SEQ ID NO: 7720 - protein, 64 aa, Homo sapiens
MSSGTELLWPGAALLVLLGVAASLCVRCSRPGAKRSEKIYQQRSLREDQQSFTGSRTYSLVGQA

SEQ ID NO: 7721 - protein, 100 aa, Homo sapiens
MSSGTELLWPGAALLVLLGVAASLCVRCSRPGAKRSEKIYQQRSLREDQQSFTGSRTYSLVGQAWPGPLADMAPTRKDKLLQFYPSLEDPASSRYQNFSK

SEQ ID NO: 7722 - protein, 111 aa, Homo sapiens
MSSGTELLWPGAALLVLLGVAASLCVRCSRPGAKRSEKIYQQRSLREDQQSFTGSRTYSLVGQAWPGPLADMAPTRKDKLLQFYPSLEDPASSRYQNFSKGSRHGSEEAYI

SEQ ID NO: 7723 - protein, 243 aa, Homo sapiens
MSSGTELLWPGAALLVLLGVAASLCVRCSRPGAKRSEKIYQQRSLREDQQSFTGSRTYSLVGQAWPGPLADMAPTRKDKLLQFYPSLEDPASSRYQNFSKGSRHGSEEAYIDPIAMEYYNWGRFSKPPEDDDANSYENVLICKQKTTETGAQQEGIGGLCRGDLSLSLALKTGPTSGLCPSASPEEDEESEDYQNSASIHQWRESRKVMGQLQREASPGPVGSPDEEDGEPDYVNGEVAATEA

SEQ ID NO: 7724 - protein, 243 aa, Homo sapiens; identical to SEQ ID NO: 7723

SEQ ID NO: 7725 - protein, 243 aa, Homo sapiens; identical to SEQ ID NO: 7723

SEQ ID NO: 7726 - protein, 243 aa, Homo sapiens; identical to SEQ ID NO: 7723

SEQ ID NO: 7727 - protein, 481 aa, Homo sapiens
MGALARALPSILLALLLTSTPEALGANPGLVARITDKGLQYAAQEGLLALQSELLRITLPDFTGDLRIPHVGRGRYEFHSLNIHSCELLHSALRPVPGQGLSLSISDSSIRVQGRWKVRKSFFKLQGSFDVSVKGISISVNLLLGSESSGRPTVTASSCSSDIADVEVDMSGDLGWLLNLFHNQIESKFQKVLESRICEMIQKSVSSDLQPYLQTLPVTTEIDSFADIDYSLVEAPRATAQMLEVMFKGEIFHRNHRSPVTLLAAVMSLPEEHNKMVYFAISDYVFNTASLVYHEEGYLNFSITDDMIPPDSNIRLTTKSFRPFVPRLARLYPNMNLELQGSVPSAPLLNFSPGNLSVDPYMEIDAFVLLPSSSKEPVFRLSVATNVSATLTFNTSKITGFLKPGKVKVELKESKVGLFNAELLEALLNYYILNTFYPKFNDKLAEGFPLPLLKRVQLYDLGLQIHKDFLFLGANVQYMRV

SEQ ID NO: 7728 - protein, 255 aa, Homo sapiens
MCYRKTEDFFTIWLDLNMFLPLGVDCWIDNTRVVYNRSSGLVSNAPGVQIRVPGFGKTYSVEYLDSSKLAGYLHTLVQNLVNNGYVRDETVRAAPYDWRLEPGQQEEYYRKLAGLVEEMHAAYGKPVFLIGHSLGCLHLLYFLLRQPQAWKDRFIDGFISLGAPWGGSIKPMLVLASGDNQGIPIMSSIKLKEEQRITTTSPWMFPSRMAWPEDHVFISTPSFNYTGRDFQRFFADLHFEEGWYMWLQSRDLLAG

SEQ ID NO: 7729 - protein, 93 aa, Homo sapiens
MGPPGSPWQWVTLLLGLLLPPAAPFWLLNVLFPPHTTPKAELSNHTRPVILARSQAGQTRCGELDVLPQDRGLLHHLAGSQHVPTPWGRLLDR

SEQ ID NO: 7730 - protein, 440 aa, Homo sapiens
MGPPGSPWQWVTLLLGLLLPPAAPFWLLNVLFPPHTTPKAELSNHTRPVILVPGCLGNQLEAKLDKPDVVNWMCYRKTEDFFTIWLDLNMFLPLGVDCWIDNTRVVYNRSSGLVSNAPGVQIRVPGFGKTYSVEYLDSSKLAGYLHTLVQNLVNNGYVRDETVRAAPYDWRLEPGQQEEYYRKLAGLVEEMHAAYGKPVFLIGHSLGCLHLLYFLLRQPQAWKDRFIDGFISLGAPWGGSIKPMLVLASGDNQGIPIMSSIKLKEEQRITTTSPWMFPSRMAWPEDHVFISTPSFNYTGRDFQRFFADLHFEEGWYMWLQSRDLLAGLPAPGVEVYCLYGVGLPTPRTYIYDHGFPYTDPVGVLYEDGDDTVATRSTELCGLWQGRQPQPVHLLPLHGIQHLNMVFSNLTLEHINAILLGAYRQGPPASPTASPEPPPPE

SEQ ID NO: 7731 - protein, 61 aa, Homo sapiens
SPRPGRTALLMASSLLGLPGVAPSSPCWSWPQECLCPGMCFTEDGSARARARPPEAPPALP

SEQ ID NO: 7732 - protein, 138 aa, Homo sapiens
VQIRVPGFGKTYSVEYLDSSKLAGYLHTLVQNLVNNGYVRDETVRAAPYDWRLEPGQQEEYYRKLAGLVEEMHAAYGKPVFLIGHSLGCLHLLYFLLRQPQAWKDRFIDGFISLGAPWGGSIKPMLVLASETGSHCIA

SEQ ID NO: 7733 - protein, 80 aa, Homo sapiens
  SITE 1: note = misc_feature - Xaa can be any naturally occurring amino acid
XEYYRKLAGLVEEMHAAYGKPVFLIGHSLGCLHLLYFLLRQPQAWKDRFIDGFISLGAPWGGSIKPMLVLASGSGTRAQH

SEQ ID NO: 7734 - protein, 107 aa, Homo sapiens
  SITE 1: note = misc_feature - Xaa can be any naturally occurring amino acid
XLPLGVDCWIDNTRVVYNRSSGLVSNAPGVQIRVPGFGKTYSVEYLDSSKLAGPPATACAPAAPARDTASQHGLQQPDPGAHQCHPAGCLPPGSPCIPDCQPRAPAS

SEQ ID NO: 7735 - protein, 176 aa, Homo sapiens
MKPLLLAVSLGLIAALQAHHLLASDEEIQDVSGTWYLKAMTVDREFPEMNLESVTPMTLTTLEGGNLEAKVTMLISGRCQEVKAVLEKTDEPGKYTADGGKHVAYIIRSHVKDHYIFYCEGELHGKPVRGVKLVGRDPKNNLEALEDFEKAAGARGLSTESILIPRQSETCSPGSD

SEQ ID NO: 7736 - protein, 176 aa, Homo sapiens; identical to SEQ ID NO: 7735

SEQ ID NO: 7737 - protein, 86 aa, Homo sapiens
MRQGLLVLALVLVLVLVLAAGSQVQEWYPRESHALNWNKFSGFWYILATATDAQGFLPARDKRKLGASVVKVNKVGQLRVLLAFRR

SEQ ID NO: 7738 - protein, 187 aa, Homo sapiens
MRQGLLVLALVLVLVLVLAAGSQVQEWYPRESHALNWNKFSGFWYILATATDAQGFLPARDKRKLGASVVKVNKVGQLRVLLAFRRGQGCGRAQPRHPGTSGHLWASLSVKGVKAFHVLSTDYSYGLVYLRLGRATQNYKNLLLFHRQNVSSFQSLKEFMDACDILGLSKAAVILPKDASRTHTILP

SEQ ID NO: 7739 - protein, 164 aa, Homo sapiens
MRQGLLVLALVLVLVLVLAAGSQVQEWYPRESHALNWNKFSGFWYILATATDAQGFLPARDKRKLGASVVKVNKVGQLRVLLAFRRLKGCQSQEVILRKDGKKPVFGNACAYAAGPREGQEGDRQNVSSFQSLKEFMDACDILGLSKAAVILPKDASRTHTILP

SEQ ID NO: 7740 - protein, 200 aa, Homo sapiens
MRQGLLVLALVLVLVLVLAAGSQVQEWYPRESHALNWNKFSGFWYILATATDAQGFLPARDKRKLGASVVKVNKVGQLRVLLAFRRLKGCQSQEVILRKDGKKPVFGNACAYAAGPREGQEGVKGVKAFHVLSTDYSYGLVYLRLGRATQNYKNLLLFHRQNVSSFQSLKEFMDACDILGLSKAAVILPKDASRTHTILP

SEQ ID NO: 7741 - protein, 75 aa, Homo sapiens
MRQGLLVLALVLVLVLVLAAGSQVQEWYPRESHALNWNKGQEEAGGVRGKGEQSGPAPRAPRLQTIGRMFRASRV

SEQ ID NO: 7742 - protein, 37 aa, Homo sapiens
  SITE 1: note = misc_feature - Xaa can be any naturally occurring amino acid
XTDAQGFLPARDKRKLGASVVKVNKVGQLRVLLAFRR

SEQ ID NO: 7743 - protein, 102 aa, Homo sapiens
ALLNAFTATFELSDDGRFEVWNAMTRGQHCDTWSYVLIPAAQPGQFTVDHGVGRSWLLPPGTLDQFICLGRAQGLSDDNIVFPDVTGGALDLSSLPWVAAPA

SEQ ID NO: 7744 - protein, 192 aa, Homo sapiens
MRLLCGLWLWLSLLKVLQAQTPTPLPLPPPMQSFQGNQFQGEWFVLGLAGNSFRPEHRALLNAFTATFELSDDGRFEVWNAMTRGQHCDTWSYVLIPAAQPGQFTVDHGVEPGADREETRVVDSDYTQFALMLSRRHTSRLAVLRISLLGRSWLLPPGTLDQFICLGRAQGLSDDNIVFPDVTGWSPQASVC

SEQ ID NO: 7745 - protein, 90 aa, Homo sapiens
TFELSDDGRFEVWNAMTRGQHCDTWSYVLIPAAQPGQFTVDHGVDTRAGWPSSGSACWAGAGCCLPGRWTSSSAWAELRASRMTTSSSQM

SEQ ID NO: 7746 - protein, 184 aa, Homo sapiens
MMSFLLGAILTLLWAPTAQAEVLLQPDFNAEKFSGLWYVVSMASDCRVFLGKKDHLSMSTRAIRPTEEGGLHVHMEFPGADGCNQVDAEYLKVGSEGHFRVPALGYLDVRIVDTDYSSFAVLYIYKELEGALSTMVQLYSRTQDVSPQALKSFQDFYPTLGLPKDMMVMLPQSDACNPESKEAP

SEQ ID NO: 7747 - protein, 200 aa, Homo sapiens
MPLGLLWLGLALLGALHAQAQDSTSDLIPAPPLSKVPLQQNFQDNQFQGKWYVVGLAGNAILREDKDPQKMYATIYELKEDKSYNVTSVLFREKAQKCDYWIRTFVPGCQPGEFTLGNIKSYPGLTSYLVRVVSTNYNQHAMVFFKKVSQNREYFKITLYGRTKELTSELKENFIRFSKSLGLPENHIVFPVPIDQCIDG

SEQ ID NO: 7748 - protein, 198 aa, Homo sapiens
MPLGLLWLGLALLGALHAQAQDSTSDLIPAPPLSKVPLQQNFQDNQFQGKWYVVGLAGNAILREDKDPQKMYATIYELKEDKSYNVTSVLFRKKKCDYWIRTFVPGCQPGEFTLGNIKSYPGLTSYLVRVVSTNYNQHAMVFFKKVSQNREYFKITLYGRTKELTSELKENFIRFSKSLGLPENHIVFPVPIDQCIDG

SEQ ID NO: 7749 - protein, 198 aa, Homo sapiens; identical to SEQ ID NO: 7748

SEQ ID NO: 7750 - protein, 78 aa, Homo sapiens
MDLIKRNSGWVFENPSIGVLELWVLATNFRDYAIIFTQLEFGDEPFNTVELYSLTETASQEAMGLFTKWSRSLGFLSQ

SEQ ID NO: 7751 - protein, 163 aa, Homo sapiens
MGGLLLAAFLALVSVPRAQAVWLGRLDPEQLLGPWYVLAVASREKGFAMEKDMKNVVGVVVTLTPENNLRTLSSQHGLGGCDQSVMDLIKRNSGWVFENPSIGVLELWVLATNFRDYAIIFTQLEFGDEPFNTVELYSLTETASQEAMGLFTKWSRSLGFLSQ

SEQ ID NO: 7752 - protein, 152 aa, Homo sapiens
MEELDRQKIGGFWREVGVASDQSLVLTAPKRVEGLFLTLSGSNLTVKVAYNSSGSCEIEKIVGSEIDSTGKFAFPGHREIHVLDTDYEGYAILRVSLMWRGRNFRVLKYFTRSLEDKDRLGFWKFRELTADTGLYLAARPGRCAELLKEELI

SEQ ID NO: 7753 - protein, 175 aa, Homo sapiens
MPGAAEALPTVTVTLVAGAVPPASGALTAHCIGGFWREVGVASDQSLVLTAPKRVEGLFLTLSGSNLTVKVAYNSSGSCEIEKIVGSEIDSTGKFAFPGHREIHVLDTDYEGYAILRVSLMWRGRNFRVLKYFTRSLEDKDRLGFWKFRELTADTGLYLAARPGRCAELLKEELI

SEQ ID NO: 7754 - protein, 176 aa, Homo sapiens [sequence omitted]

SEQ ID NO: 7755 - protein, 176 aa, Homo sapiens
MALLLLSLGLSLIAAQEFDPHTVMQRNYNVARVSGVWYSIFMASDDLNRIKENGDLRVFVRNIEHLKNGSLIFDFEYMVQGECVAVVVVCEKTEKNGEYSINYEGQNTVAVSETDYRLFITFHLQNFRNGTETHTLALYETCEKYGLGSQNIIDLTNKDPCYSKHYRSPPRPPMRW

SEQ ID NO: 7756 - protein, 518 aa, Homo sapiens
MDEKCSFCNLQREAVSDCIPSLDSSQSTPTEELSSQGQSNTDKIECQAENYLNALFRKKDLPQNCDPNIPLVAQELMKKMIRQFAIEYISKSGKTQENRNGSIGPSIVCKSIQMNQAENSLQEEQEGPLDLTVNRMQEQNTQQGDGVLDLSTKKTSIKSEESSICDPSSENSVAGRLHRNREDYVERSAEFADGLLSKALKDIQSGALDINKAGILYGIPQKTLLLHLEALPAGKPASFKNKTRDFHDSYSYKDSKETCAVLQKVALWARAQAERTEKSKLNLLETSEIKFPTASTYLHQLTLQKMVTQFKEKNESLQYETSNPTVQLKIPQLRVSSVSKSQPDGSGLLDVMYQVSKTSSVLEGSALQKLKNILPKQNKIECSGPVTHSSVDSYFLHGDLSPLCLNSKNGTVDGTSENTEDGLDRKDSKQPRKKRGRYRQYDHEIMEEAIAMVMSGKMSVSKAQGIYGVPHSTLEYKVKERSGTLKTPPKKKLRLPDTGLYNMTDSGTGSCKNSSKPV

SEQ ID NO: 7757 - protein, 318 aa, Homo sapiens
MDKGRERMAAAAAAAAAAAAAAQCRSPRCAAERRGFRRELDSWRHRLMHCVGFESILEGLYGPRLRRDLSLFEDCEPEELTDWSMDEKCSFCNLQREAVSDCIPSLDSSQSTPTEELSSQGQSNTDKIECQAENYLNALFRKKDLPQNCDPNIPLVAQELMKKMIRQFAIEYISKSGKTQENRNGSIGPSIVCKSIQMNQAENSLQEEQEGPLDLTVNRMQEQNTQQGDGVLDLSTKKTSIKSEESSICDPSSENSVAGMLQVKTDEKLNVSDENTASCPLSPIKMCLNRPIEWNLNLTTASLTSCTVHNQNLKSEEK

SEQ ID NO: 7758 - protein, 602 aa, Homo sapiens
MDKGRERMAAAAAAAAAAAAAAQCRSPRCAAERRGFRRELDSWRHRLMHCVGFESILEGLYGPRLRRDLSLFEDCEPEELTDWSMDEKCSFCNLQREAVSDCIPSLDSSQSTPTEELSSQGQSNTDKIECQAENYLNALFRKKDLPQNCDPNIPLVAQELMKKMIRQFAIEYISKSGKTQENRNGSIGPSIVCKSIQMNQAENSLQEEQEGPLDLTVNRMQEQNTQQGDGVLDLSTKKTSIKSEESSICDPSSENSVAGRLHRNREDYVERSAEFADGLLSKALKDIQSGALDINKAGILYGIPQKTLLLHLEALPAGKPASFKNKTRDFHDSYSYKDSKETCAVLQKVALWARAQAERTEKSKLNLLETSEIKFPTASTYLHQLTLQKMVTQFKEKNESLQYETSNPTVQLKIPQLRVSSVSKSQPDGSGLLDVMYQVSKTSSVLEGSALQKLKNILPKQNKIECSGPVTHSSVDSYFLHGDLSPLCLNSKNGTVDGTSENTEDGLDRKDSKQPRKKRGRYRQYDHEIMEEAIAMVMSGKMSVSKAQGIYGVPHSTLEYKVKERSGTLKTPPKKKLRLPDTGLYNMTDSGTGSCKNSSKPV

SEQ ID NO: 7759 - protein, 1871 aa, Homo sapiens
MDKGRERMAAAAAAAAAAAAAAQCRSPRCAAERRGFRRELDSWRHRLMHCVGFESILEGLYGPRLRRDLSLFEDCEPEELTDWSMDEKCSFCNLQREAVSDCIPSLDSSQSTPTEELSSQGQSNTDKIECQAENYLNALFRKKDLPQNCDPNIPLVAQELMKKMIRQFAIEYISKSGKTQENRNGSIGPSIVCKSIQMNQAENSLQEEQEGPLDLTVNRMQEQNTQQGDGVLDLSTKKTSIKSEESSICDPSSENSVAGSTVDAKSEEATKMEKRKSALNKVLESLCIHHQQQVLAMLKFLVQEQNAASLCCCNTSCVVSSESQKPLIEDDLCGLFCSCEYRLAERGCLQNEKQSPGLEPLPVCIKDLHCLSCQTVTVEHVKPVVNRGIADSYNSHRCCSGLLPNIHSTKSAFRSPLLSKEVCDLSVTLKDACRSRSPSPPPLSPIETEGFEKLKDVISEISALENNKLEANINQPPSLTPAEISSNKSDHQDKILKTKKSSNSYSLLSNDSNNSTTNHEKGETAVIFQDLMDRINEKLKSIETTDMTSLVKLSSSDYNTYNDLKLGDFITSLLHNAKASDYSFMELLSQHDKKVENKIIQTRFRKRQETLFAMRNSSDSPMFRRQSLQIKRELASLDENFTRKKYTEKSSRKLTQNNEISSSDKGEFYHDQGPSLQNSKRLQGKNHAETSFSPNYALQSLQLPLHSSETNLSFNEFSESFKTTSPEKMSIRKPQEKSADGKQFLQNDRKNPKLGNTQTLLRNDVSGLLSRTKRNIVPPGWYSVYVTNNYVFKKSPKAKKVSESTTKNDPVKNIHIESSHNIDLNKIAMNSNLQVVVKRLEDTISIAKKSWNNQPLSEGYKASKKLIEIDGKDQHADRNMTLTLNRMTCKEQSLSKSVVASGNIINSHCMPTVDLNNKRLENLKKSSILDMGRLISSVENVPAKYEGTESSSVSNYSSPIKLMFLSEVKSSEGVKYTLTSVGTSHSNVVLPSEKPTTHHVTEEKTETNEDISNANSENYHSSHYDTDTFQRELNKFSHAKETAGSSTMFIGDINSDKPQEEPKDNSSSATDPSFKRKPGRPKKIGPQVVKQIKRPIGRPPKPKIDQTNITVCQNEPFSAGRKSPECLISEVKEGIYKKSITVTVIYGRSRRTKRHVSEGRVNISNLMSLNNNAGDFPTEYNSPRNISEDKIDLGERISAVASLTTESEILGSGFEYVRPIKNKSVIPQPSKNIIRPNQKPLAISRKPGRPAKVKISGISVTINRTSPQEREVSISSCLPPLEQDNTSGKNLPEEKYDQQCTQMDKIRHTEADIFKNGSKRMIATVPLRHSIRDRKPSLHFLHSLASSSSLIYRNALLHKSYKLHLQKNKSQKEKHRHSKMKIAYKDTPRNRLSRNAKKCLEDNKLVPISEVSLDPIISSNPLLRWWATSASNDSLLEELNNRFEQITNAWVQVSGDEAENCIHKKREHIENDHFKVASPLETCLLELEVSPVKMLFQKKYDLNELCTWFMQTTETQSLSLVRKANARNPLEVINTRGIKLGTKYSDFNASPFRKHFKKFALSSPSKSAEKLHILHKVANSPLLNVKSNLAIARLKRTEFKRLHHERWKREGKLHNHGTVDWNSKRRNLRFFCQNQFLNKTEGETNADIPLQGKSIVDNQCVLPPEIRGDLQQRVVMPDFKIHASFENKFKSEAKENGTNCSQKDFQKGPRLENVCPNSWRSKTLKDCRIFLRKLNCLEHRNTFKLNTIIYSPESTDSGNTHQTHMEESKRFTLRSHSARQNSFKKQSKEIENANTNNPSADEFADHLGNSKLSKCVNFDKNPDSFEVLSNLNKRKRPPWKITEMSTKRHKRQSCNSGQMANYFSKSLACYK

SEQ ID NO: 7760 - protein, 79 aa, Homo sapiens
MDKGRERMAAAAAAAAAAAAAAQCRSPRCAAERRGFRRELDSWRHRLMHCVGFESILEGLYGPRLRRDLSLFEGLYTIS

SEQ ID NO: 7761 - protein, 77 aa, Homo sapiens
  SITE 1: note = misc_feature - Xaa can be any naturally occurring amino acid
XGRERMAAAAAAAAAAAAAAQCRSPRCAAERRGFRRELDSWRHRLMHCVGFESILEGLYGPRLRRDLSLFEGLYTIS

SEQ ID NO: 7762 - protein, 692 aa, Homo sapiens
MGPWGWKLRWTVALLLAAAGTAVGDRCERNEFQCQDGKCISYKWVCDGSAECQDGSDESQETCLSVTCKSGDFSCGGRVNRCIPQFWRCDGQVDCDNGSDEQGCLTLCEGPNKFKCHSGECITLDKVCNMARDCRDWSDEPIKECGTNECLDNNGGCSHVCNDLKIGYECLCPDGFQLVAQRRCEDIDECQDPDTCSQLCVNLEGGYKCQCEEGFQLDPHTKACKAVGSIAYLFFTNRHEVRKMTLDRSEYTSLIPNLRNVVALDTEVASNRIYWSDLSQRMICSTQLDRAHGVSSYDTVISRDIQAPDGLAVDWIHSNIYWTDSVLGTVSVADTKGVKRKTLFRENGSKPRAIVVDPVHGFMYWTDWGTPAKIKKGGLNGVDIYSLVTENIQWPNGITLDLLSGRLYWVDSKLHSISSIDVNGGNRKTILEDEKRLAHPFSLAVFEDKVFWTDIINEAIFSANRLTGSDVNLLAENLLSPEDMVLFHNLTQPRGVNWCERTTLSNGGCQYLCLPAPQINPHSPKFTCACPDGMLLARDMRSCLTEAEAAVATQETSTVRLKVSSTAVRTQHTTTRPVPDTSRLPGATPGLTTVEIVTMSHQALGDVAGRGNEKKPSSVRALSIVLPIVLLVFLCLGVFLLWKNWRLKNINSINFDNPVYQKTTEDEVHICHNQDGYSYPSRQMVSLEDDVA

SEQ ID NO: 7763 - protein, 860 aa, Homo sapiens [sequence omitted]

SEQ ID NO: 7764 - protein, 858 aa, Homo sapiens
MGPWGWKLRWTVALLLAAAGTAVGDRCERNEFQCQDGKCISYKWVCDGSAECQDGSDESQETCLSVTCKSGDFSCGGRVNRCIPQFWRCDGQVDCDNGSDEQGCPPKTCSQDEFRCHDGKCISRQFVCDSDRDCLDGSDEASCPVLTCGPASFQCNSSTCIPQLWACDNDPDCEDGSDEWPQRCRGLYVFQGDSSPCSAFEFHCLSGECIHSSWRCDGGPDCKDKSDEENCAVATCRPDEFQCSDGNCIHGSRQCDREYDCKDMSDEVGCVNVTLCEGPNKFKCHSGECITLDKVCNMARDCRDWSDEPIKECGTNECLDNNGGCSHVCNDLKIGYECLCPDGFQLVAQRRCEDIDECQDPDTCSQLCVNLEGGYKCQCEEGFQLDPHTKACKAVGSIAYLFFTNRHEVRKMTLDRSEYTSLIPNLRNVVALDTEVASNRIYWSDLSQRMICSTQLDRAHGVSSYDTVISRDIQAPDGLAVDWIHSNIYWTDSVLGTVSVADTKGVKRKTLFRENGSKPRAIVVDPVHGFMYWTDWGTPAKIKKGGLNGVDIYSLVTENIQWPNGITLDLLSGRLYWVDSKLHSISSIDVNGGNRKTILEDEKRLAHPFSLAVFEDKVFWTDIINEAIFSANRLTGSDVNLLAENLLSPEDMVLFHNLTQPRGVNWCERTTLSNGGCQYLCLPAPQINPHSPKFTCACPDGMLLARDMRSCLTEAEAAVATQETSTVRLKVSSTAVRTQHTTTRPVPDTSRLPGATPGLTTVEIVTMSHQALGDVAGRGNEKKPSSVRALSIVLPIVLLVFLCLGVFLLWKNWRLKNINSINFDNPVYQKTTEDEVHICHNQDGYSYPSMVSLEDDVA

SEQ ID NO: 7765 - protein, 948 aa, Homo sapiens
MGPWGWKLRWTVALLLAAAGTAVGDRCERNEFQCQDGKCISYKWVCDGSAECQDGSDESQETCLSVTCKSGDFSCGGRVNRCIPQFWRCDGQVDCDNGSDEQGCPPKTCSQDEFRCHDGKCISRQFVCDSDRDCLDGSDEASCPVLTCGPASFQCNSSTCIPQLWACDNDPDCEDGSDEWPQRCRGLYVFQGDSSPCSAFEFHCLSGECIHSSWRCDGGPDCKDKSDEENCAVATCRPDEFQCSDGNCIHGSRQCDREYDCKDMSDEVGCVNVTLCEGPNKFKCHSGECITLDKVCNMARDCRDWSDEPIKECGTNECLDNNGGCSHVCNDLKIGYECLCPDGFQLVAQRRCEDIDECQDPDTCSQLCVNLEGGYKCQCEEGFQLDPHTKACKAVGSIAYLFFTNRHEVRKMTLDRSEYTSLIPNLRNVVALDTEVASNRIYWSDLSQRMICSTQLDRAHGVSSYDTVISRDIQAPDGLAVDWIHSNIYWTDSVLGTVSVADTKGVKRKTLFRENGSKPRAIVVDPVHGFMYWTDWGTPAKIKKGGLNGVDIYSLVTENIQWPNGITLDLLSGRLYWVDSKLHSISSIDVNGGNRKTILEDEKRLAHPFSLAVFEDKVFWTDIINEAIFSANRLTGSDVNLLAENLLSPEDMVLFHNLTQPRGVNWCERTTLSNGGCQYLCLPAPQINPHSPKFTCACPDGMLLARDMRSCLTEAEAAVATQETSTVRLKVSSTAVRTQHTTTRPVPDTSRLPGATPGLTTVEIVTMSHQALGDVAGRGNEKKPSSVRALSIVLPIATELGLWSRGQLCDRACLSLQCSSSSFAWGSSFYGRTGGLRTSTASTLTTPSIRRPQRMRSTFATTRTATATPRDRWSVWRMTWREHLPGVPSLPRTLPETSPALFYSKTEKTKALPARALFYIFIHLGGRTGFGQCPCNGLGWDFGFFLSS

SEQ ID NO: 7766 - protein, 682 aa, Homo sapiens
MGPWGWKLRWTVALLLAAAGTAVGDRCERNEFQCQDGKCISYKWVCDGSAECQDGSDESQETCLSVTCKSGDFSCGGRVNRCIPQFWRCDGQVDCDNGSDEQGCPVATCRPDEFQCSDGNCIHGSRQCDREYDCKDMSDEVGCVNVTLCEGPNKFKCHSGECITLDKVCNMARDCRDWSDEPIKECGTNECLDNNGGCSHVCNDLKIGYECLCPDGFQLVAQRRCEDIDECQDPDTCSQLCVNLEGGYKCQCEEGFQLDPHTKACKAVGSIAYLFFTNRHEVRKMTLDRSEYTSLIPNLRNVVALDTEVASNRIYWSDLSQRMICSTQLDRAHGVSSYDTVISRDIQAPDGLAVDWIHSNIYWTDSVLGTVSVADTKGVKRKTLFRENGSKPRAIVVDPVHGFMYWTDWGTPAKIKKGGLNGVDIYSLVTENIQWPNGITLDLLSGRLYWVDSKLHSISSIDVNGGNRKTILEDEKRLAHPFSLAVFEDKVFWTDIINEAIFSANRLTGSDVNLLAENLLSPEDMVLFHNLTQPREAEAAVATQETSTVRLKVSSTAVRTQHTTTRPVPDTSRLPGATPGLTTVEIVTMSHQALGDVAGRGNEKKPSSVRALSIVLPIVLLVFLCLGVFLLWKNWRLKNINSINFDNPVYQKTTEDEVHICHNQDGYSYPSRQMVSLEDDVA

SEQ ID NO: 7767 - protein, 819 aa, Homo sapiens
MGPWGWKLRWTVALLLAAAGTAVGDRCERNEFQCQDGKCISYKWVCDGSAECQDGSDESQETCSPKTCSQDEFRCHDGKCISRQFVCDSDRDCLDGSDEASCPVLTCGPASFQCNSSTCIPQLWACDNDPDCEDGSDEWPQRCRGLYVFQGDSSPCSAFEFHCLSGECIHSSWRCDGGPDCKDKSDEENCAVATCRPDEFQCSDGNCIHGSRQCDREYDCKDMSDEVGCVNVTLCEGPNKFKCHSGECITLDKVCNMARDCRDWSDEPIKECGTNECLDNNGGCSHVCNDLKIGYECLCPDGFQLVAQRRCEDIDECQDPDTCSQLCVNLEGGYKCQCEEGFQLDPHTKACKAVGSIAYLFFTNRHEVRKMTLDRSEYTSLIPNLRNVVALDTEVASNRIYWSDLSQRMICSTQLDRAHGVSSYDTVISRDIQAPDGLAVDWIHSNIYWTDSVLGTVSVADTKGVKRKTLFRENGSKPRAIVVDPVHGFMYWTDWGTPAKIKKGGLNGVDIYSLVTENIQWPNGITLDLLSGRLYWVDSKLHSISSIDVNGGNRKTILEDEKRLAHPFSLAVFEDKVFWTDIINEAIFSANRLTGSDVNLLAENLLSPEDMVLFHNLTQPRGVNWCERTTLSNGGCQYLCLPAPQINPHSPKFTCACPDGMLLARDMRSCLTEAEAAVATQETSTVRLKVSSTAVRTQHTTTRPVPDTSRLPGATPGLTTVEIVTMSHQALGDVAGRGNEKKPSSVRALSIVLPIVLLVFLCLGVFLLWKNWRLKNINSINFDNPVYQKTTEDEVHICHNQDGYSYPSRQMVSLEDDVA

SEQ ID NO: 7768 - protein, 945 aa, Homo sapiens
  SITE 1: note = misc_feature - Xaa can be any naturally occurring amino acid
XGRPGVPPRFLSQRRRQVPGPRSRLRDIHESPSVILGPPGEVPGFRCALWRHLRPHLVLGGALAPPAPIKFTEGPPATLKASVPYEVETLPQNLPAPPWSAAEIFSHVGDRCERNEFQCQDGKCISYKWVCDGSAECQDGSDESQETCLSVTCKSGDFSCGGRVNRCIPQFWRCDGQVDCDNGSDEQGCPPKTCSQDEFRCHDGKCISRQFVCDSDRDCLDGSDEASCPVLTCGPASFQCNSSTCIPQLWACDNDPDCEDGSDEWPQRCRGLYVFQGDSSPCSAFEFHCLSGECIHSSWRCDGGPDCKDKSDEENCAVATCRPDEFQCSDGNCIHGSRQCDREYDCKDMSDEVGCVNVTLCEGPNKFKCHSGECITLDKVCNMARDCRDWSDEPIKECGTNECLDNNGGCSHVCNDLKIGYECLCPDGFQLVAQRRCEDIDECQDPDTCSQLCVNLEGGYKCQCEEGFQLDPHTKACKAVGSIAYLFFTNRHEVRKMTLDRSEYTSLIPNLRNVVALDTEVASNRIYWSDLSQRMICSTQLDRAHGVSSYDTVISRDIQAPDGLAVDWIHSNIYWTDSVLGTVSVADTKGVKRKTLFRENGSKPRAIVVDPVHGFMYWTDWGTPAKIKKGGLNGVDIYSLVTENIQWPNGITLDLLSGRLYWVDSKLHSISSIDVNGGNRKTILEDEKRLAHPFSLAVFEDKVFWTDIINEAIFSANRLTGSDVNLLAENLLSPEDMVLFHNLTQPRGVNWCERTTLSNGGCQYLCLPAPQINPHSPKFTCACPDGMLLARDMRSCLTEAEAAVATQETSTVRLKVSSTAVRTQHTTTRPVPDTSRLPGATPGLTTVEIVTMSHQALGDVAGRGNEKKPSSVRALSIVLPIVLLVFLCLGVFLLWKNWRLKNINSINFDNPVYQKTTEDEVHICHNQDGYSYPSRQMVSLEDDVA

SEQ ID NO: 7769 - protein, 309 aa, Homo sapiens
  SITE 1: note = misc_feature - Xaa can be any naturally occurring amino acid
XLDGSDEASCPVLTCGPASFQCNSSTCIPQLWACDNDPDCEDGSDEWPQRCRGLYVFQGDSSPCSAFEFHCLSGECIHSSWRCDGGPDCKDKSDEENCAVATCRPDEFQCSDGNCIHGSRQCDREYDCKDMSDEVGCVNVTLCEGPNKFKCHSGECITLDKVCNMARDCRDWSDEPIKECDIDECQDPDTCSQLCVNLEGGYKCQCEEGFQLDPHTKACKAVGSIAYLFFTNRHEVRKMTLDRSEYTSLIPNLRNVVALDTEVASNRIYWSDLSQRMICSTQLDRAHGVSSYDTVISRDIQAPDGLAVD

SEQ ID NO: 7770 - protein, 170 aa, Homo sapiens
  SITE 1: note = misc_feature - Xaa can be any naturally occurring amino acid
XNVVALDTEVASNRIYWSDLSQRMICSTQLDRAHGVSSYDTVISRDIQAPDGLAVDWIHSNIYWTDSVLGTVSVADTKGVKRKTLFRENGSKPRAIVVDPVHGFMYWTDWGTPAKIKKGGLNGVDIYSLVTENIQWPNGITLGQSILDRYHQRSHFQCQPPHRFRCQLVG

SEQ ID NO: 7771 - protein, 272 aa, Homo sapiens
MEACCLLQLPQRLLLLGAAALTATALETADLAELCGQTWQGDGLLLRSHAASRRFYFVAPDTDCGLWVQAAAPGDRIRFQFRFFLVYSLTPAPPALNTSSPAPADPCAPGSYLQFYEGPPGAPRPLGSPLCGLNIPVPVASSGPFLGLRLVTRGRQPRVDFVGEVTSFRLGPCGAYFRCQNGRCIPSSLVCDPWGMDNCGDGSDQGSWSPADCRGPSPVPSQTGSTDAHTSRSLTPSPALGSAGSLWIAAERSSPAGRDPTRQDAALEGSTE

SEQ ID NO: 7772 - protein, 272 aa, Homo sapiens; identical to SEQ ID NO: 7771

SEQ ID NO: 7773 - protein, 77 aa, Homo sapiens
MWHLKLCAVLMIFLLLLGQIDGSPIPEVSSAKRRPRRMTPFWRGVSLRPIGASCRDDSECITRLCRKRRCSLSVAQE

SEQ ID NO: 7774 - protein, 131 aa, Homo sapiens
MFSTKALLLAGLISTALAGPWANICAGKSSNEIRTCDRHGCGQYSAQRSQRPHQGVDILCSAGSTVYAPFTGMIVGQEKPYQNKNAINNGVRISGREITTDTPIFNNYYPDQSAAVNIKTRSSTSKKMMTH

SEQ ID NO: 7775 - protein, 151 aa, Homo sapiens
MFSTKALLLAGLISTALAGPWANICAGKSSNEIRTCDRHGCGQYSAQRSQRPHQGVDILCSAGSTVYAPFTGMIVGQEKPYQNKNAINNGVRISGRGFCVKMFYIKPIKYKGPIKKGEKLGTLLPLQKVYPGIQSHVHIENCDSSDPTAYL

SEQ ID NO: 7776 - protein, 111 aa, Homo sapiens
MFSTKALLLAGLISTALAGPWANICAGKSSNEIRTCDRHGCGQYSAQRSQRPHQGVDILCSAGSTVYAPFTGMIVGQEKPYQNKNAINNGVRISGRGKRGGVYTWGASWRC

SEQ ID NO: 7777 - protein, 79 aa, Homo sapiens
MIVGQEKPYQNKNAINNGVRISGRGFCVKMFYIKPIKYKGPIKKGEKLGTLLPLQKVYPGIQSHVHIENCDSSDPTAYL

SEQ ID NO: 7778 - protein, 64 aa, Homo sapiens
MEQRLPPNSELVQAVLRLFQEPVPKAALHRHGRLSPRSARARVTVEWLRVRDDGSNRTSLIDSR

SEQ ID NO: 7779 - protein, 366 aa, Homo sapiens
MQPLWLCWALWVLPLASPGAALTGEQLLGSLLRQLQLKEVPTLDRADMEELVIPTHVRAQYVALLQRSHGDRSRGKRFSQSFREVAGRFLALEASTHLLVFGMEQRLPPNSELVQAVLRLFQEPVPKAALHRHGRLSPRSARARVTVEWLRVRDDGSNRTSLIDSRLVSVHESGWKAFDVTEAVNFWQQLSRPRQPLLLQVSVQREHLGPLASGAHKLVRFASQGAPAGLGEPQLELHTLDLGDYGAQGDCDPEAPMTEGTRCCRQEMYIDLQGMKWAENWVLEPPGFLAYECVGTCRQPPEALAFKWPFLGPRQCIASETDSLPMIVSIKEGGRTRPQVVSLPNMRVQKCSCASDGALVPRRLQP

SEQ ID NO: 7780 - protein, 332 aa, Homo sapiens
MWPLWLCWALWVLPLAGPGAALTEEQLLGSLLRQLQLSEVPVLDRADMEKLVIPAHVRAQYVVLLRRSHGDRSRGKRFSQSFREVAGRFLASEAALHRHGRLSPRSAQARVTVEWLRVRDDGSNRTSLIDSRLVSVHESGWKAFDVTEAVNFWQQLSRPRQPLLLQVSVQREHLGPLASGAHKLVRFASQGAPAGLGEPQLELHTLDLRDYGAQGDCDPEAPMTEGTRCCRQEMYIDLQGMKWAKNWVLEPPGFLAYECVGTCQQPPEALAFNWPFLGPRQCIASETASLPMIVSIKEGGRTRPQVVSLPNMRVQKCSCASDGALVPRRLQP

SEQ ID NO: 7781 - protein, 366 aa, Homo sapiens
MWPLWLCWALWVLPLAGPGAALTEEQLLGSLLRQLQLSEVPVLDRADMEKLVIPAHVRAQYVVLLRRSHGDRSRGKRFSQSFREVAGRFLASEASTHLLVFGMEQRLPPNSELVQAVLRLFQEPVPKAALHRHGRLSPRSAQARVTVEWLRVRDDGSNRTSLIDSRLVSVHESGWKAFDVTEAVNFWQQLSRPRQPLLLQVSVQREHLGPLASGAHKLVRFASQGAPAGLGEPQLELHTLDLRDYGAQGDCDPEAPMTEGTRCCRQEMYIDLQGMKWAKNWVLEPPGFLAYECVGTCQQPPEALAFNWPFLGPRQCIASETASLPMIVSIKEGGRTRPQVVSLPNMRVQKCSCASDGALVPRRLQP

SEQ ID NO: 7782 - protein, 167 aa, Homo sapiens
MHWGTLCGFLWLWPYLFYVQAVPIQKVQDDTKTLIKTIVTRINDISHTQSVSSKQKVTGLDFIPGLHPILTLSKMDQTLAVYQQILTSMPSRNVIQISNDLENLRDLLHVLAFSKSCHLPWASGLETLDSLGGVLEASGYSTEVVALSRLQGSLQDMLWQLDLSPGC

SEQ ID NO: 7783 - protein, 308 aa, Homo sapiens
MDEQTGRLRLDTYCMSAKQIWAWSKCSGRLWDEHMKWMEGWTDRWTDGWMDGWMDEWSPTPALRSYGGGLSQQTFIFTDGEDEALARHTGNVVITNCSAAHSRQALSCKMAVEYDRFIESGRKWFCHVDDDNYVNLRALLRLLASYPHTRDVYVGKPSLDRPIQAMERVSENKVRPVHFWFATGGAGFCISRGLALKMSPWASGGHFMNTAERIRLPDDCTIGYIVEALLGVPLIRSGLFHSHLENLQQVPTSELHEQVTLSYGMFENKRNAVHVKGPFSVEADPSRFRSIHCHLYPDTPWCPRTAIF

SEQ ID NO: 7784 - protein, 248 aa, Homo sapiens
MKGCLLKADFLLQTFIFTDGEDEALARHTGNVVITNCSAAHSRQALSCKMAVEYDRFIESGRKWFCHVDDDNYVNLRALLRLLASYPHTRDVYVGKPSLDRPIQAMERVSENKVRPVHFWFATGGAGFCISRGLALKMSPWASGGHFMNTAERIRLPDDCTIGYIVEALLGVPLIRSGLFHSHLENLQQVPTSELHEQVTLSYGMFENKRNAVHVKGPFSVEADPSRFRSIHCHLYPDTPWCPRTAIF

SEQ ID NO: 7785 - protein, 379 aa, Homo sapiens
MLKRCGRRLLLALAGALLACLLVLTADPPPPPLPAERGRRALRSLAGPAGAAPAPGLGAAAAAPGALVRDVHSLSEYFSLLTRARRDAGPPPGAAPRPADGHPRPLAEPLAPRDVFIAVKTTKKFHRARLDLLLETWISRHKEMTFIFTDGEDEALARHTGNVVITNCSAAHSRQALSCKMAVEYDRFIESGRKWFCHVDDDNYVNLRALLRLLASYPHTRDVYVGKPSLDRPIQAMERVSENKVRPVHFWFATGGAGFCISRGLALKMSPWASGGHFMNTAERIRLPDDCTIGYIVEALLGVPLIRSGLFHSHLENLQQVPTSELHEQVTLSYGMFENKRNAVHVKGPFSVEADPSRFRSIHCHLYPDTPWCPRTAIF

SEQ ID NO: 7786 - protein, 361 aa, Homo sapiens
MLKRCGRRLLLALAGALLACLLVLTADPPPPPLPAERGRRALRSLAGPAGAAPAPGLGAAAAAPGALVRDVHSLSEYFSLLTRARRDAGPPPGAAPRPADGHPRPLAEPLAPRDVFIAVKTTKKFHRARLDLLLETWISRHKEMTFIFTDGEDEALARHTGNVVITNCSAAHSRQALSCKMAVEYDRFIESGRKWFCHVDDDNYVNLRALLRLLASYPHTRDVYVGKPSLDRPIQAMERVSENKVRPVHFWFATGGAGFCISRGLALKMSPWASGGHFMNTAERIRLPDDCTIGYIVEALLGVPLIRSGLFHSHLENLQQVPTSELHEQVTLSYGMFENKRNAVHVKGPFSVEADPSRWGN

SEQ ID NO: 7787 - protein, 250 aa, Homo sapiens
MTPGRCCLAADIQVETFIFTDGEDEALARHTGNVVITNCSAAHSRQALSCKMAVEYDRFIESGRKWFCHVDDDNYVNLRALLRLLASYPHTRDVYVGKPSLDRPIQAMERVSENKVRPVHFWFATGGAGFCISRGLALKMSPWASGGHFMNTAERIRLPDDCTIGYIVEALLGVPLIRSGLFHSHLENLQQVPTSELHEQVTLSYGMFENKRNAVHVKGPFSVEADPSRFRSIHCHLYPDTPWCPRTAIF

SEQ ID NO: 7788 - protein, 250 aa, Homo sapiens; identical to SEQ ID NO: 7787

SEQ ID NO: 7789 - protein, 18 aa, Homo sapiens
MTPPRLFWVWLLVAGTQA

SEQ ID NO: 7790 - protein, 41 aa, Homo sapiens
MTPPRLFWVWLLVAGTQAPGIPSDDDLEVPGGSPGFRRERW

SEQ ID NO: 7791 - protein, 41 aa, Homo sapiens; identical to SEQ ID NO: 7790

SEQ ID NO: 7792 - protein, 62 aa, Homo sapiens
MTPPRLFWVWLLVAGTQGELSPWEIPKAEVWKAGAPWGCSELQGDILPGARGPAVSQIFSPA

SEQ ID NO: 7793 - protein, 62 aa, Homo sapiens; identical to SEQ ID NO: 7792

SEQ ID NO: 7794 - protein, 144 aa, Homo sapiens
MTPPRLFWVWLLVAGTQGSGPIMLDEVQCTGTEASLADCKSLGWLKSNCRHERDAGVVCTNETRSTHTLDLSRELSEALGQIFDSQRGCDLSISVNVQGEDALGFCGHTVILTANLEAQALWKEPGSNVTMSVDAECVPMVRDL

SEQ ID NO: 7795 - protein, 48 aa, Homo sapiens
MTPPRLFWVWLLVAGTQGVNDGDMRLADGGATNQGRVEIFYRGPWPDL

SEQ ID NO: 7796 - protein, 113 aa, Homo sapiens
MTPPRLFWVWLLVAGTQGVNDGDMRLADGGATNQGRVEIFYRGQWGTVCDNLWDLTDASVVCRALGFENATQALGRAAFGQGRACCLTGRLQVPGLAEEQLQARERRWCGLHQ

SEQ ID NO: 7797 - protein, 88 aa, Homo sapiens
MTPPRLFWVWLLVAGTQGVNDGDMRLADGGATNQGRVEIFYRGQWGTVCDNLWDLTDASVVCRALGFENATQALGRAAFGQGSGPIML

SEQ ID NO: 7798 - protein, 209 aa, Homo sapiens
MTPPRLFWVWLLVAGTQGVNDGDMRLADGGATNQGRVEIFYRGQWGTVCDNLWDLTDASVVCRALGFENATQALGRAAFGQGSGPIMLDEVQCTGTEASLADCKSLGWLKSNCRHERDAGVVCTNETRSTHTLDLSRELSEALGQIFDSQRGCDLSISVNVQGEDALGFCGHTVILTANLEAQALWKEPGSNVTMSVDAECVPMVRDLL

SEQ ID NO: 7799 - protein, 210 aa, Homo sapiens
MTPPRLFWVWLLVAGTQGVNDGDMRLADGGATNQGRVEIFYRGQWGTVCDNLWDLTDASVVCRALGFENATQALGRAAFGQGSGPIMLDEVQCTGTEASLADCKSLGWLKSNCRHERDAGVVCTNETRSTHTLDLSRELSEALGQIFDSQRGCDLSISVNVQGEDALGFCGHTVILTANLEAQALWKEPGSNVTMSVDAECVPMVRDLLR

SEQ ID NO: 7800 - protein, 585 aa, Homo sapiens
MTPPRLFWVWLLVAGTQGVNDGDMRLADGGATNQGRVEIFYRGQWGTVCDNLWDLTDASVVCRALGFENATQALGRAAFGQGSGPIMLDEVQCTGTEASLADCKSLGWLKSNCRHERDAGVVCTNETRSTHTLDLSRELSEALGQIFDSQRGCDLSISVNVQGEDALGFCGHTVILTANLEAQALWKEPGSNVTMSVDAECVPMVRDLLRYFYSRRIDITLSSVKCFHKLASAYGARQLQGYCASLFAILLPQDPSFQMPLDLYAYAVATGDALLEKLCLQFLAWNFEALTQAEAWPSVPTDLLQLLLPRSDLAVPSELALLKAVDTWSWGERASHEEVEGLVEKIRFPMMLPEELFELQFNLSLYWSHEALFQKKTLQALEFHTVPFQLLARYKGLNLTEDTYKPRIYTSPTWSAFVTDSSWSARKSQLVYQSRRGPLVKYSSDYFQAPSDYRYYPYQSFQTPQHPSFLFQDKRVSWSLVYLPTIQSCWNYGFSCSSDELPVLGLTKSGGSDRTIAYENKALMLCEGLFVADVTDFEGWKAAIPSALDTNSSKSTSSFPCPAGHFNGFRTVIRPFYLTNSSGVD

SEQ ID NO: 7801 - protein, 259 aa, Homo sapiens
MTPPRLFWVWLLVAGTQGVNDGDMRLADGGATNQGRVEIFYRGQWGTVCDNLWDLTDASVVCRALGFENATQALGRAAFGQGSGPIMLDEVQCTGTEASLADCKSLGWLKSNCRHERDAGVVCTNETRSTHTLDLSRELSEALGQIFDSQRGCDLSISVNVQGEDALGFCGHTVILTANLEAQALWKEPGSNVTMSVDAECVPMVRDLLRYFYSRRIDITLSSVKCFHKLASAYGARQLQGYCASLFAILLPQDPSFQM

SEQ ID NO: 7802 - protein, 131 aa, Homo sapiens
MTPPRLFWVWLLVAGTQGVNDGDMRLADGGATNQGRVEIFYRGQWGTVCDNLWDLTDASVVCRALGFENATQALGRAAFGQGSGPIMLDEVQCTGTEASLADCKSLGWLKSNCRHERDAGVVCTNGAFQSE

SEQ ID NO: 7803 - protein, 205 aa, Homo sapiens
MTPPRLFWVWLLVAGTQGVNDGDMRLADGGATNQGRVEIFYRGQWGTVCDNLWDLTDASVVCRALGFENATQALGRAAFGQGSGPIMLDEVQCTGTEASLADCKSLGWLKSNCRHERDAGVVCTNGTSTPEGLTSPCRQSSASTSWPLPMGPGSCRATAQASLPSSSPRTPRSRCPWTCMPMQWPQGTPCWRSSAYSSWPGTSRP

SEQ ID NO: 7804 - protein, 52 aa, Homo sapiens
MESERSKRMGNACIPLKRIAYFLCLLSALLLTEGKKPAKPKCPAILCEIWFY

SEQ ID NO: 7805 - protein, 72 aa, Homo sapiens
MESERSKRMGNACIPLKRIAYFLCLLSALLLTEGKKPAKPKCPAVCTCTKDNALCENARSIPRTVPPDVISL

SEQ ID NO: 7806 - protein, 72 aa, Homo sapiens; identical to SEQ ID NO: 7805

SEQ ID NO: 7807 - protein, 72 aa, Homo sapiens; identical to SEQ ID NO: 7805

SEQ ID NO: 7808 - protein, 72 aa, Homo sapiens; identical to SEQ ID NO: 7805

SEQ ID NO: 7809 - protein, 72 aa, Homo sapiens; identical to SEQ ID NO: 7805

SEQ ID NO: 7810 - protein, 533 aa, Homo sapiens
MESERSKRMGNACIPLKRIAYFLCLLSALLLTEGKKPAKPKCPAVCTCTKDNALCENARSIPRTVPPDVISLLFTSNSFDVISDDAFIGLPHLEYLFIENNNIKSISRHTFRGLKSLIHLSLANNNLQTLPKDIFKGLDSLTNVDLRGNSFNCDCKLKWLVEWLGHTNATVEDIYCEGPPEYKKRKINSLSSKDFDCIITEFAKSQDLPYQSLSIDTFSYLNDEYVVIAQPFTGKCIFLEWDHVEKTFRNYDNITGTSTVVCKPIVIETQLYVIVAQLFGGSHIYKRDSFANKFIKIQDIEILKIRKPNDIETFKIENNWYFVVADSSKAGFTTIYKWNGNGFYSHQSLHAWYRDTDVEYLEIVRTPQTLRTPHLILSSSSQRPVIYQWNKATQLFTNQTDIPNMEDVYAVKHFSVKGDVYICLTRFIGDSKVMKWGGSSFQDIQRMPSRGSMVFQPLQINNYQYAILGSDYSFTQVYNWDAEKAKFVKFQELNVQAPRSFTHVSINKRNFLFASSFKGNTQIYKHVIVDLSA

SEQ ID NO: 7811 - protein, 96 aa, Homo sapiens
MESERSKRMGNACIPLKRIAYFLCLLSALLLTEGKKPAKPKCPAVCTCTKDNALCENARSIPRTVPPDVISLSFVRSGFTEISEGSFLFTPSLQLL

SEQ ID NO: 7812 - protein, 96 aa, Homo sapiens; identical to SEQ ID NO: 7811

SEQ ID NO: 7813 - protein, 236 aa, Homo sapiens
MESERSKRMGNACIPLKRIAYFLCLLSALLLTEGKKPAKPKCPAVCTCTKDNALCENARSIPRTVPPDVISLSFVRSGFTEISEGSFLFTPSLQLLLFTSNSFDVISDDAFIGLPHLEYLFIENNNIKSISRHTFRGLKSLIHLFRETQTQAENLHCRGAGAPQMAVGDAFLAAEPGGTETNAVFEPVWSALERRLSSGFHSHNRRFSWVNDENTKGQEMVIISVKKEWPSAFENT

SEQ ID NO: 7814 - protein, 151 aa, Homo sapiens
MESERSKRMGNACIPLKRIAYFLCLLSALLLTEGKKPAKPKCPAVCTCTKDNALCENARSIPRTVPPDVISLSFVRSGFTEISEGSFLFTPSLQLLLFTSNSFDVISDDAFIGLPHLEYLFIENNNIKSISRHTFRGLKSLIHLRDGVGRI

SEQ ID NO: 7815 - protein, 168 aa, Homo sapiens
MESERSKRMGNACIPLKRIAYFLCLLSALLLTEGKKPAKPKCPAVCTCTKDNALCENARSIPRTVPPDVISLSFVRSGFTEISEGSFLFTPSLQLLLFTSNSFDVISDDAFIGLPHLEYLFIENNNIKSISRHTFRGLKSLIHLSLANNNLQTLPKDIFKGLDSLTNV

SEQ ID NO: 7816 - protein, 168 aa, Homo sapiens; identical to SEQ ID NO: 7815

SEQ ID NO: 7817 - protein, 557 aa, Homo sapiens
MESERSKRMGNACIPLKRIAYFLCLLSALLLTEGKKPAKPKCPAVCTCTKDNALCENARSIPRTVPPDVISLSFVRSGFTEISEGSFLFTPSLQLLLFTSNSFDVISDDAFIGLPHLEYLFIENNNIKSISRHTFRGLKSLIHLSLANNNLQTLPKDIFKGLDSLTNVDLRGNSFNCDCKLKWLVEWLGHTNATVEDIYCEGPPEYKKRKINSLSSKDFDCIITEFAKSQDLPYQSLSIDTFSYLNDEYVVIAQPFTGKCIFLEWDHVEKTFRNYDNITGTSTVVCKPIVIETQLYVIVAQLFGGSHIYKRDSFANKFIKIQDIEILKIRKPNDIETFKIENNWYFVVADSSKAGFTTIYKWNGNGFYSHQSLHAWYRDTDVEYLEIVRTPQTLRTPHLILSSSSQRPVIYQWNKATQLFTNQTDIPNMEDVYAVKHFSVKGDVYICLTRFIGDSKVMKWGGSSFQDIQRMPSRGSMVFQPLQINNYQYAILGSDYSFTQVYNWDAEKAKFVKFQELNVQAPRSFTHVSINKRNFLFASSFKGNTQIYKHVIVDLSA

SEQ ID NO: 7818 - protein, 291 aa, Homo sapiens
MESERSKRMGNACIPLKRIAYFLCLLSALLLTEGKKPAKPKCPAVCTCTKDNALCENARSIPRTVPPDVISLSFVRSGFTEISEGSFLFTPSLQLLLFTSNSFDVISDDAFIGLPHLEYLFIENNNIKSISRHTFRGLKSLIHLSLANNNLQTLPKDIFKGLDSLTNVDLRGNSFNCDCKLKWLVEWLGHTNATVEDIYCEGPPEYKKRKINSLSSKDFDCIITEFAKSQDLPYQSLSIDTFSYLNDEYVVIAQPFTGKCIFLEWDHVEKTFRNYDNITVLREIHRFTNMS

SEQ ID NO: 7819 - protein, 287 aa, Homo sapiens
MESERSKRMGNACIPLKRIAYFLCLLSALLLTEGKKPAKPKCPAVCTCTKDNALCENARSIPRTVPPDVISLSFVRSGFTEISEGSFLFTPSLQLLLFTSNSFDVISDDAFIGLPHLEYLFIENNNIKSISRHTFRGLKSLIHLSLANNNLQTLPKDIFKGLDSLTNVDLRGNSFNCDCKLKWLVEWLGHTNATVEDIYCEGPPEYKKRKINSLSSKDFDCIITEFAKSQDLPYQSLSIDTFSYLNDEYVVIAQPFTGKCIFLEWDHVEKTFRNYDNITGQSCWCPQ

SEQ ID NO: 7820 - protein, 281 aa, Homo sapiens
MESERSKRMGNACIPLKRIAYFLCLLSALLLTEGKKPAKPKCPAVCTCTKDNALCENARSIPRTVPPDVISLSFVRSGFTEISEGSFLFTPSLQLLLFTSNSFDVISDDAFIGLPHLEYLFIENNNIKSISRHTFRGLKSLIHLSLANNNLQTLPKDIFKGLDSLTNVDLRGNSFNCDCKLKWLVEWLGHTNATVEDIYCEGPPEYKKRKINSLSSKDFDCIITEFAKSQDLPYQSLSIDTFSYLNDEYVVIAQPFTGKCIFLEWDHVEKTFRNYDNITGS

SEQ ID NO: 7821 - protein, 509 aa, Homo sapiens
MESERSKRMGNACIPLKRIAYFLCLLSALLLTEGKKPAKPKCPAVCTCTKDNALCENARSIPRTVPPDVISLSFVRSGFTEISEGSFLFTPSLQLLSLANNNLQTLPKDIFKGLDSLTNVDLRGNSFNCDCKLKWLVEWLGHTNATVEDIYCEGPPEYKKRKINSLSSKDFDCIITEFAKSQDLPYQSLSIDTFSYLNDEYVVIAQPFTGKCIFLEWDHVEKTFRNYDNITGTSTVVCKPIVIETQLYVIVAQLFGGSHIYKRDSFANKFIKIQDIEILKIRKPNDIETFKIENNWYFVVADSSKAGFTTIYKWNGNGFYSHQSLHAWYRDTDVEYLEIVRTPQTLRTPHLILSSSSQRPVIYQWNKATQLFTNQTDIPNMEDVYAVKHFSVKGDVYICLTRFIGDSKVMKWGGSSFQDIQRMPSRGSMVFQPLQINNYQYAILGSDYSFTQVYNWDAEKAKFVKFQELNVQAPRSFTHVSINKRNFLFASSFKGNTQIYKHVIVDLSA

SEQ ID NO: 7822 - protein, 100 aa, Homo sapiens
MKWGGSSFQDIQRMPSRGSMVFQPLQINNYQYAILGSDYSFTQVYNWDAEKAKFVKFQELNVQAPRSFTHVSINKRNFLFASSFKGNTQIYKHVIVDLSA

SEQ ID NO: 7823 - protein, 545 aa, Homo sapiens
MALRRGGCGALGLLLLLLGAACLIPRSAQVRRLARCPATCSCTKESIICVGSSWVPRIVPGDISSLSLVNGTFSEIKDRMFSHLPSLQLLLLNSNSFTIIRDDAFAGLFHLEYLFIEGNKIETISRNAFRGLRDLTHLSLANNHIKALPRDVFSDLDSLIELDLRGNKFECDCKAKWLYLWLKMTNSTVSDVLCIGPPEYQEKKLNDVTSFDYECTTTDFVVHQTLPYQSVSVDTFNSKNDVYVAIAQPSMENCMVLEWDHIEMNFRSYDNITGQSIVGCKAILIDDQVFVVVAQLFGGSHIYKYDESWTKFVKFQDIEVSRISKPNDIELFQIDDETFFVIADSSKAGLSTVYKWNSKGFYSYQSLHEWFRDTDAEFVDIDGKSHLILSSRSQVPIILQWNKSSKKFVPHGDIPNMEDVLAVKSFRMQNTLYLSLTRFIGDSRVMRWNSKQFVEIQALPSRGAMTLQPFSFKDNHYLALGSDYTFSQIYQWDKEKQLFKKFKEIYVQAPRSFTAVSTDRRDFFFASSFKGKTKIFEHIIVDLSL

SEQ ID NO: 7824 - protein, 256 aa, Homo sapiens
  SITE 1: note = misc_feature - Xaa can be any naturally occurring amino acid
XLGLLLLLLGAACLIPRSAQVRRLARCPATCSCTKESIICVGSSWVPRIVPGDISSLSLVNGTFSEIKDRMFSHLPSLQLLLLNSNSFTIIRDDAFAGLFHLEYLFIEGNKIETISRNAFRGLRDLTHLSLANNHIKALPRDVFSDLDSLIELDLRGNKFECDCKAKWLYLWLKMTNSTVSDVLCIGPPEYQEKKLNDVTSFDYECTTTDKQEEICEGKIQNLNARVVMNCSRPSSAFRKHTGNGRVAFFLPHGVR

SEQ ID NO: 7825 - protein, 134 aa, Homo sapiens
MAGLRARGGPGPGLLALSALGFCLMLQVSAKRPPKTPPCPPSCSCTRDTAFCVDSKAVPRNLPSEVISLTALADPTVLTRVSPQDPGECRLLRDPGWSVLPPPAAAVLVTQLQQVYTDWRQRLHRTVAPAVSLH

SEQ ID NO: 7826 - protein, 548 aa, Homo sapiens
MAGLRARGGPGPGLLALSALGFCLMLQVSAKRPPKTPPCPPSCSCTRDTAFCVDSKAVPRNLPSEVISLTLVNAAFSEIQDGAFSHLPLLQFLLLNSNKFTLIGDNAFTGLSHLQYLFIENNDIWALSKFTFRGLKSLTHLSLANNNLQTLPRDIFRPLDILNDLDLRGNSLNCDCKVKWLVEWLAHTNTTVAPIYCASPPRFQEHKVQDLPLREFDCITTDFVLYQTLAFPAVSAEPFLYSSDLYLALAQPGVSACTILKWDYVERQLRDYDRIPAPSAVHCKPMVVDSQLYVVVAQLFGGSYIYHWDPNTTRFTRLQDIDPQRVRKPNDLEAFRIDGDWYFAVADSSKAGATSLYRWHQNGFYSHQALHPWHRDTDLEFVDGEGKPRLIVSSSSQAPVIYQWSRTQKQFVAQGEVTQVPDAQAVKHFRAGRDSYLCLSRYIGDSKILRWEGTRFSEVQALPSRGSLALQPFLVGGRRYLALGSDFSFTQIYQWDEGRQKFVRFQELAVQAPRAFCYMPAGDAQLLLAPSFKGQTLVYRHIVVDLSA

SEQ ID NO: 7827 - protein, 524 aa, Homo sapiens
MAGLRARGGPGPGLLALSALGFCLMLQVSAKRPPKTPPCPPSCSCTRDTAFCVDSKAVPRNLPSEVISLTLVNAAFSEIQDGAFSHLPLLQFLLLNSNKFTLIGDNAFTGLSHLQYLSLANNNLQTLPRDIFRPLDILNDLDLRGNSLNCDCKVKWLVEWLAHTNTTVAPIYCASPPRFQEHKVQDLPLREFDCITTDFVLYQTLAFPAVSAEPFLYSSDLYLALAQPGVSACTILKWDYVERQLRDYDRIPAPSAVHCKPMVVDSQLYVVVAQLFGGSYIYHWDPNTTRFTRLQDIDPQRVRKPNDLEAFRIDGDWYFAVADSSKAGATSLYRWHQNGFYSHQALHPWHRDTDLEFVDGEGKPRLIVSSSSQAPVIYQWSRTQKQFVAQGEVTQVPDAQAVKHFRAGRDSYLCLSRYIGDSKILRWEGTRFSEVQALPSRGSLALQPFLVGGRRYLALGSDFSFTQIYQWDEGRQKFVRFQELAVQAPRAFCYMPAGDAQLLLAPSFKGQTLVYRHIVVDLSA

SEQ ID NO: 7828 - protein, 198 aa, Homo sapiens
MCPCRDRTLVNAAFSEIQDGAFSHLPLLQFLLLNSNKFTLIGDNAFTGLSHLQYLFIENNDIWALSKFTFRGLKSLTHLSLANNNLQTLPRDIFRPLDILNDLDLRGNSLNCDCKVKWLVEWLAHTNTTVAPIYCASPPRFQEHKVQDLPLREFDCITTDFVLYQTLAFPAVSAEPFLYSSDLYLALAQPGVSACTIL

SEQ ID NO: 7829 - protein, 537 aa, Homo sapiens
MGGAGILLLLLAGAGVVVAWRPPKGKCPLRCSCSKDSALCEGSPDLPVSFSPTLLSLSLVRTGVTQLKAGSFLRIPSLHLLLFTSNSFSVIEDDAFAGLSHLQYLFIEDNEIGSISKNALRGLRSLTHLSLANNHLETLPRFLFRGLDTLTHVDLRGNPFQCDCRVLWLLQWMPTVNASVGTGACAGPASLSHMQLHHLDPKTFKCRAIELSWFQTVGESALSVEPFSYQGEPHIVLAQPFAGRCLILSWDYSLQRFRPEEELPAASVVSCKPLVLGPSLFVLAARLWGGSQLWARPSPGLRLAPTQTLAPRRLLRPNDAELLWLEGQPCFVVADASKAGSTTLLCRDGPGFYPHQSLHAWHRDTDAEALELDGRPHLLLASASQRPVLFHWTGGRFERRTDIPEAEDVYATRHFQAGGDVFLCLTRYIGDSMVMRWDGSMFRLLQQLPSRGAHVFQPLLIARDQLAILGSDFAFSQVLRLEPDKGLLEPLQELGPPALVAPRAFAHITMAGRRFLFAACFKGPTQIYQHHEIDLSA

SEQ ID NO: 7830 - protein, 494 aa, Homo sapiens
MGGAGILLLLLAGAGVVVAWRPPKGKCPLRCSCSKDSALCEGSPDLPVSFSPTLLSLSLVRTGVTQLKAGSFLRIPSLHLLLFTSNSFSVIEDDAFAGLSHLQYLFIEDNEIGSISKNALRGLRSLTHLSLANNHLETLPRFLFRGLDTLTHVDLRGNPFQCDCRVLWLLQWMPTVNASVGTGACAGPASLSHMQLHHLDPKTFKCRAIELSWFQTVGESALSVEPFSYQGEPHIVLAQPFAGRCLILSWDYSLQRFRPEEELPGEPPPRPSACPAACLAGLTCLPTSPQRPPWCPASHWCWARASSCWLPACGGAHSCGPGPVPACAWPQRRPWPRGGCCGPMTPSSCGWKGNPASWWPMPPRRAAPRCCAATGPAFTRTRACTPGTGTRTLRPWSWTAGPTCCWPRLPSGPCSSTGPVAASRDAQTSPRPRMSMPHATSRLVGTCSCASHATLGTPWSCAGTAPCFVCCSNFPRAVPTSSSHCSSPGTSWPS

SEQ ID NO: 7831 - protein, 261 aa, Homo sapiens
MGGAGILLLLLAGAGVVVAWRPPKGKCPLRCSCSKDSALCEGSPDLPVSFSPTLLSLSLVRTGVTQLKAGSFLRIPSLHLLLFTSNSFSVIEDDAFAGLSHLQYLFIEDNEIGSISKNALRGLRSLTHLSLANNHLETLPRFLFRGLDTLTHVDLRGNPFQCDCRVLWLLQWMPTVNASVGTGACAGPASLSHMQLHHLDPKTFKCRAIGGGLSRWGGRREIWGKGCQGQEARLTPCPAISRSGKTLSKQHCLPEPQFSHL

SEQ ID NO: 7832 - protein, 378 aa, Homo sapiens
  SITE 1: note = misc_feature - Xaa can be any naturally occurring amino acid
XVIEDDAFAGLSHLQYLFIEDNEIGSISKNALRGLRSLTHLSLANNHLETLPRFLFRGLDTLTHVDLRGNPFQCDCRVLWLLQWMPTVNASVGTGACAGPASLSHMQLHHLDPKTFKCRAIELSWFQTVGESALSVEPFSYQGEPHIVLAQPFAGRCLILSWDYSLQRFRPEEELPAASVVSCKPLVLGPSLFVLAARLWGGSQLWARPSPGLRLAPTQTLAPRRLLRPNDAELLWLEGQPCFVVADASKAGSTTLLCRDGPGFYPHQSLHAWHRDTDAEALELDGRPHLLLASASQRPVLFHWTGGRFERRTDIPEAEDVYATRHFQAGGDVFLCLTRYIGDSMVRLGLGAGGWLFSTDPILHTKPLNSDLPSHADL

SEQ ID NO: 7833 - protein, 19 aa, Homo sapiens
MVWKVAVFLSVALGIGAVP

SEQ ID NO: 7834 - protein, 57 aa, Homo sapiens
MVWKVAVFLSVALGIGAVPIDDPEDGGKHWVVIVAGSNGWYNYRHQADACHAYQIIH

SEQ ID NO: 7835 - protein, 58 aa, Homo sapiens
MVWKVAVFLSVALGIGAVPIDDPEDGGKHWVVIVAGSNGWYNYRHQADACHAYQIIHR

SEQ ID NO: 7836 - protein, 135 aa, Homo sapiens
MVWKVAVFLSVALGIGAVPIDDPEDGGKHWVVIVAGSNGWYNYRHQADACHAYQIIHRNGIPDEQIVVMINPTPGIVINRPNGTDVYQGVPKDYTGEDVTPQNFLAVLRGDAEAVKGIGSGKVLKSGPQDHVFIY

SEQ ID NO: 7837 - protein, 78 aa, Homo sapiens
MVWKVAVFLSVALGIGAVPIDDPEDGGKHWVVIVAGSNGWYNYRHQADACHAYQIIHRNGIPDEQIVVMMYDDIAYSE

SEQ ID NO: 7838 - protein, 78 aa, Homo sapiens; identical to SEQ ID NO: 7837

SEQ ID NO: 7839 - protein, 223 aa, Homo sapiens
MVWKVAVFLSVALGIGAVPIDDPEDGGKHWVVIVAGSNGWYNYRHQADACHAYQIIHRNGIPDEQIVVMMYDDIAYSEDNPTPGIVINRPNGTDVYQGVPKDYTGEDVTPQNFLAVLRGDAEAVKGIGSGKVLKSGPQDHVFIYFTDHGSTGILVFPNEDLHVKDLNETIHYMYKHKMYRKMVFYIEACESGSMMNHLPDNINGRWLGRRPRPGLASRLLRHR

SEQ ID NO: 7840 - protein, 433 aa, Homo sapiens
MVWKVAVFLSVALGIGAVPIDDPEDGGKHWVVIVAGSNGWYNYRHQADACHAYQIIHRNGIPDEQIVVMMYDDIAYSEDNPTPGIVINRPNGTDVYQGVPKDYTGEDVTPQNFLAVLRGDAEAVKGIGSGKVLKSGPQDHVFIYFTDHGSTGILVFPNEDLHVKDLNETIHYMYKHKMYRKMVFYIEACESGSMMNHLPDNINVYATTAANPRESSYACYYDEKRSTYLGDWYSVNWMEDSDVEDLTKETLHKQYHLVKSHTNTSHVMQYGNKTISTMKVMQFQGMKRKASSPVPLPPVTHLDLTPSPDVPLTIMKRKLMNTNDLEESRQLTEEIQRHLDARHLIEKSVRKIVSLLAASEAEVEQLLSERAPLTGHSCYPEALLHFRTHCFNWHSPTYEYALRHLYVLVNLCEKPYPLHRIKLSMDHVCLGHY

SEQ ID NO: 7841 - protein, 433 aa, Homo sapiens; identical to SEQ ID NO: 7840

SEQ ID NO: 7842 - protein, 376 aa, Homo sapiens
MVWKVAVFLSVALGIGAVPIDDPEDGGKHWVVIVAGSNGWYNYRHQADACHAYQIIHRNGIPDEQIVVMMYDDIAYSEDNPTPGIVINRPNGTDVYQGVPKDYTGEDVTPQNFLAVLRGDAEAVKGIGSGKVLKSGPQDHVFIYFTDHGSTGILVFPNEDLHVKDLNETIHYMYKHKMYRKMVFYIEACESGSMMNHLPDNINVYATTAANPRESSYACYYDEKRSTYLGDWYSVNWMEDSDVEDLTKETLHKQYHLVKSHTNTSHVMQYGNKTISTMKVMQFQGMKRKASSPVPLPPVTHLDLTPSPDVPLTIMKRKLMNTNDLEESRQLTEEIQRHLDYEYALRHLYVLVNLCEKPYPLHRIKLSMDHVCLGHY

SEQ ID NO: 7843 - protein, 372 aa, Homo sapiens
MVWKVAVFLSVALGIGAVPIDDPEDGGKHWVVIVAGSNGWYNYRHQADACHAYQIIHRNGIPDEQIVVMMYDDIAYSEDNPTPGIVINRPNGTDVYQGVPKDYTGEDVTPQNFLAVLRGDAEAVKGIGSGKVLKSGPQDHVFIYFTDHGSTGILVFPNEDLHVKDLNETIHYMYKHKMYRKMVFYIEACESGSMMNHLPDNINVYATTAANPRESSYACYYDEKRSTYLGDWYSVNWMEDSDVEDLTKETLHKQYHLVKSHTNTSHVMQYGNKTISTMKVMQFQGMKRKASSPVPLPPVTHLDLTPSPDVPLTIMKRKLMNTNDLEESRQLTEEIQRHLDDKIVHGPRVPWSLLKSCLLEAFPSVSAPPTVC

SEQ ID NO: 7844 - protein, 117 aa, Homo sapiens
MVWKVAVFLSVALGIGAVPIDDPEDGGKHWVVIVAGSNGWYNYRHQADACHAYQIIHRNGIPDEQIVVMMYDDIAYSEDNPTPGIVINRPNGTDVYQGVPKDYTGEWPPGSRVHLLH

SEQ ID NO: 7845 - protein, 48 aa, Homo sapiens
MVWKVAVFLSVALGIGAVPIDDPEDGGKHWVVIVAGSNGWYNYRHQEL

SEQ ID NO: 7846 - protein, 91 aa, Homo sapiens
  SITE 1: note = misc_feature - Xaa can be any naturally occurring amino acid
XPTPGIVINRPNGTDVYQGVPKDYTGEDVTPQNFLAVLRGGVRSLRCSGPPGEPPLQGSLQDLLHKMTCSLLPASPVFSEKLQIRVGKALY

SEQ ID NO: 7847 - protein, 951 aa, Homo sapiens
MPGPLGLLCFLALGLLGSAGPSGAAPPLCAAPCSCDGDRRVDCSGKGLTAVPEGLSAFTQALDISMNNITQLPEDAFKNFPFLEELQLAGNDLSFIHPKALSGLKELKVLTLQNNQLKTVPSEAIRGLSALQSLRLDANHITSVPEDSFEGLVQLRHLWLDDNSLTEVPVHPLSNLPTLQALTLALNKISSIPDFAFTNLSSLVVLHLHNNKIRSLSQHCFDGLDNLETLDLNYNNLGEFPQAIKALPSLKELGFHSNSISVIPDGAFDGNPLLRTIHLYDNPLSFVGNSAFHNLSDLHSLVIRGASMVQQFPNLTGTVHLESLTLTGTKISSIPNNLCQEQKMLRTLDLSYNNIRDLPSFNGCHALEEISLQRNQIYQIKEGTFQGLISLRILDLSRNLIHEIHSRAFATLGPITNLDVSFNELTSFPTEGLNGLNQLKLVGNFKLKEALAAKDFVNLRSLSVPYAYQCCAFWGCDSYANLNTEDNSLQDHSVAQEKGTADAANVTSTLENEEHSQIIIHCTPSTGAFKPCEYLLGSWMIRLTVWFIFLVALFFNLLVILTTFASCTSLPSSKLFIGLISVSNLFMGIYTGILTFLDAVSWGRFAEFGIWWETGSGCKVAGFLAVFSSESAIFLLMLATVERSLSAKDIMKNGKSNHLKQFRVAALLAFLGATVAGCFPLFHRGEYSASPLCLPFPTGETPSLGFTVTLVLLNSLAFLLMAVIYTKLYCNLEKEDLSENSQSSMIKHVAWLIFTNCIFFCPVAFFSFAPLITAISISPEIMKSVTLIFFPLPACLNPVLYVFFNPKFKEDWKLLKRRVTKKSGSVSVSISSQGGCLEQDFYYDCGMYSHLQGNLTVCDCCESFLLTKPVSCKHLIKSHSCPALAVASCQRPEGYWSDCGTQSAHSDYADEEDSFVSDSSDQVQACGRACFYQSRGFPLVRYAYNLPRVKD

SEQ ID NO: 7848 - protein, 158 aa, Homo sapiens
MPGPLGLLCFLALGLLGSAGPSGAAPPLCAAPCSCDGDRRVDCSGKGLTAVPEGLSAFTQALDISMNNITQLPEDAFKNFPFLEELRLDANHITSVPEDSFEGLVQLRHLWLDDNSLTEVPVHPLSNLPTLQALTLALNKISSIPDFAFTNLSSLVVL

SEQ ID NO: 7849 - protein, 927 aa, Homo sapiens
MPGPLGLLCFLALGLLGSAGPSGAAPPLCAAPCSCDGDRRVDCSGKGLTAVPEGLSAFTQALQLAGNDLSFIHPKALSGLKELKVLTLQNNQLKTVPSEAIRGLSALQSLRLDANHITSVPEDSFEGLVQLRHLWLDDNSLTEVPVHPLSNLPTLQALTLALNKISSIPDFAFTNLSSLVVLHLHNNKIRSLSQHCFDGLDNLETLDLNYNNLGEFPQAIKALPSLKELGFHSNSISVIPDGAFDGNPLLRTIHLYDNPLSFVGNSAFHNLSDLHSLVIRGASMVQQFPNLTGTVHLESLTLTGTKISSIPNNLCQEQKMLRTLDLSYNNIRDLPSFNGCHALEEISLQRNQIYQIKEGTFQGLISLRILDLSRNLIHEIHSRAFATLGPITNLDVSFNELTSFPTEGLNGLNQLKLVGNFKLKEALAAKDFVNLRSLSVPYAYQCCAFWGCDSYANLNTEDNSLQDHSVAQEKGTADAANVTSTLENEEHSQIIIHCTPSTGAFKPCEYLLGSWMIRLTVWFIFLVALFFNLLVILTTFASCTSLPSSKLFIGLISVSNLFMGIYTGILTFLDAVSWGRFAEFGIWWETGSGCKVAGFLAVFSSESAIFLLMLATVERSLSAKDIMKNGKSNHLKQFRVAALLAFLGATVAGCFPLFHRGEYSASPLCLPFPTGETPSLGFTVTLVLLNSLAFLLMAVIYTKLYCNLEKEDLSENSQSSMIKHVAWLIFTNCIFFCPVAFFSFAPLITAISISPEIMKSVTLIFFPLPACLNPVLYVFFNPKFKEDWKLLKRRVTKKSGSVSVSISSQGGCLEQDFYYDCGMYSHLQGNLTVCDCCESFLLTKPVSCKHLIKSHSCPALAVASCQRPEGYWSDCGTQSAHSDYADEEDSFVSDSSDQVQACGRACFYQSRGFPLVRYAYNLPRVKD

SEQ ID NO: 7850 - protein, 141 aa, Homo sapiens
MEMLQGLLLLLLLSMGGAWASREPLRPWCHPINAILAVEKEGCPVCITVNTTICAGYCPTMMRVLQAVLPPLPQVVCTYRDVRFESIRLPGCPRGVDPVVSFPVALSCRCGPCRRSTSDCGGPKDHPLTCDHPQLSGLLFL

SEQ ID NO: 7851 - protein, 699 aa, Homo sapiens
MKQRFSALQLLKLLLLLQPPLPRALREALCPEPCNCVPDGALRCPGPTAGLTRLSLAYLPVKVIPSQAFRGLNEVIKIEISQIDSLERIEANAFDNLLNLSEILIQNTKNLRYIEPGAFINLPRLKYLSICNTGIRKFPDVTKVFSSESNFILEICDNLHITTIPGNAFQGMNNESVTLKLYGNGFEEVQSHAFNGTTLTSLELKENVHLEKMHNGAFRGATGPKTLDISSTKLQALPSYGLESIQRLIATSSYSLKKLPSRETFVNLLEATLTYPSHCCAFRNLPTKEQNFSHSISENFSKQCESTVRKVNNKTLYSSMLAESELSGWDYEYGFCLPKTPRCAPEPDAFNPCEDIMGYDFLRVLIWLINILAIMGNMTVLFVLLTSRYKLTVPRFLMCNLSFADFCMGLYLLLIASVDSQTKGQYYNHAIDWQTGSGCSTAGFFTVFASELSVYTLTVITLERWHTITYAIHLDQKLRLRHAILIMLGGWLFSSLIAMLPLVGVSNYMKVSICFPMDVETTLSQVYILTILILNVVAFFIICACYIKIYFAVRNPELMATNKDTKIAKKMAILIFTDFTCMAPISFFAISAAFKVPLITVTNSKVLLVLFYPINSCANPFLYAIFTKTFQRDFFLLLSKFGCCKRRAELYRRKDFSAYTSNCKNGFTGSNKPSQSTLKLSTLHCQGTALLDKTRYTEC

SEQ ID NO: 7852 - protein, 672 aa, Homo sapiens
MKQRFSALQLLKLLLLLQPPLPRALREALCPEPCNCVPDGALRCPGPTAGLTRLSLAYLPVKVIPSQAFRGLNEVIKIEISQIDSLERIEANAFDNLLNLSEILIQNTKNLRYIEPGAFINLPRLKYLSICNTGIRKFPDVTKVFSSESNFILEICDNLHITTIPGNAFQGMNNESVTLKLYGNGFEEVQSHAFNGTTLTSLELKENVHLEKMHNGAFRGATGPKTLDISSTKLQALPSYGLESIQRLIATSSYSLKKLPSRETFVNLLEATLTYPSHCCAFRNLPTKDYSSMLAESELSGWDYEYGFCLPKTPRCAPEPDAFNPCEDIMGYDFLRVLIWLINILAIMGNMTVLFVLLTSRYKLTVPRFLMCNLSFADFCMGLYLLLIASVDSQTKGQYYNHAIDWQTGSGCSTAGFFTVFASELSVYTLTVITLERWHTITYAIHLDQKLRLRHAILIMLGGWLFSSLIAMLPLVGVSNYMKVSICFPMDVETTLSQVYILTILILNVVAFFIICACYIKIYFAVRNPELMATNKDTKIAKKMAILIFTDFTCMAPISFFAISAAFKVPLITVTNSKVLLVLFYPINSCANPFLYAIFTKTFQRDFFLLLSKFGCCKRRAELYRRKDFSAYTSNCKNGFTGSNKPSQSTLKLSTLHCQGTALLDKTRYTEC

SEQ ID NO: 7853 - protein, 325 aa, Homo sapiens
MKQRFSALQLLKLLLLLQPPLPRALREALCPEPCNCVPDGALRCPGPTAGLTRLSLAYLPVKVIPSQAFRGLNEVIKIEISQIDSLERIEANAFDNLLNLSEILIQNTKNLRYIEPGAFINLPRLKYLSICNTGIRKFPDVTKVFSSESNFILEICDNLHITTIPGNAFQGMNNESVTLKLYGNGFEEVQSHAFNGTTLTSLELKENVHLEKMHNGAFRGATGPKTLDISSTKLQALPSYGLESIQRLIATSSYSLKKLPSRETFVNLLEATLTYPSHCCAFRNLPTKEQNFSHSISENFSKQCESTVRKVNNKTLSKPRINGYQ

SEQ ID NO: 7854 - protein, 329 aa, Homo sapiens
MKQRFSALQLLKLLLLLQPPLPRALREALCPEPCNCVPDGALRCPGPTAGLTRLSLAYLPVKVIPSQAFRGLNEVIKIEISQIDSLERIEANAFDNLLNLSEILIQNTKNLRYIEPGAFINLPRLKYLSICNTGIRKFPDVTKVFSSESNFILEICDNLHITTIPGNAFQGMNNESVTLKLYGNGFEEVQSHAFNGTTLTSLELKENVHLEKMHNGAFRGATGPKTLDISSTKLQALPSYGLESIQRLIATSSYSLKKLPSRETFVNLLEATLTYPSHCCAFRNLPTKEQNFSHSISENFSKQCESTVRKVNNKTLLLHGALSAAHSLS

SEQ ID NO: 7855 - protein, 175 aa, Homo sapiens
NCVPDGALRCPGPTAGLTRLSLAYLPVKVIPSQAFRGLNEVIKIEISQIDSLERIEANAFDNLLNLSEILIQNTKNLRYIEPGAFINLPRLKYLSICNTGIRKFPDVTKVFSSESNFILEICDNLHITTIPGNAFQGMNNESVTLPWQNCDEAIKELTLKEKRENMDWNDSEMKR

SEQ ID NO: 7856 - protein, 202 aa, Homo sapiens
MKVLAAGVVPLLLVLHWKHGAGSPLPITPVNATCAIRHPCHNNLMNQIRSQLAQLNGSANALFILYYTAQGEPFPNNLDKLCGPNVTDFPPFHANGTEKAKLVELYRIVVYLGTSLGNITRDQKILNPSALSLHSKLNATADILRGLLSNVLCRLCSKYHVGHVDVTYGPDTSGKDVFQKKKLGCQLLGKYKQIIAVLAQAF

SEQ ID NO: 7857 - protein, 88 aa, Homo sapiens
MKVLAAVHSPGGAVPQQPGQAMWPQRDGLPALPRQRHGEGQAGGAVPHSRVPWHLPGQHHPGPEDPQPQCPQPPQQAQRHRRHPARPP

SEQ ID NO: 7858 - protein, 75 aa, Homo sapiens
MMDIYVCLKRPSWMVDNKRMRTASNFQWLLSTFILLYLMNQVNSQKKGAPHDLKCVTNNLQVWNCSWKAPSGTGR

SEQ ID NO: 7859 - protein, 126 aa, Homo sapiens
MMDIYVCLKRPSWMVDNKRMRTASNFQWLLSTFILLYLMNQVNSQKKGAPHDLKCVTNNLQVWNCSWKAPSGTGRGTDYEVCIENRSRSCYQLEKTSIKIPALSHGDYEITINSLHDFGSSTSKFT

SEQ ID NO: 7860 - protein, 1097 aa, Homo sapiens
MMDIYVCLKRPSWMVDNKRMRTASNFQWLLSTFILLYLMNQVNSQKKGAPHDLKCVTNNLQVWNCSWKAPSGTGRGTDYEVCIENRSRSCYQLEKTSIKIPALSHGDYEITINSLHDFGSSTSKFTLNEQNVSLIPDTPEILNLSADFSTSTLYLKWNDRGSVFPHRSNVIWEIKVLRKESMELVKLVTHNTTLNGKDTLHHWSWASDMPLECAIHFVEIRCYIDNLHFSGLEEWSDWSPVKNISWIPDSQTKVFPQDKVILVGSDITFCCVSQEKVLSALIGHTNCPLIHLDGENVAIKIRNISVSASSGTNVVFTTEDNIFGTVIFAGYPPDTPQQLNCETHDLKEIICSWNPGRVTALVGPRATSYTLVESFSGKYVRLKRAEAPTNESYQLLFQMLPNQEIYNFTLNAHNPLGRSQSTILVNITEKVYPHTPTSFKVKDINSTAVKLSWHLPGNFAKINFLCEIEIKKSNSVQEQRNVTIKGVENSSYLVALDKLNPYTLYTFRIRCSTETFWKWSKWSNKKQHLTTEASPSKGPDTWREWSSDGKNLIIYWKPLPINEANGKILSYNVSCSSDEETQSLSEIPDPQHKAEIRLDKNDYIISVVAKNSVGSSPPSKIASMEIPNDDLKIEQVVGMGKGILLTWHYDPNMTCDYVIKWCNSSRSEPCLMDWRKVPSNSTETVIESDEFRPGIRYNFFLYGCRNQGYQLLRSMIGYIEELAPIVAPNFTVEDTSADSILVKWEDIPVEELRGFLRGYLFYFGKGERDTSKMRVLESGRSDIKVKNITDISQKTLRIADLQGKTSYHLVLRAYTDGGVGPEKSMYVVTKENSVGLIIAILIPVAVAVIVGVVTSILCYRKREWIKETFYPDIPNPENCKALQFQKSVCEGSSALKTLEMNPCTPNNVEVLETRSAFPKIEDTEIISPVAERPEDRSDAEPENHVVVSYCPPIIEEEIPNPAADEAGGTAQVIYIDVQSMYQPQAKPEEEQENDPVGGAGYKPQMHLPINSTVEDIAAEEDLDKTAGYRPQANVNTWNLVSPDSPRSIDSNSEIVSFGSPCSINSRQFLIPPKDEDSPKSNGGGWSFTNFFQNKPND

SEQ ID NO: 7861 - protein, 1097 aa, Homo sapiens; identical to SEQ ID NO: 7860

SEQ ID NO: 7862 - protein, 66 aa, Homo sapiens
  SITE 1: note = misc_feature - Xaa can be any naturally occurring amino acid
XWSNKKQHLTTEASPSKGPDTWREWSSDGKNLIIYWKMRKHSPFLKSLILSTKQRYDLIRMTTSSA

SEQ ID NO: 7863 - protein, 289 aa, Homo sapiens
MTPIVTVLICLRLSLGPRTHVQAGTLPKPTLWAEPGSVITQGSPVTLWCQGILETQEYRLYREKKTAPWITRIPQEIVKKGQFPIPSITWEHTGRYRCFYGSHTAGWSEPSDPLELVVTGAYIKPTLSALPSPVVTSGGNVTLHCVSQVAFGSFILCKEGEDEHPQCLNSQPRTHGWSRAIFSVGPVSPSRRWSYRCYAYDSNSPHVWSLPSDLLELLVLGAAETLSPPQNKSDSKAGAANTLSPSQNKTASHPQDYTVENLIRMGIAGLVLVVLGILLFEAQHSQRSL

SEQ ID NO: 7864 - protein, 489 aa, Homo sapiens
MTPIVTVLICLRLSLGPRTHVQAGTLPKPTLWAEPGSVITQGSPVTLWCQGILETQEYRLYREKKTAPWITRIPQEIVKKGQFPIPSITWEHTGRYRCFYGSHTAGWSEPSDPLELVVTGAYIKPTLSALPSPVVTSGGNVTLHCVSQVAFGSFILCKEGEDEHPQCLNSQPRTHGWSRAIFSVGPVSPSRRWSYRCYAYDSNSPHVWSLPSDLLELLVLGVSKKPSLSVQPGPIVAPGESLTLQCVSDVSYDRFVLYKEGERDFLQLPGPQPQAGLSQANFTLGPVSRSYGGQYRCSGAYNLSSEWSAPSDPLDILIAGQFRGRPFISVHPGPTVASGENVTLLCQSWGPFHTFLLTKAGAADAPLRLRSIHEYPKYQAEFPMSPVTSAHSGTYRCYGSLSSNPYLLSHPSDSLELMVSGAAETLSPPQNKSDSKAGAANTLSPSQNKTASHPQDYTVENLIRMGIAGLVLVVLGILLFEAQHSQRSL

SEQ ID NO: 7865 - protein, 454 aa, Homo sapiens
MTPILTVLICLGHLPKPTLWAEPGSVIIQGSPVTLRCQGSLQAEEYHLYRENKSASWVRRIQEPGKNGQFPIPSITWEHAGRYHCQYYSHNHSSEYSDPLELVVTGAYSKPTLSALPSPVVTSGGNVTLQCVSQVAFDGFILCKEGEDEHPQRLNSHSHARGWSWAIFSVGPVSPSRRWSYRCYAYDSNSPYVWSLPSDLLELLVPGVSKKPSLSVQPGPMVAPGESLTLQCVSDVGYDRFVLYKEGERDFLQRPGWQPQAGLSQANFTLGPVSPSHGGQYRCYSAHNLSSEWSAPSDPLDILITGQFYDRPSLSVQPVPTVAPGKNVTLLCQSRGQFHTFLLTKEGAGHPPLHLRSEHQAQQNQAEFRMGPVTSAHVGTYRCYSSLSSNPYLLSLPSDPLELVVSASLGQHPQDYTVENLIRMGVAGLVLVVLGILLFEAQHSQRSLQDAAGR

SEQ ID NO: 7866 - protein, 203 aa, Homo sapiens
MTPILTVLICLGLSLGPRTHVQAGHLPKPTLWAEPGSVIIQGSPVTLRCQGSLQAEEYHLYRENKSASWVRRIQEPGKNGQFPIPSITWEHAGRYHCQYYSHNHSSEHQAQQNQAEFRMGPVTSAHVGTYRCYSSLSSNPYLLSLPSDPLELVVSASLGQHPQDYTVENLIRMGVAGLVLVVLGILLFEAQHSQRSLQDAAGR

SEQ ID NO: 7867 - protein, 466 aa, Homo sapiens
MTPILTVLICLGLSLGPRTHVQAGHLPKPTLWAEPGSVIIQGSPVTLRCQGSLQAEEYHLYRENKSASWVRRIQEPGKNGQFPIPSITWEHAGRYHCQYYSHNHSSEYSDPLELVVTGAYSKPTLSALPSPVVTSGGNVTLQCVSQVAFDGFILCKEGEDEHPQRLNSHSHARGWSWAIFSVGPVSPSRRWSYRCYAYDSNSPYVWSLPSDLLELLVPGVSKKPSLSVQPGPMVAPGESLTLQCVSDVGYDRFVLYKEGERDFLQRPGWQPQAGLSQANFTLGPVSPSHGGQYRCYSAHNLSSEWSAPSDPLDILITGQFYDRPSLSVQPVPTVAPGKNVTLLCQSRGQFHTFLLTKEGAGHPPLHLRSEHQAQQNQAEFRMGPVTSAHVGTYRCYSSLSSNPYLLSLPSDPLELVVSASLGQHPQDYTVENLIRMGVAGLVLVVLGILLFEAQHSQRSLQDAAGR

SEQ ID NO: 7868 - protein, 483 aa, Homo sapiens
MTPILTVLICLGLSLGPRTHVQAGHLPKPTLWAEPGSVIIQGSPVTLRCQGSLQAEEYHLYRENKSASWVRRIQEPGKNGQFPIPSITWEHAGRYHCQYYSHNHSSEYSDPLELVVTGAYSKPTLSALPSPVVTSGGNVTLQCVSQVAFDGFILCKEGEDEHPQRLNSHSHARGWSWAIFSVGPVSPSRRWSYRCYAYDSNSPYVWSLPSDLLELLVPGVSKKPSLSVQPGPMVAPGESLTLQCVSDVGYDRFVLYKEGERDFLQRPGWQPQAGLSQANFTLGPVSPSHGGQYRCYSAHNLSSEWSAPSDPLDILITGQFYDRPSLSVQPVPTVAPGKNVTLLCQSRGQFHTFLLTKEGAGHPPLHLRSEHQAQQNQAEFRMGPVTSAHVGTYRCYSSLSSNPYLLSLPSDPLELVVSEAAETLSPSQNKTDSTTTSLGQHPQDYTVENLIRMGVAGLVLVVLGILLFEAQHSQRSLQDAAGR

SEQ ID NO: 7869 - protein, 483 aa, Homo sapiens; identical to SEQ ID NO: 7868

SEQ ID NO: 7870 - protein, 327 aa, Homo sapiens
MTPILTVLICLGLSLGPRTHVQAGHLPKPTLWAEPGSVIIQGSPVTLRCQGSLQAEEYHLYRENKSASWVRRIQEPGKNGQFPIPSITWEHAGRYHCQYYSHNHSSEYSDPLELVVTGAYSKPTLSALPSPVVTSGGNVTLQCVSQVAFDGFILCKEGEDEHPQRLNSHSHARGWSWAIFSVGPVSPSRRWSYRCYAYDSNSPYVWSLPSDLLELLVPGVSKKPSLSVQPGPMVAPGESLTLQCVSDVGYDRFVLYKEGERDFLQRPGWQPQAGLSQANFTLGPVSPSHGGQYRCYSAHNLSSEWSAPSDPLDILITGQFYDRPSLS

SEQ ID NO: 7871 - protein, 85 aa, Homo sapiens
  SITE 1: note = misc_feature - Xaa can be any naturally occurring amino acid
XSLPSDPLELVVSEPLSISPSPTPAGSLGHLKTREEAAWASVGSDCDEAGVHPRCAPLERSTPAVGAAHTAPPVLTWRPLCSGHP

SEQ ID NO: 7872 - protein, 158 aa, Homo sapiens
MTPALTALLCLGLSLGPRTRMQAGPFPKPTLWAEPGSVISWGSPVTIWCQGSLEAQEYQLDKEGSPEPWDRNNPLEPKNKARFSIPSMTQHHAGRYRCHYYSSAGWSEPSDPLELVMTGFYNKPTLSALPSPVVASGGNMTLRCGSQKGYHHFVLMKE

SEQ ID NO: 7873 - protein, 632 aa, Homo sapiens
MTPALTALLCLGLSLGPRTRMQAGPFPKPTLWAEPGSVISWGSPVTIWCQGSLEAQEYQLDKEGSPEPWDRNNPLEPKNKARFSIPSMTQHHAGRYRCHYYSSAGWSEPSDPLELVMTGFYNKPTLSALPSPVVASGGNMTLRCGSQKGYHHFVLMKEGEHQLPRTLDSQQLHSGGFQALFPVGPVTPSHRWRFTCYYYYTNTPWVWSHPSDPLEILPSGVSRKPSLLTLQGPVLAPGQSLTLQCGSDVGYDRFVLYKEGERDFLQRPGQQPQAGLSQANFTLGPVSRSYGGQYRCYGAHNLSSEWSAPSDPLDILITGQIYDTVSLSAQPGPTVASGENMTLLCQSRGYFDTFLLTKEGAAHPPLRLRSMYGAHKYQAEFPMSPVTSAHAGTYRCYGSRSSNPHLLSFPSEPLELMVSGHSGGSSLPPTGPPSTPGLGRYLEVLIGVSVAFVLLLFLLLFLLLLRQRHSKHRTSDQRKTDFQRPAGAAETEPKDRGLLRRSSPAADVQEENLYAAVKDTQSEDRVELDSQQSPHDEDPQAVTYAPVKHSSPRREMASPPSSLSGEFLDTKDRQVEEDRQMDTEAAASEASQDVTYAQLHSLTLRRKATEPPPSQEGEPPAEPSIYATLAIH

SEQ ID NO: 7874 - protein, 643 aa, Homo sapiens
MTPALTALLCLGLSLGPRTRMQAGPFPKPTLWAEPGSVISWGSPVTIWCQGSLEAQEYQLDKEGSPEPWDRNNPLEPKNKARFSIPSMTQHHAGRYRCHYYSSAGWSEPSDPLELVMTGFYNKPTLSALPSPVVASGGNMTLRCGSQKGYHHFVLMKEGEHQLPRTLDSQQLHSGGFQALFPVGPVTPSHRWRFTCYYYYTNTPWVWSHPSDPLEILPSGVSRKPSLLTLQGPVLAPGQSLTLQCGSDVGYDRFVLYKEGERDFLQRPGQQPQAGLSQANFTLGPVSRSYGGQYRCYGAHNLSSEWSAPSDPLDILITGQIYDTVSLSAQPGPTVASGENMTLLCQSRGYFDTFLLTKEGAAHPPLRLRSMYGAHKYQAEFPMSPVTSAHAGTYRCYGSRSSNPHLLSFPSEPLELMVSGPEDQPLNPPGSGPQNAPGLGSGAGTRAAGLGRYLEVLIGVSVAFVLLLFLLLFLLLLRQRHSKHRTSDQRKTDFQRPAGAAETEPKDRGLLRRSSPAADVQEENLYAAVKDTQSEDRVELDSQSPHDEDPQAVTYAPVKHSSPRREMASPPSSLSGEFLDTKDRQVEEDRQMDTEAAASEASQDVTYAQLHSLTLRRKATEPPPSQEGEPPAEPSIYATLAIH

SEQ ID NO: 7875 - protein, 631 aa, Homo sapiens
MTPALTALLCLGLSLGPRTRMQAGPFPKPTLWAEPGSVISWGSPVTIWCQGSLEAQEYQLDKEGSPEPWDRNNPLEPKNKARFSIPSMTQHHAGRYRCHYYSSAGWSEPSDPLELVMTGFYNKPTLSALPSPVVASGGNMTLRCGSQKGYHHFVLMKEGEHQLPRTLDSQQLHSGGFQALFPVGPVTPSHRWRFTCYYYYTNTPWVWSHPSDPLEILPSGVSRKPSLLTLQGPVLAPGQSLTLQCGSDVGYDRFVLYKEGERDFLQRPGQQPQAGLSQANFTLGPVSRSYGGQYRCYGAHNLSSEWSAPSDPLDILITGQIYDTVSLSAQPGPTVASGENMTLLCQSRGYFDTFLLTKEGAAHPPLRLRSMYGAHKYQAEFPMSPVTSAHAGTYRCYGSRSSNPHLLSFPSEPLELMVSGHSGGSSLPPTGPPSTPGLGRYLEVLIGVSVAFVLLLFLLLFLLLLRQRHSKHRTSDQRKTDFQRPAGAAETEPKDRGLLRRSSPAADVQEENLYAAVKDTQSEDRVELDSQSPHDEDPQAVTYAPVKHSSPRREMASPPSSLSGEFLDTKDRQVEEDRQMDTEAAASEASQDVTYAQLHSLTLRRKATEPPPSQEGEPPAEPSIYATLAIH

SEQ ID NO: 7876 - protein, 191 aa, Homo sapiens
MTPALTALLCLGLSLGPRTRMQAGPFPKPTLWAEPGSVISWGSPVTIWCQGSLEAQEYQLDKEGSPEPWDRNNPLEPKNKARFSIPSMTQHHAGRYRCHYYSSAGWSEPSDPLELVMTGFYNKPTLSALPSPVVASGGNMTLRCGSQKGYHHFVLMKEGEHQLPRTLDSQQLHSGGFQALFPVGPVTPSHS

SEQ ID NO: 7877 - protein, 253 aa, Homo sapiens [sequence omitted]

SEQ ID NO: 7878 - protein, 131 aa, Homo sapiens
MGLPVSWAPPALWVLGCCALLLSLWALCTACRRPEDAVAPRKRARRQRARLQGSATAAEAQVGHQTARAAPGPAQQQGPAACQHGSPAPTLAGGVQGHHRTAGSPLCLPTPGAAPGSAGSCSHRRVRWPRG

SEQ ID NO: 7879 - protein, 176 aa, Homo sapiens
MGLPVSWAPPALWVLGCCALLLSLWALCTACRRPEDAVAPRKRARRQRARLQGSATAAEAQVGHQTARAAPGPAQQQGPAACQHGSPAPTLAGGVQGHHRTAGSPLCLPTPGAAPGSAGSCSHRRVRWPRGHLFQRGAGGPSRGQPGGQPCGGRVCPRPEAQRDPSQSPRATAGED

SEQ ID NO: 7880 - protein, 107 aa, Homo sapiens
MGLPVSWAPPALWVLGCCALLLSLWALCTACRRPEDAVAPRKRARRQRARLQGSATAAEASLLRRTHLCSLSKSDTRLHELHRGPRSSRALRPASMDLLRPHWLEVS

SEQ ID NO: 7881 - protein, 295 aa, Homo sapiens
MGLPVSWAPPALWVLGCCALLLSLWALCTACRRPEDAVAPRKRARRQRARLQGSATAAEASLLRRTHLCSLSKSDTRLHELHRGPRSSRALRPASMDLLRPHWLEVSRDITGPQAAPSAFPHQELPRALPAAAATAGCAGLEATYSNVGLAALPGVSLAASPVVAEYARVQKRKGTHRSPQEPQQGKTEVTPAAQVDVLYSRVCKPKRRDPGPTTDPLDPKGQGAILALAGDLAYQTLPLRALDVDSGPLENVYESIRELGDPAGRSSTCGAGTPPASSCPSLGRGWRPLPASLP

SEQ ID NO: 7882 - protein, 211 aa, Homo sapiens
MGLPVSWAPPALWVLGCCALLLSLWALCTACRRPEDAVAPRKRARRQRARLQGSATAAEAVSARLSRGPGWGPQGTDQPSSPPVPTEADPPLLPQQVGHQTARAAPGPAQQQGPAACQHGSPAPTLAGGVQGHHRTAGSPLCLPTPGAAPGSAGSCSHRRVRWPRGHLFQRGAGGPSRGQPGGQPCGGRVCPRPEAQRDPSQSPRATAGED

SEQ ID NO: 7883 - protein, 4 aa, Homo sapiens
MLAG

SEQ ID NO: 7884 - protein, 12 aa, Homo sapiens
MLAGGVRSMPSP

SEQ ID NO: 7885 - protein, 19 aa, Homo sapiens
MLAGGVRSMPSPLLACWQP

SEQ ID NO: 7886 - protein, 35 aa, Homo sapiens
MLAGGVRSMPSPLLACWQPILLLVLGSVLSGSATG

SEQ ID NO: 7887 - protein, 55 aa, Homo sapiens
MLAGGVRSMPSPLLACWQPILLLVLGSVLSGSATGCPPRCECSAQDRAVLCHRKR

SEQ ID NO: 7888 - protein, 72 aa, Homo sapiens
MLAGGVRSMPSPLLACWQPILLLVLGSVLSGSATGCPPRCECSAQDRAVLCHRKRFVAVPEGIPTETRLLDL

SEQ ID NO: 7889 - protein, 125 aa, Homo sapiens
MLAGGVRSMPSPLLACWQPILLLVLGSVLSGSATGCPPRCECSAQDRAVLCHRKRFVAVPEGIPTETRLLDLGKNRIKTLNQDEFASFPHLEELELNENIVSAVEPGAFNNLFNLRTLGLRSNRL

SEQ ID NO: 7890 - protein, 179 aa, Homo sapiens
MLAGGVRSMPSPLLACWQPILLLVLGSVLSGSATGCPPRCECSAQDRAVLCHRKRFVAVPEGIPTETRLLDLGKNRIKTLNQDEFASFPHLEELELNENIVSAVEPGAFNNLFNLRTLGLRSNRLKLIPLGVFTGLSNLTKLDISENKIVILLDYMFQDLYNLKSLEVGDNDLVYISHR

SEQ ID NO: 7891 - protein, 614 aa, Homo sapiens
MLAGGVRSMPSPLLACWQPILLLVLGSVLSGSATGCPPRCECSAQDRAVLCHRKRFVAVPEGIPTETRLLDLGKNRIKTLNQDEFASFPHLEELELNENIVSAVEPGAFNNLFNLRTLGLRSNRLKLIPLGVFTGLSNLTKLDISENKIVILLDYMFQDLYNLKSLEVGDNDLVYISHRAFSGLNSLEQLTLEKCNLTSIPTEALSHLHGLIVLRLRHLNINAIRDYSFKRLYRLKVLEISHWPYLDTMTPNCLYGLNLTSLSITHCNLTAVPYLAVRHLVYLRFLNLSYNPISTIEGSMLHELLRLQEIQLVGGQLAVVEPYAFRGLNYLRVLNVSGNQLTTLEESVFHSVGNLETLILDSNPLACDCRLLWVFRRRWRLNFNRQQPTCATPEFVQGKEFKDFPDVLLPNYFTCRRARIRDRKAQQVFVDEGHTVQFVCRADGDPPPAILWLSPRKHLVSAKSNGRLTVFPDGTLEVRYAQVQDNGTYLCIAANAGGNDSMPAHLHVRSYSPDWPHQPNKTFAFISNQPGEGEANSTRATVPFPFDIKTLIIATTMGFISFLGVVLFCLVLLFLWSRGKGNTKHNIEIEYVPRKSDAGISSADAPRKFNMKMI

SEQ ID NO: 7892 - protein, 620 aa, Homo sapiens
MQVSKRMLAGGVRSMPSPLLACWQPILLLVLGSVLSGSATGCPPRCECSAQDRAVLCHRKRFVAVPEGIPTETRLLDLGKNRIKTLNQDEFASFPHLEELELNENIVSAVEPGAFNNLFNLRTLGLRSNRLKLIPLGVFTGLSNLTKLDISENKIVILLDYMFQDLYNLKSLEVGDNDLVYISHRAFSGLNSLEQLTLEKCNLTSIPTEALSHLHGLIVLRLRHLNINAIRDYSFKRLYRLKVLEISHWPYLDTMTPNCLYGLNLTSLSITHCNLTAVPYLAVRHLVYLRFLNLSYNPISTIEGSMLHELLRLQEIQLVGGQLAVVEPYAFRGLNYLRVLNVSGNQLTTLEESVFHSVGNLETLILDSNPLACDCRLLWVFRRRWRLNFNRQQPTCATPEFVQGKEFKDFPDVLLPNYFTCRRARIRDRKAQQVFVDEGHTVQFVCRADGDPPPAILWLSPRKHLVSAKSNGRLTVFPDGTLEVRYAQVQDNGTYLCIAANAGGNDSMPAHLHVRSYSPDWPHQPNKTFAFISNQPGEGEANSTRATVPFPFDIKTLIIATTMGFISFLGVVLFCLVLLFLWSRGKGNTKHNIEIEYVPRKSDAGISSADAPRKFNMKMI

SEQ ID NO: 7893 - protein, 326 aa, Homo sapiens
MVQLEQKVSKRMLAGGVRSMPSPLLACWQPILLLVLGSVLSGSATGCPPRCECSAQDRAVLCHRKRFVAVPEGIPTETRLLDLGKNRIKTLNQDEFASFPHLEELELNENIVSAVEPGAFNNLFNLRTLGLRSNRLKLIPLGVFTGLSNLTKLDISENKIVILLDYMFQDLYNLKSLEVGDNDLVYISHRAFSGLNSLEQLTLEKCNLTSIPTEALSHLHGLIVLRLRHLNINAIRDYSFKRLYRLKVLEISHWPYLDTMTPNCLYGLNLTSLSITHCNLTAVPYLAVRHLVYLRFLNLSYNPISTIEGSMLHELLRLQEIQLVGG

SEQ ID NO: 7894 - protein, 343 aa, Homo sapiens
MACLEFVPFDVQMCLEFLPSGPKPVVFLQHGLLADSSNWVTNLANSSLGFILADAGFDVWMGNSRGNTWSRKHKTLSVSQDEFWAFSYDEMAKYDLPASINFILNKTGQEQVYYVGHSQGTTIGFIAFSQIPELAKRIKMFFALGPVASVAFCTSPMAKLGRLPDHLIKDLFGDKEFLPQSAFLKWLGTHVCTHVILKELCGNLCFLLCGFNERNLNMSRVDVYTTHSPAGTSVQNMLHWSQAVKFQKFQAFDWGSSAKNYFHYNQSYPPTYNVKDMLVPTAVWSGGHDWLADVYDVNILLTQITNLVFHESIPEWEHLDFIWGLDAPWRLYNKIINLMRKYQ

SEQ ID NO: 7895 - protein, 283 aa, Homo sapiens
MGNSRGNTWSRKHKTLSVSQDEFWAFSYDEMAKYDLPASINFILNKTGQEQVYYVGHSQGTTIGFIAFSQIPELAKRIKMFFALGPVASVAFCTSPMAKLGRLPDHLIKDLFGDKEFLPQSAFLKWLGTHVCTHVILKELCGNLCFLLCGFNERNLNMSRVDVYTTHSPAGTSVQNMLHWSQAVKFQKFQAFDWGSSAKNYFHYNQSYPPTYNVKDMLVPTAVWSGGHDWLADVYDVNILLTQITNLVFHESIPEWEHLDFIWGLDAPWRLYNKIINLMRKYQ

SEQ ID NO: 7896 - protein, 219 aa, Homo sapiens
MKMRFLGLVVCLVLWTLHSEGSGGKLTAVDPETNMNVSEIISYWGFPSEEYLVETEDGYILCLNRIPHGRKNHSDKGPKPVVFLQHGLLADSSNWVTNLANSSLGFILADAGFDVWMGNSRGNTWSRKHKTLSVSQDEFWAFSYDEMAKYDLPASINFILNKTGQEQVYYVGHSQGTTIGFIAFSQIPELAKRIKMFFALGPVASVAFCTSPMAKLGRL

SEQ ID NO: 7897 - protein, 399 aa, Homo sapiens
MKMRFLGLVVCLVLWTLHSEGSGGKLTAVDPETNMNVSEIISYWGFPSEEYLVETEDGYILCLNRIPHGRKNHSDKGPKPVVFLQHGLLADSSNWVTNLANSSLGFILADAGFDVWMGNSRGNTWSRKHKTLSVSQDEFWAFSYDEMAKYDLPASINFILNKTGQEQVYYVGHSQGTTIGFIAFSQIPELAKRIKMFFALGPVASVAFCTSPMAKLGRLPDHLIKDLFGDKEFLPQSAFLKWLGTHVCTHVILKELCGNLCFLLCGFNERNLNMSRVDVYTTHSPAGTSVQNMLHWSQAVKFQKFQAFDWGSSAKNYFHYNQSYPPTYNVKDMLVPTAVWSGGHDWLADVYDVNILLTQITNLVFHESIPEWEHLDFIWGLDAPWRLYNKIINLMRKYQ

SEQ ID NO: 7898 - protein, 290 aa, Homo sapiens
MKMRFLGLVVCLVLWTLHSEGSGGKLTAVDPETNMNVSEIISYWGFPSEEYLVETEDGYILCLNRIPHGRKNHSDKGPKPVVFLQHGLLADSSNWVTNLANSSLGFILADAGFDVWMGNSRGNTWSRKHKTLSVSQDEFWAFSYDEMAKYDLPASINFILNKTGQEQVYYVGHSQGTTIGFIAFSQIPELAKRIKMFFALGPVASVAFCTSPMAKLGRLPDHLIKDLFGDKEFLPQSAFLKWLGTHVCTHVILKELCGNLCFLLCGFNERNLNMSRVDVYTTHSPAGTSV

SEQ ID NO: 7899 - protein, 438 aa, Homo sapiens
MDTSPLCFSILLVLCIFIQSSALGQSLKPEPFGRRAQAVETNKTLHEMKTRFLLFGETNQGCQIRINHPDTLQECGFNSSLPLVMIIHGWSESVQLSRSHVHLIGYSLGAHVSGFAGSSIGGTHKIGRITGLDAAGPLFEGSAPSNRLSPDDANFVDAIHTFTREHMGLSVGIKQPIGHYDFYPNGGSFQPGCHFLELYRHIAQHGFNAITQTIKCSHERSVHLFIDSLLHAGTQSMAYPCGDMNSFSQGLCLSCKKGRCNTLGYHVRQEPRSKSKRLFLVTRAQSPFKVYHYQFKIQFINQTETPIQTTFTMSLLGTKEKMQKIPITLGKGIASNKTYSFLITLDVDIGELIMIKFKWENSAVWANVWDTVQTIIPWSTGPRHSGLVLKTIRVKAGETQQRMTFCSENTDDLLLRPTQEKIFVKCEIKSKTSKRKIR

SEQ ID NO: 7900 - protein, 499 aa, Homo sapiens
MDTSPLCFSILLVLCIFIQSSALGQSLKPEPFGRRAQAVETNKTLHEMKTRFLLFGETNQGCQIRINHPDTLQECGFNSSLPLVMIIHGWSVDGVLENWIWQMVAALKSQPAQPVNVGLVDWITLAHDHYTIAVRNTRLVGKEVAALLRWLEESVQLSRSHVHLIGYSLGAHVSGFAGSSIGGTHKIGRITGLDAAGPLFEGSAPSNRLSPDDANFVDAIHTFTREHMGLSVGIKQPIGHYDFYPNGGSFQPGCHFLELYRHIAQHGFNAITQTIKCSHERSVHLFIDSLLHAGTQSMAYPCGDMNSFSQGLCLSCKKGRCNTLGYHVRQEPRSKSKRLFLVTRAQSPFKVYHYQFKIQFINQTETPIQTTFTMSLLGTKEKMQKIPITLGKGIASNKTYSFLITLDVDIGELIMIKFKWENSAVWANVWDTVQTIIPWSTGPRHSGLVLKTIRVKAGETQQRMTFCSENTDDLLLRPTQEKIFVKCEIKSKTSKRKIR

SEQ ID NO: 7901 - protein, 499 aa, Homo sapiens; identical to SEQ ID NO: 7900

SEQ ID NO: 7902 - protein, 499 aa, Homo sapiens
MDTSPLCFSILLVLCIFIQSSALGQSLKPEPFGRRAQAVETNKTLHEMKTRFLLFGETNQGCQIRINHPDTLQECGFNSSLPLVMIIHGWSVDGVLENWIWQMVAALKSQPAQPVNVGLVDWITLAHDHYTIAVRNTRLVGKEVAALLRWLEESVQLSRSHVHLIGYSLGAHVSGFAGSSIGGTHKIGRITGLDAAGPLFEGSAPSNRLSPDDANFVDAIHTFTREHMGLSVGIKQPIGHYDFYPNGGSFQPGCHFLELYRHIAQHGFNAITQTIKCSHERSVHLFIDSLLHAGTQSMAYPCGDMNSFSQGLCLSCKKGRCNTLGYHVRQEPRSKSKRLFLVTRAQSPFKVYHYQFKIQFINQTETPIQTTFTMSLLGTKEKMQKIPITLGKGIASNKTYSFLITLDVDIGELIMIKFKWENSAVWANVWDTVQTIIPWSTGPRHSGLVLKTIRVKAGETQQRSPNRINLGRLNCSLLFCTELFSHDSLAHWSSAASEL

SEQ ID NO: 7903 - protein, 375 aa, Homo sapiens
MFSNANSRSKMWLLLTMASLISVLGTTHGLFGKLHPGSPEVTMNISQMITYWGYPNEEYEVVTEDGYILEVNRIPYGKKNSGNTDAGYDVWLGNSRGNTWARRNLYYSPDSVEFWAFSFDEMAKYDLPATIDFIVKKTGQKQLHYVGHSQGTTIGFIAFSTNPSLAKRIKTFYALAPVATVKYTKSLINKLRFVPQSLFKFIFGDKIFYPHNFFDQFLATEVCSREMLNLLCSNALFIICGFDSKNFNTSRLDVYLSHNPAGTSVQNMFHWTQAVKSGKFQAYDWGSPVQNRMHYDQSQPPYYNVTAMNVPIAVWNGGKDLLADPQDVGLLLPKLPNLIYHKEIPFYNHLDFIWAMDAPQEVYNDIVSMISEDKK

SEQ ID NO: 7904 - protein, 408 aa, Homo sapiens
MFSNANSRSKMWLLLTMASLISVLGTTHGLFGKLHPGSPEVTMNISQMITYWGYPNEEYEVVTEDGYILEVNRIPYGKKNSGNTGQRPVVFLQHGLLASATNWISNLPNNSLAFILADAGYDVWLGNSRGNTWARRNLYYSPDSVEFWAFSFDEMAKYDLPATIDFIVKKTGQKQLHYVGHSQGTTIGFIAFSTNPSLAKRIKTFYALAPVATVKYTKSLINKLRFVPQSLFKFIFGDKIFYPHNFFDQFLATEVCSREMLNLLCSNALFIICGFDSKNFNTSRLDVYLSHNPAGTSVQNMFHWTQAVKSGKFQAYDWGSPVQNRMHYDQSQPPYYNVTAMNVPIAVWNGGKDLLADPQDVGLLLPKLPNLIYHKEIPFYNHLDFIWAMDAPQEVYNDIVSMISEDKK

SEQ ID NO: 7905 - protein, 365 aa, Homo sapiens
MWLLLTMASLISVLGTTHGLFGKLHPGSPEVTMNISQMITYWGYPNEEYEVVTEDGYILEVNRIPYGKKNSGNTDAGYDVWLGNSRGNTWARRNLYYSPDSVEFWAFSFDEMAKYDLPATIDFIVKKTGQKQLHYVGHSQGTTIGFIAFSTNPSLAKRIKTFYALAPVATVKYTKSLINKLRFVPQSLFKFIFGDKIFYPHNFFDQFLATEVCSREMLNLLCSNALFIICGFDSKNFNTSRLDVYLSHNPAGTSVQNMFHWTQAVKSGKFQAYDWGSPVQNRMHYDQSQPPYYNVTAMNVPIAVWNGGKDLLADPQDVGLLLPKLPNLIYHKEIPFYNHLDFIWAMDAPQEVYNDIVSMISEDKK

SEQ ID NO: 7906 - protein, 398 aa, Homo sapiens
MWLLLTMASLISVLGTTHGLFGKLHPGSPEVTMNISQMITYWGYPNEEYEVVTEDGYILEVNRIPYGKKNSGNTGQRPVVFLQHGLLASATNWISNLPNNSLAFILADAGYDVWLGNSRGNTWARRNLYYSPDSVEFWAFSFDEMAKYDLPATIDFIVKKTGQKQLHYVGHSQGTTIGFIAFSTNPSLAKRIKTFYALAPVATVKYTKSLINKLRFVPQSLFKFIFGDKIFYPHNFFDQFLATEVCSREMLNLLCSNALFIICGFDSKNFNTSRLDVYLSHNPAGTSVQNMFHWTQAVKSGKFQAYDWGSPVQNRMHYDQSQPPYYNVTAMNVPIAVWNGGKDLLADPQDVGLLLPKLPNLIYHKEIPFYNHLDFIWAMDAPQEVYNDIVSMISEDKK

SEQ ID NO: 7907 - protein, 188 aa, Homo sapiens
LCYCFAAGSPVPFGPEGRLEDKLHKPKATQTEVKPSVRFNLRTSKDPEHEGCYLSVGHSQPLEDCSFNMTAKTFFIIHGWTMSGIFENWLHKLVSALHTREKDANVVVVDWLPLAHQLYTDAVNNTRVVGHSIARMLDWLQVLGDERESPVTSRISNPIFLRNAGHASVAMNFWSLIKIFEIKSFIEL

SEQ ID NO: 7908 - protein, 390 aa, Homo sapiens
MLSFSRDRLPSGRRVSGKCPPPPLGMAVGRGGSGCPEEGSGRKLELLESQLPAERAREEAGPSVRRPRDKLHKPKATQTEVKPSVRFNLRTSKDPEHEGCYLSVGHSQPLEDCSFNMTAKTFFIIHGWTMSGIFENWLHKLVSALHTREKDANVVVVDWLPLAHQLYTDAVNNTRVVGHSIARMLDWLQEKDDFSLGNVHLIGYSLGAHVAGYAGNFVKGTVGRITGLDPAGPMFEGADIHKRLSPDDADFVDVLHTYTRSFGLSIGIQMPVGHIDIYPNGGDFQPGCGLNDVLGSIAYGTITEVVKCEHERAVHLFVDSLVNQDKPSFAFQCTDSNRFKKGICLSCRKNRCNSIGYNAKKMRNKRNSKMYLKTRAGMPFRGNLQSLECP

SEQ ID NO: 7909 - protein, 426 aa, Homo sapiens
MSNSVPLLCFWSLCYCFAAGSPVPFGPEGRLEDKLHKPKATQTEVKPSVRFNLRTSKDPEHEGCYLSVGHSQPLEDCSFNMTAKTFFIIHGWTMSGIFENWLHKLVSALHTREKDANVVVVDWLPLAHQLYTDAVNNTRVVGHSIARMLDWLQEKDDFSLGNVHLIGYSLGAHVAGYAGNFVKGTVGRITAITEVVKCEHERAVHLFVDSLVNQDKPSFAFQCTDSNRFKKGICLSCRKNRCNSIGYNAKKMRNKRNSKMYLKTRAGMPFRVYHYQMKIHVFSYKNMGEIEPTFYVTLYGTNADSQTLPLEIVERIEQNATNTFLVYTEEDLGDLLKIQLTWEGASQSWYNLWKEFRSYLSQPRNPGRELNIRRIRVKSGETQRKLTFCTEDPENTSISPGRELWFRKCRDGWRMKNETSPTVELP

SEQ ID NO: 7910 - protein, 500 aa, Homo sapiens
MSNSVPLLCFWSLCYCFAAGSPVPFGPEGRLEDKLHKPKATQTEVKPSVRFNLRTSKDPEHEGCYLSVGHSQPLEDCSFNMTAKTFFIIHGWTMSGIFENWLHKLVSALHTREKDANVVVVDWLPLAHQLYTDAVNNTRVVGHSIARMLDWLQEKDDFSLGNVHLIGYSLGAHVAGYAGNFVKGTVGRITGLDPAGPMFEGADIHKRLSPDDADFVDVLHTYTRSFGLSIGIQMPVGHIDIYPNGGDFQPGCGLNDVLGSIAYGTITEVVKCEHERAVHLFVDSLVNQDKPSFAFQCTDSNRFKKGICLSCRKNRCNSIGYNAKKMRNKRNSKMYLKTRAGMPFRVYHYQMKIHVFSYKNMGEIEPTFYVTLYGTNADSQTLPLEIVERIEQNATNTFLVYTEEDLGDLLKIQLTWEGASQSWYNLWKEFRSYLSQPRNPGRELNIRRIRVKSGETQRKLTFCTEDPENTSISPGRELWFRKCRDGWRMKNETSPTVELP

SEQ ID NO: 7911 - protein, 354 aa, Homo sapiens
MSNSVPLLCFWSLCYCFAAGSPVPFGPEGRLEDKLHKPKATQTEVKPSVRFNLRTSKDPEHEGCYLSVGHSQPLEDCSFNMTAKTFFIIHGWTMSGIFENWLHKLVSALHTREKDANVVVVDWLPLAHQLYTDAVNNTRVVGHSIARMLDWLQEKDDFSLGNVHLIGYSLGAHVAGYAGNFVKGTVGRITGLDPAGPMFEGADIHKRLSPDDADFVDVLHTYTRSFGLSIGIQMPVGHIDIYPNGGDFQPGCGLNDVLGSIAYGTITEVVKCEHERAVHLFVDSLVNQDKPSFAFQCTDSNRFKKGICLSCRKNRCNSIGYNAKKMRNKRNSKMYLKTRAGMPFRGNLQSLECP

SEQ ID NO: 7912 - protein, 24 aa, Homo sapiens
MTAKTFFIIHGWTMSGIFENWLHK

SEQ ID NO: 7913 - protein, 417 aa, Homo sapiens
MLRFYLFISLLCLSRSDAEETCPSFTRLSFHSAVVGTGLNVRLMLYTRKNLTCAQTINSSAFGNLNVTKKTTFIVHGFRPTGSPPVWMDDLVKGLLSVEDMNVVVVDWNRGATTLIYTHASSKTRKVAMVLKEFIDQMLAEGASLDDIYMIGVSLGAHISGFVGEMYDGWLGRITALGYKEPLGNIDFYPNGGLDQPGCPKTILGGFQYFKCDHQRSVYLYLSSLRESCTITAYPCDSYQDYRNGKCVSCGTSQKESCPLLGYYADNWKDHLRGKDPPMTKAFFDTAEESPFCMYHYFVDIITWNKNVRRGDITIKLRDKAGNTTESKINHEPTTFQKYHQVSLLARFNQDLDKVAAISLMFSTGSLIGPRYKLRILRMKLRSLAHPERPQLCRYDLVLMENVETVFQPILCPELQL

SEQ ID NO: 7914 - protein, 451 aa, Homo sapiens
MLRFYLFISLLCLSRSDAEETCPSFTRLSFHSAVVGTGLNVRLMLYTRKNLTCAQTINSSAFGNLNVTKKTTFIVHGFRPTGSPPVWMDDLVKGLLSVEDMNVVVVDWNRGATTLIYTHASSKTRKVAMVLKEFIDQMLAEGASLDDIYMIGVSLGAHISGFVGEMYDGWLGRITGLDPAGPLFNGKPHQDRLDPSDAQFVDVIHSDTDALGYKEPLGNIDFYPNGGLDQPGCPKTILGGFQYFKCDHQRSVYLYLSSLRESCTITAYPCDSYQDYRNGKCVSCGTSQKESCPLLGYYADNWKDHLRGKDPPMTKAFFDTAEESPFCMYHYFVDIITWNKNVRRGDITIKLRDKAGNTTESKINHEPTTFQKYHQVSLLARFNQDLDKVAAISLMFSTGSLIGPRYKLRILRMKLRSLAHPERPQLCRYDLVLMENVETVFQPILCPELQL

SEQ ID NO: 7915 - protein, 47 aa, Homo sapiens
MLRFYLFISLLCLSRSDASLDMNEESPLFEEGFLQSEIWEIKLIPPK

SEQ ID NO: 7916 - protein, 86 aa, Homo sapiens
  SITE 1: note = misc_feature - Xaa can be any naturally occurring amino acid
XDIYMIGVSLGAHISGFVGEMYDGWLGRITGFQYFKCDHQRSVYLYLSSLRESCTITAYPCDSYQDYRNGKCVSCGTSQKESCPLL

SEQ ID NO: 7917 - protein, 73 aa, Homo sapiens
  SITE 1: note = misc_feature - Xaa can be any naturally occurring amino acid
XSPFCMYHYFVDIITWNKNVRRGDITIKLRDKAGNTTESKINQISNRPKVQAQDSPNEVKVPCPSGEASAVSV

SEQ ID NO: 7918 - protein, 399 aa, Homo sapiens
MWQLLAAACWMLLLGSMYGYDKKGNNANPEANMNISQIISYWGYPYEEYDVTTKDGYILGIYRIPHGRGCPGRTAPKPAVYLQHGLIASASNWICNLPNNSLAFLLADSGYDVWLGNSRGNTWSRKHLKLSPKSPEYWAFSLDEMAKYDLPATINFIIEKTGQKRLYYVGHSQGTTIAFIAFSTNPELAKKIKIFFALAPVVTVKYTQSPMKKLTTLSRRVVKVLFGDKMFHPHTLFDQFIATKVCNRKLFRRICSNFLFTLSGFDPQNLNMSRLDVYLSHNPAGTSVQNMLHWAQAVNSGQLQAFDWGNSDQNMMHFHQLTPPLYNITKMEVPTAIWNGGQDIVADPKDVENLLPQIANLIYYKLIPHYNHVDFYLGEDAPQEIYQDLIILMEEYLQN

SEQ ID NO: 7919 - protein, 423 aa, Homo sapiens
MLETLSRQWIVSHRMEMWLLILVAYMFQRNVNSVHMPTKAVDPEAFMNISEIIQHQGYPCEEYEVATEDGYILSVNRIPRGLVQPKKTGSRPVVLLQHGLVGGASNWISNLPNNSLGFILADAGFDVWMGNSRGNAWSRKHKTLSIDQDEFWAFSYDEMARFDLPAVINFILQKTGQEKIYYVGYSQGTTMGFIAFSTMPELAQKIKMYFALAPIATVKHAKSPGTKFLLLPDMMIKGLFGKKEFLYQTRFLRQLVIYLCGQVILDQICSNIMLLLGGFNTNNMNMSRASVYAAHTLAGTSVQNILHWSQAVNSGELRAFDWGSETKNLEKCNQPTPVRYRVRDMTVPTAMWTGGQDWLSNPEDVKMLLSEVTNLIYHKNIPEWAHVDFIWGLDAPHRMYNEIIHLMQQEETNLSQGRCEAVL

SEQ ID NO: 7920 - protein, 383 aa, Homo sapiens
MTRPLDRKQSEIIQHQGYPCEEYEVATEDGYILSVNRIPRGLVQPKKTGSRPVVLLQHGLVGGASNWISNLPNNSLGFILADAGFDVWMGNSRGNAWSRKHKTLSIDQDEFWAFSYDEMARFDLPAVINFILQKTGQEKIYYVGYSQGTTMGFIAFSTMPELAQKIKMYFALAPIATVKHAKSPGTKFLLLPDMMIKGLFGKKEFLYQTRFLRQLVIYLCGQVILDQICSNIMLLLGGFNTNNMNMSRASVYAAHTLAGTSVQNILHWSQAVNSGELRAFDWGSETKNLEKCNQPTPVRYRVRDMTVPTAMWTGGQDWLSNPEDVKMLLSEVTNLIYHKNIPEWAHVDFIWGLDAPHRMYNEIIHLMQQEETNLSQGRCEAVL

SEQ ID NO: 7921 - protein, 398 aa, Homo sapiens
MMWLLLTTTCLICGTLNAGGFLDLENEVNPEVWMNTSEIIIYNGYPSEEYEVTTEDGYILLVNRIPYGRTHARSTGPRPVVYMQHALFADNAYWLENYANGSLGFLLADAGYDVWMGNSRGNTWSRRHKTLSETDEKFWAFSFDEMAKYDLPGVIDFIVNKTGQEKLYFIGHSLGTTIGFVAFSTMPELAQRIKMNFALGPTISFKYPTGIFTRFFLLPNSIIKAVFGTKGFFLEDKKTKIASTKICNNKILWLICSEFMSLWAGSNKKNMNQSRMDVYMSHAPTGSSVHNILHIKQLYHSDEFRAYDWGNDADNMKHYNQSHPPIYDLTAMKVPTAIWAGGHDVLVTPQDVARILPQIKSLHYFKLLPDWNHFDFVWGLDAPQRMYSEIIALMKAYS

SEQ ID NO: 7922 - protein, 288 aa, Homo sapiens
MAAEGWIWRWGWGRRCLGRPGLLGPGPGPTTPLFLLLLLGSVTADITDGNSEHLKREHSLIKPYQGVGSSSMPLWDFQGSTMLTSQYVRLTPDERSKEGSIWNHQPCFLKDWEMHVHFKVHGTGKKNLHGDGIALWYTRDRLVPDNFHGLAIFLDTYPNDETTERVFPYISVMVNNGSLSYDHSKDGRWTELAGCTADFRNRDHDTFLAVRYSRGRLTVMTDLEDKNEWKNCIDITGVRLPTGYYFGASAGTGDLSDNHDIISMKLFQLMVEHTPDEESIDWTKIEPS

SEQ ID NO: 7923 - protein, 203 aa, Homo sapiens
MAAEGWIWRWGWGRRCLGRPGLLGPGPGPTTPLFLLLLLGSVTADITDGNSEHLKREHSLIKPYQGVGSSSMPLWDFQGSTMLTSQYVRLTPDERSKEGSIWNHQPCFLKDWEMHVHFKVHGTGKKNLHGDGIALWYTRDRLVPGPVFGSKDNFHGLAIFLDTYPNDETTEHRLDQDRAQRQLPQVAQRQRGRPHGELPQRAP

SEQ ID NO: 7924 - protein, 356 aa, Homo sapiens
MAAEGWIWRWGWGRRCLGRPGLLGPGPGPTTPLFLLLLLGSVTADITDGNSEHLKREHSLIKPYQGVGSSSMPLWDFQGSTMLTSQYVRLTPDERSKEGSIWNHQPCFLKDWEMHVHFKVHGTGKKNLHGDGIALWYTRDRLVPGPVFGSKDNFHGLAIFLDTYPNDETTERVFPYISVMVNNGSLSYDHSKDGRWTELAGCTADFRNRDHDTFLAVRYSRGRLTVMTDLEDKNEWKNCIDITGVRLPTGYYFGASAGTGDLSDNHDIISMKLFQLMVEHTPDEESIDWTKIEPSVNFLKSPKDNVDDPTGNFRSGPLTGWRVFLLLLCALLGIVVCAVVGAVVFQKRQERNKRFY

SEQ ID NO: 7925 - protein, 325 aa, Homo sapiens
MAAEGWIWRWGWGRRCLGRPGLLGPGPGPTTPLFLLLLLGSVTADITDGNSEHLKREHSLIKPYQGVGSSSMPLWDFQGSTMLTSQYVRLTPDERSKEGSIWNHQPCFLKDWEMHVHFKVHGTGKKNLHGDGIALWYTRDRLVPGPVFGSKDNFHGLAIFLDTYPNDETTERVFPYISVMVNNGSLSYDHSKDGRWTELAGCTADFRNRDHDTFLAVRYSRGRLTVMTDLEDKNEWKNCIDITGVRLPTGYYFGASAGTGDLSDNHDIISMKLFQLMVEHTPDEESIDWTKIEPSVNFLKSPKAPPFLLPQTTWTTPRGTSAAGP

SEQ ID NO: 7926 - protein, 192 aa, Homo sapiens
MPLWDFQGSTMLTSQYVRLTPDERSKEGSIWNHQPCFLKDWEMHVHFKVHGTGKKNLHGDGIALWYTRDRLVPGPVFGSKDNFHGLAIFLDTYPNDETTERVFPYISVMVNNGSLSYDHSKDGRWTELAGCTADFRNRDHDTFLAVRYSRGRLTVMTDLEDKNEWKNCIDITGVRLPTGYYFGASAGTGDLS

SEQ ID NO: 7927 - protein, 144 aa, Homo sapiens
MAIGDHILQQNVNGQTISLYRFLPNIVMQANSTVTVWAAASEAKHQPPSDFLWKEQDKFRASPDCITILCKPNGQAIAWYTPIHWKQAWEKLDADVEFNRCSVVSPTFRKRVFQWTASTATITKEKQDQPKKDISNYQVEQAQV

SEQ ID NO: 7928 - protein, 291 aa, Homo sapiens
MIGDGEDYFLSLFGDSKKLTAHSNYTQKTLKYFSMILEEVGQFTSSSLGDVEIAEVNVKGLFVKLINSSLDKEMAIGDHILQQNVNGQTISLYRFLPNIVMQANSTVTVWAAASEAKHQPPSDFLWKEQDKFRASPDCITILCKPNGQAIAWYTPIHWKQAWEKLDADVEFNRCSVVSPTFRKRVFQWTASTATITKEKQDQPKKDISNYQVEQAQVLLKREKEIPPTVFPNRSPWCQNPYVSAHPYCPLIEPHNTSTAGGRLDRQPRTRSTRPNRASGSKKKKTSESQKQ

SEQ ID NO: 7929 - protein, 369 aa, Homo sapiens
MKDTQDIQEASKAMQNKVHEQEDKNEKQKQREDKLGVYSLVHFSPKMLGSVATTLPLSSSNSSGMPLGYYLSSPQISRVTISTTGQLTSKATVGSCSRVENSLDASPFSVPKKQDESPMIGDGEDYFLSLFGDSKKLTAHSNYTQKTLKYFSMILEEVGQFTSSSLGDVEIAEVNVKGLFVKLINSSLDKEMAIGDHILQQNVNGQTISLYRFLPNIVMQANSTVTAIAWYTPIHWKQAWEKLDADVEFNRCSVVSPTFRKRVFQWTASTATITKEKQDQPKKDISNYQVEQAQVLLKREKEIPPTVFPNRSPWCQNPYVSAHPYCPLIEPHNTSTAGGRLDRQPRTRSTRPNRASGSKKKKTSESQKQ

SEQ ID NO: 7930 - protein, 409 aa, Homo sapiens
MKDTQDIQEASKAMQNKVHEQEDKNEKQKQREDKLGVYSLVHFSPKMLGSVATTLPLSSSNSSGMPLGYYLSSPQISRVTISTTGQLTSKATVGSCSRVENSLDASPFSVPKKQDESPMIGDGEDYFLSLFGDSKKLTAHSNYTQKTLKYFSMILEEVGQFTSSSLGDVEIAEVNVKGLFVKLINSSLDKEMAIGDHILQQNVNGQTISLYRFLPNIVMQANSTVTVWAAASEAKHQPPSDFLWKEQDKFRASPDCITILCKPNGQAIAWYTPIHWKQAWEKLDADVEFNRCSVVSPTFRKRVFQWTASTATITKEKQDQPKKDISNYQVEQAQVLLKREKEIPPTVFPNRSPWCQNPYVSAHPYCPLIEPHNTSTAGGRLDRQPRTRSTRPNRASGSKKKKTSESQKQ

SEQ ID NO: 7931 - protein, 388 aa, Homo sapiens
MLEGSWINRREDKLGVYSLVHFSPKMLGSVATTLPLSSSNSSGMPLGYYLSSPQISRVTISTTGQLTSKATVGSCSRVENSLDASPFSVPKKQDESPMIGDGEDYFLSLFGDSKKLTAHSNYTQKTLKYFSMILEEVGQFTSSSLGDVEIAEVNVKGLFVKLINSSLDKEMAIGDHILQQNVNGQTISLYRFLPNIVMQANSTVTVWAAASEAKHQPPSDFLWKEQDKFRASPDCITILCKPNGQAIAWYTPIHWKQAWEKLDADVEFNRCSVVSPTFRKRVFQWTASTATITKEKQDQPKKDISNYQVEQAQVLLKREKEIPPTVFPNRSPWCQNPYVSAHPYCPLIEPHNTSTAGGRLDRQPRTRSTRPNRASGSKKKKTSESQKQ

SEQ ID NO: 7932 - protein, 72 aa, Homo sapiens
MLGSVATTLPLSSSNSSGMPLGYYLSSPQISRVTISTTGQLTSKATVGSCSRVENSLDASPFSVPKKQDESP

SEQ ID NO: 7933 - protein, 166 aa, Homo sapiens
MLGSVATTLPLSSSNSSGMPLGYYLSSPQISRVTISTTGQLTSKATVGSCSRVENSLDASPFSVPKKQDESPMIGDGEDYFLSLFGDSKKLTAHSNYTQKTLKYFSMILEEVGQFTSSSLGDVEIAEVNVKGLFVKLINSSLDKEMAIGDHILQQNVNGQTISLYR

SEQ ID NO: 7934 - protein, 170 aa, Homo sapiens
MLGSVATTLPLSSSNSSGMPLGYYLSSPQISRVTISTTGQLTSKATVGSCSRVENSLDASPFSVPKKQDESPMIGDGEDYFLSLFGDSKKLTAHSNYTQKTLKYFSMILEEVGQFTSSSLGDVEIAEVNVKGLFVKLINSSLDKEMAIGDHILQQNVNGQTISLYRFLPN

SEQ ID NO: 7935 - protein, 325 aa, Homo sapiens
MQQPVRAGDIGVSRVQTHHNASPFSVPKKQDESPMIGDGEDYFLSLFGDSKKLTAHSNYTQKTLKYFSMILEEVGQFTSSSLGDVEIAEVNVKGLFVKLINSSLDKEMAIGDHILQQNVNGQTISLYRFLPNIVMQANSTVTVWAAASEAKHQPPSDFLWKEQDKFRASPDCITILCKPNGQAIAWYTPIHWKQAWEKLDADVEFNRCSVVSPTFRKRVFQWTASTATITKEKQDQPKKDISNYQVEQAQVLLKREKEIPPTVFPNRSPWCQNPYVSAHPYCPLIEPHNTSTAGGRLDRQPRTRSTRPNRASGSKKKKTSESQKQ

SEQ ID NO: 7936 - protein, 105 aa, Homo sapiens
QWTASTATITKEKQDQPKKDISNYQVEQAQVLLKREKEIPPTVFPNRSPWCQNPYVSAHPYCPLIEPHNTSTAGGRLDRQPRTRSTRPNRASGSKKKKTSESQKQ

SEQ ID NO: 7937 - protein, 163 aa, Homo sapiens
  SITE 1: note = misc_feature - Xaa can be any naturally occurring amino acid
XDKFRASPDCITILCKPNGQAIAWYTPIHWKQAWEKLDADVEFNRCSVVSPTFRKRVFQWTASTATITKEKQDQPKKDISNYQVEQAQVLLKREKEIPPTVFPNRSPWCQNPYVSAHPYCPLIEPHNTSTAGGRLDRQPRTRSTRPNRASGSKKKKTSESQKQ

SEQ ID NO: 7938 - protein, 632 aa, Homo sapiens
MKALLLLVLPWLSPANYIDNVGNLHFLYSELCKGASHYGLTKDRKRRSQDGCPDGCASLTATAPSPEVSAAATISLMTDEPGLDNPAYVSSAEDGQPAISPVDSGRSNRTRARPFERSTIRSRSFKKINRALSVLRRTKSGSAVANHADQGRENSENTTAPEVFPRLYHLIPDGEITSIKINRVDPSESLSIRLVGGSETPLVHIIIQHIYRDGVIARDGRLLPGDIILKVNGMDISNVPHNYAVRLLRQPCQVLWLTVMREQKFRSRNNGQAPDAYRPRDDSFHVILNKSSPEEQLGIKLVRKVDEPGVFIFNVLDGGVAYRHGQLEENDRVLAINGHDLRYGSPESAAHLIQASERRVHLVVSRQVRQRSPDIFQEAGWNSNGSWSPGPGERSNTPKPLHPTITCHEKVVNIQKDPGESLGMTVAGGASHREWDLPIYVISVEPGGVISRDGRIKTGDILLNVDGVELTEVSRSEAVALLKRTSSSIVLKALEVKEYEPQEDCSSPAALDSNHNMAPPSDWSPSWVMWLELPRCLYNCKDIVLRRNTAGSLGFCIVGGYEEYNGNKPFFIKSIVEGTPAYNDGRIRCGDILLAVNGRSTSGMIHACLARLLKELKGRITLTIVSWPGTFL

SEQ ID NO: 7939 - protein, 6 aa, Homo sapiens
MNQPES

SEQ ID NO: 7940 - protein, 16 aa, Homo sapiens
MNQPESANDPEPLCAV

SEQ ID NO: 7941 - protein, 90 aa, Homo sapiens
MNQPESANDPEPLCAVCGQAHSLEENHFYSYPEEVDDDLICHICLQALLDPLDTPCGHTYCTLCLTNFLVEKDFCPMDRKPLVLQHCKKS

SEQ ID NO: 7942 - protein, 99 aa, Homo sapiens
MNQPESANDPEPLCAVCGQAHSLEENHFYSYPEEVDDDLICHICLQALLDPLDTPCGHTYCTLCLTNFLVEKDFCPMDRKPLVLQHCKKSSILVNKLLN

SEQ ID NO: 7943 - protein, 126 aa, Homo sapiens
MNQPESANDPEPLCAVCGQAHSLEENHFYSYPEEVDDDLICHICLQALLDPLDTPCGHTYCTLCLTNFLVEKDFCPMDRKPLVLQHCKKSSILVNKLLNKLLVTCPFREHCTQVLQRCDLEHHFQT

SEQ ID NO: 7944 - protein, 728 aa, Homo sapiens
MNQPESANDPEPLCAVCGQAHSLEENHFYSYPEEVDDDLICHICLQALLDPLDTPCGHTYCTLCLTNFLVEKDFCPMDRKPLVLQHCKKSSILVNKLLNKLLVTCPFREHCTQVLQRCDLEHHFQTSCKGASHYGLTKDRKRRSQDGCPDGCASLTATAPSPEVSAAATISLMTDEPGLDNPAYVSSAEDGQPAISPVDSGRSNRTRARPFERSTIRSRSFKKINRALSVLRRTKSGSAVANHADQGRENSENTTAPEVFPRLYHLIPDGEITSIKINRVDPSESLSIRLVGGSETPLVHIIIQHIYRDGVIARDGRLLPGDIILKVNGMDISNVPHNYAVRLLRQPCQVLWLTVMREQKFRSRNNGQAPDAYRPRDDSFHVILNKSSPEEQLGIKLVRKVDEPGVFIFNVLDGGVAYRHGQLEENDRVLAINGHDLRYGSPESAAHLIQASERRVHLVVSRQVRQRSPDIFQEAGWNSNGSWSPGPGERSNTPKPLHPTITCHEKVVNIQKDPGESLGMTVAGGASHREWDLPIYVISVEPGGVISRDGRIKTGDILLNVDGVELTEVSRSEAVALLKRTSSSIVLKALEVKEYEPQEDCSSPAALDSNHNMAPPSDWSPSWVMWLELPRCLYNCKDIVLRRNTAGSLGFCIVGGYEEYNGNKPFFIKSIVEGTPAYNDGRIRCGDILLAVNGRSTSGMIHACLARLLKELKGRITLTIVSWPGTFL

SEQ ID NO: 7945 - protein, 417 aa, Homo sapiens
MRFAWTVLLLGPLQLCALVHCAPPAAGQQQPPREPPAAPGAWRQQIQWENNGQVFSLLSLGSQYQPQRRRDPGAAVPGAANASAQQPRTPILLIRDNRTAAARTRTAGSSGVTAGRPRPTARHWFQAGYSTSRAREAGASRAENQTAPGEVPALSNLRPPSRVDGMVGDDPYNPYKYSDDNPYYNYYDTYERPRPGGRYRPGYGTGYFQYGLPDLVADPYYIQASTYVQKMSMYNLRCAAEENCLASTAYRADVRDYDHRVLLRFPQRVKNQGTSDFLPSRPRYSWEWHSCHQHYHSMDEFSHYDLLDANTQRRVAEGHKASFCLEDTSCDYGYHRRFACTAHTQGLSPGCYDTYGADIDCQWIDITDVKPGNYILKVSVNPSYLVPESDYTNNVVRCDIRYTGHHAYASGCTISPY

SEQ ID NO: 7946 - protein, 417 aa, Homo sapiens; identical to SEQ ID NO: 7945

SEQ ID NO: 7947 - protein, 61 aa, Homo sapiens
YNPYKYSDDNPYYNYYDTYERPRPGGRYRPGYGTGYFQYVQHTGQMSEIMITGCCSDFPKE

SEQ ID NO: 7948 - protein, 574 aa, Homo sapiens
MALARGSRQLGALVWGACLCVLVHGQQAQPGQGSDPARWRQLIQWENNGQVYSLLNSGSEYVPAGPQRSESSSRVLLAGAPQAQQRRSHGSPRRRQAPSLPLPGRVGSDTVRGQARHPFGFGQVPDNWREVAVGDSTGMARARTSVSQQRHGGSASSVSASAFASTYRQQPSYPQQFPYPQAPFVSQYENYDPASRTYDQGFVYYRPAGGGVGAGAAAVASAGVIYPYQPRARYEEYGGGEELPEYPPQGFYPAPERPYVPPPPPPPDGLDRRYSHSLYSEGTPGFEQAYPDPGPEAAQAHGGDPRLGWYPPYANPPPEAYGPPRALEPPYLPVRSSDTPPPGGERNGAQQGRLSVGSVYRPNQNGRGLPDLVPDPNYVQASTYVQRAHLYSLRCAAEEKCLASTAYAPEATDYDVRVLLRFPQRVKNQGTADFLPNRPRHTWEWHSCHQHYHSMDEFSHYDLLDAATGKKVAEGHKASFCLEDSTCDFGNLKRYACTSHTQGLSPGCYDTYNADIDCQWIDITDVQPGNYILKVHVNPKYIVLESDFTNNVVRCNIHYTGRYVSATNCKIVQS

SEQ ID NO: 7949 - protein, 431 aa, Homo sapiens
MALARGSRQLGALVWGACLCVLVHGQQAQPGQGSDPARWRQLIQWENNGQVYSLLNSGSEYVPAGPQRSESSSRVLLAGAPQAQQRRSHGSPRRRQAPSLPLPGRVGSDTVRGQARHPFGFGQVPDNWREVAVGDSTGMARARTSVSQQRHGGSASSVSASAFASTYRQQPSYPQQFPYPQAPFVSQYENYDPASRTYDQGFVYYRPAGGGVGAGAAAVASAGVIYPYQPRARYEEYGGGEELPEYPPQGFYPAPERPYVPPPPPPPDGLDRRYSHSLYSEGTPGFEQAYPDPGPEAAQAHGGDPRLGWYPPYANPPPEAYGPPRALEPPYLPVRSSDTPPPGGERNGAQQGRLSVGSVYRPNQNGRVTPAQTPACPGRKVEGQEQDGQAPGSGTSWGTRDHKDGGSLQTSPGRLTPGLAGERARASLRSP

SEQ ID NO: 7950 - protein, 258 aa, Homo sapiens
MEASKVLDKSKAAAIGDQSRPLCSRKGLSGGGSGGGPPWRARSQPGHCGSLKPKSSCCFCTPPVPPSCAGPLRGIISPKTGMERPLCSHLCSCLAMLALLSPLSLAQYDSWPHYPEYFQQPAPEYHQPQAPANVAKIQLRLAGQKRKHSEGRVEVYYDGQWGTVCDDDFSIHAAHVVCRELGYVEAKSWTASSSYGKGEGPIWLDNLHCTGNEATLAACTSNGWGVTDCKHTEDVGVVCSDKRIPGFKFDNSLINQIE

SEQ ID NO: 7951 - protein, 218 aa, Homo sapiens
MEASKVLDKSKAAESSCCFCTPPVPPSCAGPLRGIISPKTGMERPLCSHLCSCLAMLALLSPLSLAQYDSWPHYPEYFQQPAPEYHQPQAPANVAKIQLRLAGQKRKHSEGRVEVYYDGQWGTVCDDDFSIHAAHVVCRELGYVEAKSWTASSSYGKGEGPIWLDNLHCTGNEATLAACTSNGWGVTDCKHTEDVGVVCSDKRIPGFKFDNSLINQIE

SEQ ID NO: 7952 - protein, 101 aa, Homo sapiens
MERPLCSHLCSCLAMLALLSPLSLAQYDSWPHYPEYFQQPAPEYHQPQAPANVAKIQLHLVLARRCQQQQSGHEWSEVLGNGAVPGALPPRRGGRGLPPGR

SEQ ID NO: 7953 - protein, 96 aa, Homo sapiens
MERPLCSHLCSCLAMLALLSPLSLAQYDSWPHYPEYFQQPAPEYHQPQAPANVAKIQLRLAGQKRKHSEGRVEVYYDGQWGTVCDDDFSIHAAHVV

SEQ ID NO: 7954 - protein, 139 aa, Homo sapiens
MERPLCSHLCSCLAMLALLSPLSLAQYDSWPHYPEYFQQPAPEYHQPQAPANVAKIQLRLAGQKRKHSEGRVEVYYDGQWGTVCDDDFSIHAAHVVCRELGYVEAKSWTASSSYGKGEGPIWLDNLHCTGNEATLAACT

SEQ ID NO: 7955 - protein, 151 aa, Homo sapiens
MERPLCSHLCSCLAMLALLSPLSLAQYDSWPHYPEYFQQPAPEYHQPQAPANVAKIQLRLAGQKRKHSEGRVEVYYDGQWGTVCDDDFSIHAAHVVCRELGYVEAKSWTASSSYGKGEGPIWLDNLHCTGNEATLAACTSNGWGVTDCKHT

SEQ ID NO: 7956 - protein, 774 aa, Homo sapiens
MERPLCSHLCSCLAMLALLSPLSLAQYDSWPHYPEYFQQPAPEYHQPQAPANVAKIQLRLAGQKRKHSEGRVEVYYDGQWGTVCDDDFSIHAAHVVCRELGYVEAKSWTASSSYGKGEGPIWLDNLHCTGNEATLAACTSNGWGVTDCKHTEDVGVVCSDKRIPGFKFDNSLINQIENLNIQVEDIRIRAILSTYRKRTPVMEGYVEVKEGKTWKQICDKHWTAKNSRVVCGMFGFPGERTYNTKVYKMFASRRKQRYWPFSMDCTGTEAHISSCKLGPQVSLDPMKNVTCENGLPAVVSCVPGQVFSPDGPSRFRKAYKPEQPLVRLRGGAYIGEGRVEVLKNGEWGTVCDDKWDLVSASVVCRELGFGSAKEAVTGSRLGQGIGPIHLNEIQCTGNEKSIIDCKFNAESQGCNHEEDAGVRCNTPAMGLQKKLRLNGGRNPYEGRVEVLVERNGSLVWGMVCGQNWGIVEAMVVCRQLGLGFASNAFQETWYWHGDVNSNKVVMSGVKCSGTELSLAHCRHDGEDVACPQGGVQYGAGVACSETAPDLVLNAEMVQQTTYLEDRPMFMLQCAMEENCLSASAAQTDPTTGYRRLLRFSSQIHNNGQSDFRPKNGRHAWIWHDCHRHYHSMEVFTHYDLLNLNGTKVAEGHKASFCLEDTECEGDIQKNYECANFGDQGITMGCWDMYRHDIDCQWVDITDVPPGDYLFQVVINPNFEVAESDYSNNIMKCRSRYDGHRIWMYNCHIGGSFSEETEKKFEHFSGLLNNQLSPQ

SEQ ID NO: 7957 - protein, 67 aa, Homo sapiens
RIRAILSTYRKRTPVMEGYVEVKEGKTWKQICDKHWTAKNSRVVCGMFGFPGERTYNTKVYNNPWCD

SEQ ID NO: 7958 - protein, 207 aa, Homo sapiens
  SITE 1: note = misc_feature - Xaa can be any naturally occurring amino acid
XENGLPAVVSCVPGQVFSPDGPSRFRKAYKPEQDRVSLQQPLVRLRGGAYIGEGRVEVLKNGEWGTVCDDKWDLVSASVVCRELGFGSAKEAVTGSRLGQGIGPIHLNEIQCTGNEKSIIDCKFNAESQGCNHEEDAGVRCNTPAMGLQKKLRLNGGRNPYEGRVEVLVERNGSLVWGMVCGQNWGIVEAMVVCRQLGLGFASNAFQ

SEQ ID NO: 7959 - protein, 586 aa, Homo sapiens
MRPVSVWQWSPWGLLLCLLCSSCLGSPSPSTGPEKKAGSQGLRFRLAGFPRKPYEGRVEIQRAGEWGTICDDDFTLQAAHILCRELGFTEATGWTHSAKYGPGTGRIWLDNLSCSGTEQSVTECASRGWGNSDCTHDEDAGVICKDQRLPGFSDSNVIEARVRLKGGAHPGEGRVEVLKASTWGTVCDRKWDLHAASVVCRELGFGSAREALSGARMGQGMGAIHLSEVRCSGQELSLWKCPHKNITAEDCSHSQDAGVRCNLPYTGAETRIRLSGGRSQHEGRVEVQIGGPGPLRWGLICGDDWGTLEAMVACRQLGLGYANHGLQETWYWDSGNITEVVMSGVRCTGTELSLDQCAHHGTHITCKRTGTRFTAGVICSETASDLLLHSALVQETAYIEDRPLHMLYCAAEENCLASSARSANWPYGHRRLLRFSSQIHNLGRADFRPKAGRHSWVWHECHGHYHSMDIFTHYDILTPNGTKVAEGHKASFCLEDTECQEDVSKRYECANFGEQGITVGCWDLYRHDIDCQWIDITDVKPGNYILQVVINPNFEVAESDFTNNAMKCNCKYDGHRIWVHNCHIGI

SEQ ID NO: 7960 - protein, 608 aa, Homo sapiens
MRPVSVWQWSPWGLLLCLLCSSCLGSPSPSTGPEKKAGSQGLRFRLAGFPRKPYEGRVEIQRAGEWGTICDDDFTLQAAHILCRELGFTEATGWTHSAKYGPGTGRIWLDNLSCSGTEQSVTECASRGWGNSDCTHDEDAGVICKDQRLPGFSDSNVIEARVRLKGGAHPGEGRVEVLKASTWGTVCDRKWDLHAASVVCRELGFGSAREALSGARMGQGMGAIHLSEVRCSGQELSLWKCPHKNITAEDCSHSQDAGVRCNLPYTGAETRIRLSGGRSQHEGRVEVQIGGPGPLRWGLICGDDWGTLEAMVACRQLGLGYANHGLQETWYWDSGNITEVVMSGVRCTGTELSLDQCAHHGTHITCKRTGTRFTAGVICSETASDLLLHSALVQETAYIEDRPLHMLYCAAEENCLASSARSANWPYGHRRLLRFSSQIHNLGRADFRPKAGRHSWVWHECHGHYHSMDIFTHYDILTPNGTKVAEGHKASFCLEDTECQEDVSKRYECANFGEQGITVGCWDLYRHDIDCQWIDITDVKPGNYILQVVINPNFEVAESDFTNNAMKCNCKYDGHRIWVHNCHIGDAFSEEANRRFERYPGQTSNQII

SEQ ID NO: 7961 - protein, 753 aa, Homo sapiens
MRPVSVWQWSPWGLLLCLLCSSCLGSPSPSTGPEKKAGSQGLRFRLAGFPRKPYEGRVEIQRAGEWGTICDDDFTLQAAHILCRELGFTEATGWTHSAKYGPGTGRIWLDNLSCSGTEQSVTECASRGWGNSDCTHDEDAGVICKDQRLPGFSDSNVIEVEHHLQVEEVRIRPAVGWGRRPLPVTEGLVEVRLPDGWSQVCDKGWSAHNSHVVCGMLGFPSEKRVNAAFYRLLAQRQQHSFGLHGVACVGTEAHLSLCSLEFYRANDTARCPGGGPAVVSCVPGPVYAASSGQKKQQQSKPQGEARVRLKGGAHPGEGRVEVLKASTWGTVCDRKWDLHAASVVCRELGFGSAREALSGARMGQGMGAIHLSEVRCSGQELSLWKCPHKNITAEDCSHSQDAGVRCNLPYTGAETRIRLSGGRSQHEGRVEVQIGGPGPLRWGLICGDDWGTLEAMVACRQLGLGYANHGLQETWYWDSGNITEVVMSGVRCTGTELSLDQCAHHGTHITCKRTGTRFTAGVICSETASDLLLHSALVQETAYIEDRPLHMLYCAAEENCLASSARSANWPYGHRRLLRFSSQIHNLGRADFRPKAGRHSWVWHECHGHYHSMDIFTHYDILTPNGTKVAEGHKASFCLEDTECQEDVSKRYECANFGEQGITVGCWDLYRHDIDCQWIDITDVKPGNYILQVVINPNFEVAESDFTNNAMKCNCKYDGHRIWVHNCHIGDAFSEEANRRFERYPGQTSNQII

SEQ ID NO: 7962 - protein, 303 aa, Homo sapiens
MRPVSVWQWSPWGLLLCLLCSSCLGSPSPSTGPEKKAGSQGLRFRLAGFPRKPYEGRVEIQRAGEWGTICDDDFTLQAAHILCRELGFTEATGWTHSAKYGPGTGRIWLDNLSCSGTEQSVTECASRGWGNSDCTHDEDAGVICKDQRLPGFSDSNVIEVEHHLQVEEVRIRPAVGWGRRPLPVTEGLVEVRLPDGWSQVCDKGWSAHNSHVVCGMLGFPSEKRVNAAFYRLLAQRQQHSFGLHGVACVGTEAHLSLCSLEFYRANDTARCPGGGPAVVSCVPGPVYAASSGQKKQQQSKPQG

SEQ ID NO: 7963 - protein, 471 aa, Homo sapiens
MRPVSVWQWSPWGLLLCLLCSSCLGSPSPSTGPEKKAGSQGLRFRLAGFPRKPYEGRVEIQRAGEWGTICDDDFTLQAAHILCRELGFTEATGWTHSAKYGPGTGRIWLDNLSCSGTEQSVTECASRGWGNSDCTHDEDAGVICKDQRLPGFSDSNVIEVEHHLQVEEVRIRPAVGWGRRPLPVTEGLVEVRLPDGWSQVCDKGWSAHNSHVVCGMLGFPSEKRVNAAFYRLLAQRQQHSFGLHGVACVGTEAHLSLCSLEFYRANDTARCPGGGPAVVSCVPGPVYAASSGQKKQQQSKPQGEARVRLKGGAHPGEGRVEVLKASTWGTVCDRKWDLHAASVVCRELGFGSAREALSGARMGQDVSKRYECANFGEQGITVGCWDLYRHDIDCQWIDITDVKPGNYILQVVINPNFEVAESDFTNNAMKCNCKYDGHRIWVHNCHIGDAFSEEANRRFERYPGQTSNQII

SEQ ID NO: 7964 - protein, 697 aa, Homo sapiens
MRPVSVWQWSPWGLLLCLLCSSCLGSPSPSTGPEKKAGSQGLRFRLAGFPRKPYEGRVEIQRAGEWGTICDDDFTLQAAHILCRELGFTEATGWTHSAKYGPGTGRIWLDNLSCSGTEQSVTECASRGWGNSDCTHDEDAGVICKDQRLPGFSDSNVIEVEHHLQVEEVRIRPAVGWGRRPLPVTEGLVEVRLPDGWSQVCDKGWSAHNSHVVCGMLGFPSEKRVNAAFYRLLAQRQQHSFGLHGVACVGTEAHLSLCSLEFYRANDTARCPGGGPAVVSCVPGPVYAASSGQKKQQQSKPQGEARVRLKGGAHPGEGRVEVLKASTWGTVCDRKWDLHAASVVCRELGFGSAREALSGARMGQGMGAIHLSEVRCSGQELSLWKCPHKNITAEDCSHSQDAGVRCNLPYTGAETRETWYWDSGNITEVVMSGVRCTGTELSLDQCAHHGTHITCKRTGTRFTAGVICSETASDLLLHSALVQETAYIEDRPLHMLYCAAEENCLASSARSANWPYGHRRLLRFSSQIHNLGRADFRPKAGRHSWVWHECHGHYHSMDIFTHYDILTPNGTKVAEGHKASFCLEDTECQEDVSKRYECANFGEQGITVGCWDLYRHDIDCQWIDITDVKPGNYILQVVINPNFEVAESDFTNNAMKCNCKYDGHRIWVHNCHIGDAFSEEANRRFERYPGQTSNQII

SEQ ID NO: 7965 - protein, 180 aa, Homo sapiens
  SITE 1: note = misc_feature - Xaa can be any naturally occurring amino acid
XRQRLERPQQPRGLRDAGLPQRKEGQRGLLQARVRLKGGAHPGEGRVEVLKASTWGTVCDRKWDLHAASVVCRELGFGSAREALSGARMGQGMGAIHLSEVRCSGQELSLWKCPHKNITAEDCSHSQDAGVRCNLPYTGAETRIRLSGGRSQHEGRVEVQIGGPGPLRWGLICGDDWGTL

SEQ ID NO: 7966 - protein, 756 aa, Homo sapiens
MAWSPPATLFLFLLLLGQPPPSRPQSLGTTKLRLVGPESKPEEGRLEVLHQGQWGTVCDDNFAIQEATVACRQLGFEAALTWAHSAKYGQGEGPIWLDNVRCVGTESSLDQCGSNGWGVSDCSHSEDVGVICHPRRHRGYLSETVSNALGPQGRRLEEVRLKPILASAKQHSPVTEGAVEVKYEGHWRQVCDQGWTMNNSRVVCGMLGFPSEVPVDSHYYRKVWDLKMRDPKSRLKSLTNKNSFWIHQVTCLGTEPHMANCQVQVAPARGKLRPACPGGMHAVVSCVAGPHFRPPKTKPQRKGSWAEEPRVRLRSGAQVGEGRVEVLMNRQWGTVCDHRWNLISASVVCRQLGFGSAREALFGARLGQGLGPIHLSEVRCRGYERTLSDCPALEGSQNGCQHENDAAVRCNVPNMGFQNQVRLAGGRIPEEGLLEVQVEVNGVPRWGSVCSENWGLTEAMVACRQLGLGFAIHAYKETWFWSGTPRAQEVVMSGVRCSGTELALQQCQRHGPVHCSHGGGRFLAGVSCMDSAPDLVMNAQLVQETAYLEDRPLSQLYCAHEENCLSKSADHMDWPYGYRRLLRFSTQIYNLGRTDFRPKTGRDSWVWHQCHRHYHSIEVFTHYDLLTLNGSKVAEGHKASFCLEDTNCPTGLQRRYACANFGEQGVTVGCWDTYRHDIDCQWVDITDVGPGNYIFQVIVNPHYEVAESDFSNNMLQCRCKYDGHRVWLHNCHTGNSYPANAELSLEQEQRLRNNLI

SEQ ID NO: 7967 - protein, 2040 aa, Homo sapiens
MEHKEVVLLLLLFLKSAAPEQSHVVQDCYHGDGQSYRGTYSTTVTGRTCQAWSSMTPHQHNRTTENYPNAGLIMNYCRNPDAVAAPYCYTRDPGVRWEYCNLTQCSDAEGTAVAPPTVTPVPSLEAPSEQAPTEQRPGVQECYHGNGQSYRGTYSTTVTGRTCQAWSSMTPHSHSRTPEYYPNAGLIMNYCRNPDAVAAPYCYTRDPGVRWEYCNLTQCSDAEGTAVAPPTVTPVPSLEAPSEQAPTEQRPGVQECYHGNGQSYRGTYSTTVTGRTCQAWSSMTPHSHSRTPEYYPNAGLIMNYCRNPDAVAAPYCYTRDPGVRWEYCNLTQCSDAEGTAVAPPTVTPVPSLEAPSEQAPTEQRPGVQECYHGNGQSYRGTYSTTVTGRTCQAWSSMTPHSHSRTPEYYPNAGLIMNYCRNPDAVAAPYCYTRDPGVRWEYCNLTQCSDAEGTAVAPPTVTPVPSLEAPSEQAPTEQRPGVQECYHGNGQSYRGTYSTTVTGRTCQAWSSMTPHSHSRTPEYYPNAGLIMNYCRNPDAVAAPYCYTRDPGVRWEYCNLTQCSDAEGTAVAPPTVTPVPSLEAPSEQAPTEQRPGVQECYHGNGQSYRGTYSTTVTGRTCQAWSSMTPHSHSRTPEYYPNAGLIMNYCRNPDAVAAPYCYTRDPGVRWEYCNLTQCSDAEGTAVAPPTVTPVPSLEAPSEQAPTEQRPGVQECYHGNGQSYRGTYSTTVTGRTCQAWSSMTPHSHSRTPEYYPNAGLIMNYCRNPDAVAAPYCYTRDPGVRWEYCNLTQCSDAEGTAVAPPTVTPVPSLEAPSEQAPTEQRPGVQECYHGNGQSYRGTYSTTVTGRTCQAWSSMTPHSHSRTPEYYPNAGLIMNYCRNPDPVAAPYCYTRDPSVRWEYCNLTQCSDAEGTAVAPPTITPIPSLEAPSEQAPTEQRPGVQECYHGNGQSYQGTYFITVTGRTCQAWSSMTPHSHSRTPAYYPNAGLIKNYCRNPDPVAAPWCYTTDPSVRWEYCNLTRCSDAEWTAFVPPNVILAPSLEAFFEQALTEETPGVQDCYYHYGQSYRGTYSTTVTGRTCQAWSSMTPHQHSRTPENYPNAGLTRNYCRNPDAEIRPWCYTMDPSVRWEYCNLTQCLVTESSVLATLTVVPDPSTEASSEEAPTEQSPGVQDCYHGDGQSYRGSFSTTVTGRTCQSWSSMTPHWHQRTTEYYPNGGLTRNYCRNPDAEISPWCYTMDPNVRWEYCNLTQCPVTESSVLATSTAVSEQAPTEQSPTVQDCYHGDGQSYRGSFSTTVTGRTCQSWSSMTPHWHQRTTEYYPNGGLTRNYCRNPDAEIRPWCYTMDPSVRWEYCNLTQCPVMESTLLTTPTVVPVPSTELPSEEAPTENSTGVQDCYRGDGQSYRGTLSTTITGRTCQSWSSMTPHWHRRIPLYYPNAGLTRNYCRNPDAEIRPWCYTMDPSVRWEYCNLTRCPVTESSVLTTPTVAPVPSTEAPSEQAPPEKSPVVQDCYHGDGRSYRGISSTTVTGRTCQSWSSMIPHWHQRTPENYPNAGLTENYCRNPDSGKQPWCYTTDPCVRWEYCNLTQCSETESGVLETPTVVPVPSMEAHSEAAPTEQTPVVRQCYHGNGQSYRGTFSTTVTGRTCQSWSSMTPHRHQRTPENYPNDGLTMNYCRNPDADTGPWCFTMDPSIRWEYCNLTRCSDTEGTVVAPPTVIQVPSLGPPSEQDCMFGNGKGYRGKKATTVTGTPCQEWAAQEPHRHSTFIPGTNKWAGLEKNYCRNPDGDINGPWCYTMNPRKLFDYCDIPLCASSSFDCGKPQVEPKKCPGSIVGGCVAHPHSWPWQVSLRTRFGKHFCGGTLISPEWVLTAAHCLKKSSRPSSYKVILGAHQEVNLESHVQEIEVSRLFLEPTQADIALLKLSRPAVITDKVMPACLPSPDYMVTARTECYITGWGETQGTFGTGLLKEAQLLVIENEVCNHYKYICAEHLARGTDSCQGDSGGPLVCFEKDKYILQGVTSWGLGCARPNKPGVYARVSRFVTWIEGMMRNN

SEQ ID NO: 7968 - protein, 571 aa, Homo sapiens
SGLIMNYCRNPDAVAAPYCYTRDPGVRWEYCNLTQCSDAEGTAVAPPTVTPVPSLEAPSEQAPTEQRPGVQECYHGNGQSYRGTYSTTVTGRTCQAWSSMTPHSHSRTPEYYPNAGLIMNYCRNPDAVAAPYCYTRDPGVRWEYCNLTQCSDAEGTAVAPPTVTPVPSLEAPSEQAPTEQRPGVQECYHGNGQSYRGTYSTTVTGRTCQAWSSMTPHSHSRTPEYYPNAGLIMNYCRNPDAVAAPYCYTRDPGVRWEYCNLTQCSDAEGTAVAPPTVTPVPSLEAPSEQAPTEQRPGVQECYHGNGQSYRGTYSTTVTGRTCQAWSSMTPHSHSRTPEYYPNAGLIMNYCRNPDAVAAPYCYTRDPGVRWEYCNLTQCSDAEGTAVAPPTVTPVPSLEAPSEQAPTEQRPGVQECYHGNGQSYRGTYSTTVTGRTCQAWSSMTPHSHSRTPEYYPNAGLIMNYCRNPDAVAAPYCYTRDPGVRWEYCNLTQCSDAEGTAVAPPTVTPVPSLEAPSEQAPTEQRPGVQECYHGNGQSYRGTYSTTVTGRTCQAWSSMTPHSHSRTPEYYPNA

SEQ ID NO: 7969 - protein, 613 aa, Homo sapiens
SGLIMNYCRNPDAVAAPYCYTRDPGVRWEYCNLTQCSDAEGTAVAPPTVTPVPSLEAPSEQAPTEQRPGVQECYHGNGQSYRGTYSTTVTGRTCQAWSSMTPHSHSRTPEYYPNAGLIMNYCRNPDPVAAPYCYTRDPSVRWEYCNLTQCSDAEGTAVAPPTITPIPSLEAPSEQAPTEQRPGVQECYHGNGQSYQGTYFITVTGRTCQAWSSMTPHSHSRTPAYYPNAGLIKNYCRNPDPVAAPWCYTTDPSVRWEYCNLTRCSDAEWTAFVPPNVILAPSLEAFFEQALTEETPGVQDCYYHYGQSYRGTYSTTVTGRTCQAWSSMTPHQHSRTPENYPNAGLTRNYCRNPDAEIRPWCYTMDPSVRWEYCNLTQCLVTESSVLATLTVVPDPSTEASSEEAPTEQSPGVQDCYHGDGQSYRGSFSTTVTGRTCQSWSSMTPHWHQRTTEYYPNGGLTRNYCRNPDAEISPWCYTMDPNVRWEYCNLTQCPVTESSVLATSTAVSEQAPTEQSPTVQDCYHGDGQSYRGSFSTTVTGRTCQSWSSMTPHWHQRTTEYYPNGGLTRNYCRNPDAEIRPWCYTMDPSVRWEYCNLTQCPVMESTLLTTPTVVP

SEQ ID NO: 7970 - protein, 39 aa, Homo sapiens
MESKALLVLTLAVWLQSLTASRGGVAAADLILKLQIFKF

SEQ ID NO: 7971 - protein, 106 aa, Homo sapiens
MESKALLVLTLAVWLQSLTASRGGVAAADQRRDFIDIESKFALRTPEDTAEDTCHLIPGVAESVATCHFNHSSKTFMVIHGWTVTGMYESWVPKLVAALYKREPDS

SEQ ID NO: 7972 - protein, 130 aa, Homo sapiens
MESKALLVLTLAVWLQSLTASRGGVAAADQRRDFIDIESKFALRTPEDTAEDTCHLIPGVAESVATCHFNHSSKTFMVIHGWTVTGMYESWVPKLVAALYKREPDSNVIVVDWLSRAQEHYPVSAGYTKL

SEQ ID NO: 7973 - protein, 475 aa, Homo sapiens
MESKALLVLTLAVWLQSLTASRGGVAAADQRRDFIDIESKFALRTPEDTAEDTCHLIPGVAESVATCHFNHSSKTFMVIHGWTVTGMYESWVPKLVAALYKREPDSNVIVVDWLSRAQEHYPVSAGYTKLVGQDVARFINWMEEEFNYPLDNVHLLGYSLGAHAAGIAGSLTNKKVNRITGLDPAGPNFEYAEAPSRLSPDDADFVDVLHTFTRGSPGRSIGIQKPVGHVDIYPNGGTFQPGCNIGEAIRVIAERGLGDVDQLVKCSHERSIHLFIDSLLNEENPSKAYRCSSKEAFEKGLCLSCRKNRCNNLGYEINKVRAKRSSKMYLKTRSQMPYKVFHYQVKIHFSGTESETHTNQAFEISLYGTVAESENIPFTLPEVSTNKTYSFLIYTEVDIGELLMLKLKWKSDSYFSWSDWWSSPGFAIQKIRVKAGETQKKVIFCSREKVSHLQKGKAPAVFVKCHDKSLNKKSG

SEQ ID NO: 7974 - protein, 115 aa, Homo sapiens
MVIHGWTVTGMYESWVPKLVAALYKREPDSNVIVVDWLSRAQEHYPVSAGYTKLVGQDVARFINWMEEEFNYPLDNVHLLGYSLGAHAAGIAGSLTNKKVNRITGLDPAGPNFEY

SEQ ID NO: 7975 - protein, 117 aa, Homo sapiens
FPPNDPKAGTQGKCMPFFRAGFVCPTPPYKSLAREQINALTSFLDASFVYSSEPSLASRLRNLSSPLGLMAVNQEVSDHGLPYLPYDSKKPSPCEFINTTARVPCFLAGKETEAQKC

SEQ ID NO: 7976 - protein, 95 aa, Homo sapiens
GCGAPAPVVRCDPCSPYRTITGDCNNRRKPALGAANRALARWLPAEYEDGLSLPFGWTPGKTRNGFPLPLAREVSNKIVGYLNEEGVLDQNRSTL

SEQ ID NO: 7977 - protein, 712 aa, Homo sapiens
MRVLLHLPALLASLILLQAAASTTRAQTTRTSAISDTVSQAKVQVNKAFLDSRTRLKTAMSSETPTSRQLSEYLKHAKGRTRTAIRNGQVWEESLKRLRQKASLTNVTDPSLDLTSLSLEVGCGAPAPVVRCDPCSPYRTITGDCNNRRKPALGAANRALARWLPAEYEDGLSLPFGWTPGKTRNGFPLPLAREVSNKIVGYLNEEGVLDQNRSLLFMQWGQIVDHDLDFAPDTELGSSEYSKAQCDEYCIQGDNCFPIMFPPNDPKAGTQGKCMPFFRAGFVCPTPPYKSLAREQINALTSFLDASFVYSSEPSLASRLRNLSSPLGLMAVNQEVSDHGLPYLPYDSKKPSPCEFINTTARVPCFLAGDSRASEHILLATSHTLFLREHNRLARELKRLNPQWDGEKLYQEARKILGAFVQIITFRDYLPILLGDHMQKWIPPYQGYSESVDPRISNVFTFAFRFGHLEVPSSMFRLDENYQPWGPEPELPLHTLFFNTWRMVKDGGIDPLVRGLLAKKSKLMKQNKMMTGELRNKLFQPTHRIHGFDLAAINTQRCRDHGQPGYNSWRAFCDLSQPQTLEELNTVLKSKMLAKKLLGLYGTPDNIDIWIGAIAEPLVERGRVGPLLACLLGKQFQQIRDGDRFWWENPGVFTNEQKDSLQKMSFSRLVCDNTRITKVPRDPFWANSYPYDFVDCSAIDKLDLSPWASVKN

SEQ ID NO: 7978 - protein, 629 aa, Homo sapiens
MRVLLHLPALLASLILLQAAASTTRDPSLDLTSLSLEVGCGAPAPVVRCDPCSPYRTITGDCNNRRKPALGAANRALARWLPAEYEDGLSLPFGWTPGKTRNGFPLPLAREVSNKIVGYLNEEGVLDQNRSLLFMQWGQIVDHDLDFAPDTELGSSEYSKAQCDEYCIQGDNCFPIMFPPNDPKAGTQGKCMPFFRAGFVCPTPPYKSLAREQINALTSFLDASFVYSSEPSLASRLRNLSSPLGLMAVNQEVSDHGLPYLPYDSKKPSPCEFINTTARVPCFLAGDSRASEHILLATSHTLFLREHNRLARELKRLNPQWDGEKLYQEARKILGAFVQIITFRDYLPILLGDHMQKWIPPYQGYSESVDPRISNVFTFAFRFGHLEVPSSMFRLDENYQPWGPEPELPLHTLFFNTWRMVKDGGIDPLVRGLLAKKSKLMKQNKMMTGELRNKLFQPTHRIHGFDLAAINTQRCRDHGQPGYNSWRAFCDLSQPQTLEELNTVLKSKMLAKKLLGLYGTPDNIDIWIGAIAEPLVERGRVGPLLACLLGKQFQQIRDGDRFWWENPGVFTNEQKDSLQKMSFSRLVCDNTRITKVPRDPFWANSYPYDFVDCSAIDKLDLSPWASVKN

SEQ ID NO: 7979 - protein, 629 aa, Homo sapiens; identical to SEQ ID NO: 7978

SEQ ID NO: 7980 - protein, 123 aa, Homo sapiens
MSSETPTSRQLSEYLKHAKGRTRTAIRNGQVWEESLKRLRQKASLTNVTDPSLDLTSLSLEVGCGAPAPVVRCDPCSPYRTITGDCNNRRKPALGAANRALARWLPAEYEDGLSLPFGWTPGK

SEQ ID NO: 7981 - protein, 653 aa, Homo sapiens
MSSETPTSRQLSEYLKHAKGRTRTAIRNGQVWEESLKRLRQKASLTNVTDPSLDLTSLSLEVGCGAPAPVVRCDPCSPYRTITGDCNNRRKPALGAANRALARWLPAEYEDGLSLPFGWTPGKTRNGFPLPLAREVSNKIVGYLNEEGVLDQNRSLLFMQWGQIVDHDLDFAPDTELGSSEYSKAQCDEYCIQGDNCFPIMFPPNDPKAGTQGKCMPFFRAGFVCPTPPYKSLAREQINALTSFLDASFVYSSEPSLASRLRNLSSPLGLMAVNQEVSDHGLPYLPYDSKKPSPCEFINTTARVPCFLAGDSRASEHILLATSHTLFLREHNRLARELKRLNPQWDGEKLYQEARKILGAFVQIITFRDYLPILLGDHMQKWIPPYQGYSESVDPRISNVFTFAFRFGHLEVPSSMFRLDENYQPWGPEPELPLHTLFFNTWRMVKDGGIDPLVRGLLAKKSKLMKQNKMMTGELRNKLFQPTHRIHGFDLAAINTQRCRDHGQPGYNSWRAFCDLSQPQTLEELNTVLKSKMLAKKLLGLYGTPDNIDIWIGAIAEPLVERGRVGPLLACLLGKQFQQIRDGDRFWWENPGVFTNEQKDSLQKMSFSRLVCDNTRITKVPRDPFWANSYPYDFVDCSAIDKLDLSPWASVKN

SEQ ID NO: 7982 - protein, 69 aa, Homo sapiens
MKNPMLEVVSLLLEKLLLISNFTLFSSGAAGEDKGRNSFYETSSFHRGDVLEVPRTHLTHYGIYLGDNR

SEQ ID NO: 7983 - protein, 230 aa, Homo sapiens
MKNPMLEVVSLLLEKLLLISNFTLFSSGAAGEDKGRNSFYETSSFHRGDVLEVPRTHLTHYGIYLGDNRVAHMMPDILLALTDDMGRTQKVVSNKRLILGVIVKVASIRVDTVEDFAYGANILVNHLDESLQKKALLNEEVARRAEKLLGFTPYSLLWNNCEHFVTYCRYGTPISPQSDKFCETVKIIIRDQRSVLASAVLGLASIVCTGLVSYTTLPAIFIPFFLWMAG

SEQ ID NO: 7984 - protein, 230 aa, Homo sapiens; identical to SEQ ID NO: 7983

SEQ ID NO: 7985 - protein, 214 aa, Homo sapiens
AVLDFVKQKASQSPQKQHPLLDGVDGECPFPSRRSQHTDDSALCMSDDRPNALLSSPATETGHASPLPPSAAPTTDSTDSITGQNSRQREEELELIDQLRKHIEYRLKVSLPCDLGAALTDGVVLCHLANHVRPRSVPSIHVPSPAVPKLTMAKCRRNVENFLEACRKIGVPQEQLCLPLHILEEKGLSQVAVTVQALLELAPPKQQQHQLSAV

SEQ ID NO: 7986 - protein, 712 aa, Homo sapiens
MAAAGLVAVAAAAEYSGTVASGGNLPGVHCGPSSGAGPGFGPGSWSRSLDRALEEAAVTGVLSLSGRKLREFPRGAANHDLTDTTRADLSRNRLSEIPIEACHFVSLENLNLYQNCIRYIPEAILNLQALTFLNISRNQLSTLPVHLCNLPLKVLIASNNKLVSLPEEIGHLRHLMELDVSCNEIQTIPSQIGNLEALRDLNVRRNHLVHLPEELAELPLIRLDFSCNKITTIPVCYRNLRHLQTITLDNNPLQSPPAQICIKGKVHIFKYLNIQACKIAPDLPDYDRRPLGFGSCHEELYSSRPYGALDSGFNSVDSGDKRWSGNEPTDEFSDLPLRVAEITKEQRLRRESQYQENRGSLVVTNGGVEHDLDQIDYIDSCTAEEEEAEVRQPKGPDPDSLSSQFMAYIEQRRISHEGSPVKPVAIREFQKTEDMRRYLHQNRVPAEPSSLLSLSASHNQLSHTDLELHQRREQLVERTRREAQLAALQYEEEKIRTKQIQRDAVLDFVKQKASQSPQKQHPLLDGVDGECPFPSRRSQHTDDSALCMSLSGLNQVGCAATLPHSSAFTPLKSDDRPNALLSSPATETVHHSPAYSFPAAIQRNQPQRPESFLFRAGVRAETNKGHASPLPPSAAPTTDSTDSITGQNSRQREEELELIDQLRKHIEYRLKVSLPCDLGAALTDGVVLCHLANHVRPRSVPSIHVPSPAVVS

SEQ ID NO: 7987 - protein, 725 aa, Homo sapiens
MAAAGLVAVAAAAEYSGTVASGGNLPGVHCGPSSGAGPGFGPGSWSRSLDRALEEAAVTGVLSLSGRKLREFPRGAANHDLTDTTRADLSRNRLSEIPIEACHFVSLENLNLYQNCIRYIPEAILNLQALTFLNISRNQLSTLPVHLCNLPLKVLIASNNKLVSLPEEIGHLRHLMELDVSCNEIQTIPSQIGNLEALRDLNVRRNHLVHLPEELAELPLIRLDFSCNKITTIPVCYRNLRHLQTITLDNNPLQSPPAQICIKGKVHIFKYLNIQACKIAPDLPDYDRRPLGFGSCHEELYSSRPYGALDSGFNSVDSGDKRWSGNEPTDEFSDLPLRVAEITKEQRLRRESQYQENRGSLVVTNGGVEHDLDQIDYIDSCTAEEEEAEGSPVKPVAIREFQKTEDMRRYLHQNRVPAEPSSLLSLSASHNQLSHTDLELHQRREQLVERTRREAQLAALQYEEEKIRTKQIQRDAVLDFVKQKASQSPQKQHPLLDGVDGECPFPSRRSQHTDDSALCMSDDRPNALLSSPATETVHHSPAYSFPAAIQRNQPQRPESFLFRAGVRAETNKGHASPLPPSAAPTTDSTDSITGQNSRQREEELELIDQLRKHIEYRLKVSLPCDLGAALTDGVVLCHLANHVRPRSVPSIHVPSPAVPKLTMAKCRRNVENFLEACRKIGVPQEQLCLPLHILEEKGLSQVAVTVQALLELAPPKQQQHQLSAV

SEQ ID NO: 7988 - protein, 803 aa, Homo sapiens
MAAAGLVAVAAAAEYSGTVASGGNLPGVHCGPSSGAGPGFGPGSWSRSLDRALEEAAVTGVLSLSGRKLREFPRGAANHDLTDTTRADLSRNRLSEIPIEACHFVSLENLNLYQNCIRYIPEAILNLQALTFLNISRNQLSTLPVHLCNLPLKVLIASNNKLVSLPEEIGHLRHLMELDVSCNEIQTIPSQIGNLEALRDLNVRRNHLVHLPEELAELPLIRLDFSCNKITTIPVCYRNLRHLQTITLDNNPLQSPPAQICIKGKVHIFKYLNIQACKIAPDLPDYDRRPLGFGSCHEELYSSRPYGALDSGFNSVDSGDKRWSGNEPTDEFSDLPLRVAEITKEQRLRRESQYQENRGSLVVTNGGVEHDLDQIDYIDSCTAEEEEAEVRQPKGPDPDSLSSQFMAYIEQRRISHEGSPVKPVAIREFQKTEDMRRYLHQNRVPAEPSSLLSLSASHNQLSHTDLELHQRREQLVERTRREAQLAALQYEEEKIRTKQIQRDAVLDFVKQKASQSPQKQHPLLDGVDGECPFPSRRSQHTDDSALCMSLSGLNQVGCAATLPHSSAFTPLKSDDRPNALLSSPATETVHHSPAYSFPAAIQRNQPQRPESFLFRAGVRAETNKGHASPLPPSAAPTTDSTDSITGQNSRQREEELELIDQLRKHIEYRLKVSLPCDLGAALTDGVVLCHLANHVRPRSVPSIHVPSPAVPKLTMAKCRRNVENFLEACRKIGVPQDNLCSPSDILQLNLSVKRTVETLLSLGAHSEESSFVCLSLQLLGFVAFYCTVMLTLCVLYYWLFPAR

SEQ ID NO: 7989 - protein, 777 aa, Homo sapiens
MAAAGLVAVAAAAEYSGTVASGGNLPGVHCGPSSGAGPGFGPGSWSRSLDRALEEAAVTGVLSLSGRKLREFPRGAANHDLTDTTRADLSRNRLSEIPIEACHFVSLENLNLYQNCIRYIPEAILNLQALTFLNISRNQLSTLPVHLCNLPLKVLIASNNKLVSLPEEIGHLRHLMELDVSCNEIQTIPSQIGNLEALRDLNVRRNHLVHLPEELAELPLIRLDFSCNKITTIPVCYRNLRHLQTITLDNNPLQSPPAQICIKGKVHIFKYLNIQACKIAPDLPDYDRRPLGFGSCHEELYSSRPYGALDSGFNSVDSGDKRWSGNEPTDEFSDLPLRVAEITKEQRLRRESQYQENRGSLVVTNGGVEHDLDQIDYIDSCTAEEEEAEVRQPKGPDPDSLSSQFMAYIEQRRISHEGSPVKPVAIREFQKTEDMRRYLHQNRVPAEPSSLLSLSASHNQLSHTDLELHQRREQLVERTRREAQLAALQYEEEKIRTKQIQRDAVLDFVKQKASQSPQKQHPLLDGVDGECPFPSRRSQHTDDSALCMSLSGLNQVGCAATLPHSSAFTPLKSDDRPNALLSSPATETVHHSPAYSFPAAIQRNQPQRPESFLFRAGVRAETNKGHASPLPPSAAPTTDSTDSITGQNSRQREEELELIDQLRKHIEYRLKVSLPCDLGAALTDGVVLCHLANHVRPRSVPSIHVPSPAVPKLTMAKCRRNVENFLEACRKIGVPQEQLCLPLHILEEKGLSQVAVTVQALLELAPPKQQQHQLSAV

SEQ ID NO: 7990 - protein, 803 aa, Homo sapiens; identical to SEQ ID NO: 7988

SEQ ID NO: 7991 - protein, 623 aa, Homo sapiens
MAAAGLVAVAAAAEYSGTVASGGNLPGVHCGPSSGAGPGFGPGSWSRSLDRALEEAAVTGVLSLSGRKLREFPRGAANHDLTDTTRAELAELPLIRLDFSCNKITTIPVCYRNLRHLQTITLDNNPLQSPPAQICIKGKVHIFKYLNIQACKIAPDLPDYDRRPLGFGSCHEELYSSRPYGALDSGFNSVDSGDKRWSGNEPTDEFSDLPLRVAEITKEQRLRRESQYQENRGSLVVTNGGVEHDLDQIDYIDSCTAEEEEAEGSPVKPVAIREFQKTEDMRRYLHQNRVPAEPSSLLSLSASHNQLSHTDLELHQRREQLVERTRREAQLAALQYEEEKIRTKQIQRDAVLDFVKQKASQSPQKQHPLLDGVDGECPFPSRRSQHTDDSALCMSLSGLNQVGCAATLPHSSAFTPLKSDDRPNALLSSPATETVHHSPAYSFPAAIQRNQPQRPESFLFRAGVRAETNKGHASPLPPSAAPTTDSTDSITGQNSRQREEELELIDQLRKHIEYRLKVSLPCDLGAALTDGVVLCHLANHVRPRSVPSIHVPSPAVPKLTMAKCRRNVENFLEACRKIGVPQEQLCLPLHILEEKGLSQVAVTVQALLELAPPKQQQHQLSAV

SEQ ID NO: 7992 - protein, 92 aa, Homo sapiens
MAAAGLVAVAAAAEYSGTVASGGNLPGVHCGPSSGAGPGFGPGSWSRSLDRALEEAAVTGVLSLSGRKLREFPRGAANHDLTDTTRAGCELQ

SEQ ID NO: 7993 - protein, 227 aa, Homo sapiens
YEEEKIRTKQIQRDAVLDFVKQKASQSPQKQHPLLDGVDGECPFPSRRSQHTDDSALCMSLSGLNQVGCAATLPHSSAFTPLKSDDRPNALLSSPATETGHASPLPPSAAPTTDSTDSITGQNSRQREEELELIDQLRKHIEYRLKVSLPCDLGAALTDGVVLCHLANHVRPRSVPSIHVPSPAVPKLTMAKCRRNVENFLEACRKIGVPQDNLCSPSDILQLNLSV

SEQ ID NO: 7994 - protein, 159 aa, Homo sapiens
MAGPGWTLLLLLLLLLLLGSMAGYGPQKKLNLSHKGIGEPCRRHEECQSNCCTINSLAPHTLCTPKTIFLQCLPWRKPNGYRCSHDSECQSSCCVRNNSPQELCTPQSVFLQCVPWRKPNGDFCSSHQECHSQCCIQLREYSPFRCIPRTGILAQCLPL

SEQ ID NO: 7995 - protein, 139 aa, Homo sapiens
MAGPGWTLLLLLLLLLLLGSMAGYGPQKKLNLSHKGIGEPCRRHEECQSNCCTINSLAPHTLCTPKTIFLQCLPWRKVSPMGTDARTTQSARAAAASATTARRSCARPKASSCSVCPGASPTATSAAAIRSVTASAASS

SEQ ID NO: 7996 - protein, 46 aa, Homo sapiens
MAGPGWTLLLLLLLLLLLGSMAGYGPQKKLNLSHKKLLRKPKFEGW

SEQ ID NO: 7997 - protein, 61 aa, Homo sapiens
MAGPGWTLLLLLLLLLLLGSMAGYGPQKKLNLSHKPRAPSTDLPEPRQSGFVPETSQETQV

SEQ ID NO: 7998 - protein, 635 aa, Homo sapiens
MAPPLLLLLLASGAAACPLPCVCQNLSESLSTLCAHRGLLFVPPNVDRRTVELRLADNFIQALGPPDFRNMTGLVDLTLSRNAITRIGARAFGDLESLRSLHLDGNRLVELGTGSLRGPVNLQHLILSGNQLGRIAPGAFDDFLESLEDLDLSYNNLRQVPWAGIGAMPALHTLNLDHNLIDALPPGAFAQLGQLSRLDLTSNRLATLAPDPLFSRGRDAEASPAPLVLSFSGNPLHCNCELLWLRRLARPDDLETCASPPGLAGRYFWAVPEGEFSCEPPLIARHTQRLWVLEGQRATLRCRALGDPAPTMHWVGPDDRLVGNSSRARAFPNGTLEIGVTGAGDAGGYTCIATNPAGEATARVELRVLALPHGGNSSAEGGRPGPSDIAASARTAAEGEGTLESEPAVQVTEVTATSGLVSWGPGRPADPVWMFQIQYNSSEDETLIYRIVPASSHHFLLKHLVPGADYDLCLLALSPAAGPSDLTATRLLGCAHFSTLPASPLCHALQAHVLGGTLTVAVGGVLVAALLVFTVALLVRGRGAGNGRLPLKLSHVQSQTNGGPSPTPKAHPPRSPPPRPQRSCSLDLGDAGCYGYARRLGGAWARRSHSVHGGLLGAGCRGVGGSAERLEESVV

SEQ ID NO: 7999 - protein, 418 aa, Homo sapiens
MAPPLLLLLLASGAAACPLPCVCQNLSESLSTLCAHRGLLFVPPNVDRRTVELRLADNFIQALGPPDFRNMTGLVDLTLSRNAITRIGARAFGDLESLRSLHLDGNRLVELGTGSLRGPVNLQHLILSGNQLGRIAPGAFDDFLESLEDLDLSYNNLRQVPWAGIGAMPALHTLNLDHNLIDALPPGAFAQLGQLSRLDLTSNRLATLAPDPLFSRGRDAEASPAPLVLSFSGNPLHCNCELLWLRRLARPDDLETCASPPGLAGRYFWAVPEGEFSCEPPLIARHTQRLWVLEGQRATLRCRALGDPAPTMHWVGPDDRLVGNSSRARAFPNGTLEIGVTGAGDAGGYTCIATNPAGEATARVELRVLALPHGGNSRPGAAAWPGSPSLVFILSTSGSPVYLEGQGALSSVLASRPG

SEQ ID NO: 8000 - protein, 719 aa, Homo sapiens
MEKILFYLFLIGIAVKAQICPKRCVCQILSPNLATLCAKKGLLFVPPNIDRRTVELRLADNFVTNIKRKDFANMTSLVDLTLSRNTISFITPHAFADLRNLRALHLNSNRLTKITNDMFSGLSNLHHLILNNNQLTLISSTAFDDVFALEELDLSYNNLETIPWDAVEKMVSLHTLSLDHNMIDNIPKGTFSHLHKMTRLDVTSNKLQKLPPDPLFQRAQVLATSGIISPSTFALSFGGNPLHCNCELLWLRRLSREDDLETCASPPLLTGRYFWSIPEEEFLCEPPLITRHTHEMRVLEGQRATLRCKARGDPEPAIHWISPEGKLISNATRSLVYDNGTLDILITTVKDTGAFTCIASNPAGEATQIVDLHIIKLPHLLNSTNHIHEPDPGSSDISTSTKSGSNTSSSNGDTKLSQDKIVVAEATSSTALLKFNFQRNIPGIRMFQIQYNGTYDDTLVYRMIPPTSKTFLVNNLAAGTMYDLCVLAIYDDGITSLTATRVVGCIQFTTEQDYVRCHFMQSQFLGGTMIIIIGGIIVASVLVFIIILMIRYKVCNNNGQHKVTKVSNVYSQTNGAQIQGCSVTLPQSVSKQAVGHEENAQCCKATSDNVIQSSETCSSQDSSTTTSALPPSWTSSTSVSQKQKRKTGTKPSTEPQNEAVTNVESQNTNRNNSTALQLASRPPDSVTEGPTSKRAHIKPNALLTNVDQIVQETQRLELI

SEQ ID NO: 8001 - protein, 466 aa, Homo sapiens
MEKILFYLFLIGIAVKAQICPKRCVCQILSPNLATLCAKKGLLFVPPNIDRRTVELRLADNFVTNIKRKDFANMTSLVDLTLSRNTISFITPHAFADLRNLRALHLNSNRLTKITNDMFSGLSNLHHLILNNNQLTLISSTAFDDVFALEELDLSYNNLETIPWDAVEKMVSLHTLSLDHNMIDNIPKGTFSHLHKMTRLDVTSNKLQKLPPDPLFQRAQVLATSGIISPSTFALSFGGNPLHCNCELLWLRRLSREDDLETCASPPLLTGRYFWSIPEEEFLCEPPLITRHTHEMRVLEGQRATLRCKARGDPEPAIHWISPEGKLISNATRSLVYDNGTLDILITTVKDTGAFTCIASNPAGEATQIVDLHIIKLPHLLNSTNHIHEPDPGSSDISTSTKSGSNTSSSNGDTKLSQDKIVVAEATSSTALLKFNFQRNIPGIRMFQIQYNGTYDDTLVYRCFAD

SEQ ID NO: 8002 - protein, 465 aa, Homo sapiens
MEKILFYLFLIGIAVKAQICPKRCVCQILSPNLATLCAKKGLLFVPPNIDRRTVELRLADNFVTNIKRKDFANMTSLVDLTLSRNTISFITPHAFADLRNLRALHLNSNRLTKITNDMFSGLSNLHHLILNNNQLTLISSTAFDDVFALEELDLSYNNLETIPWDAVEKMVSLHTLSLDHNMIDNIPKGTFSHLHKMTRLDVTSNKLQKLPPDPLFQRAQVLATSGIISPSTFALSFGGNPLHCNCELLWLRRLSREDDLETCASPPLLTGRYFWSIPEEEFLCEPPLITRHTHEMRVLEGQRATLRCKARGDPEPAIHWISPEGKLISNATRSLVYDNGTLDILITTVKDTGAFTCIASNPAGEATQIVDLHIIKLPHLLNSTNHIHEPDPGSSDISTSTKSGSNTSSSNGDTKLSQDKIVVAEATSSTALLKFNFQRNIPGIRMFQIQYNGTYDDTLVYRGWS

SEQ ID NO: 8003 - protein, 347 aa, Homo sapiens
MSSWSRQRPKSPGGIQPHVSRTLFLLLLLAASAWGVTLSPKDCQVFRSDHGSSISCQPPAEIPGYLPADTVHLAVEFFNLTHLPANLLQGASKLQELHLSSNGLESLSPEFLRPVPQLRVLDLTRNALTGLPPGLFQASATLDTLVLKENQLEVLEVSWLHGLKALGHLDLSGNRLRKLPPGLLANFTLLRTLDLGENQLETLPPDLLRGPLQLERLHLEGNKLQVLGKDLLLPQPDLRYLFLNGNKLARVAAGAFQGLRQLDMLDLSNNSLASVPEGLWASLGQPNWDMRDGFDISGNPWICDQNLSDLYRWLQAQKDKMFSQNDTRCAGPEAVKGQTLLAVAKSQ

SEQ ID NO: 8004 - protein, 4544 aa, Homo sapiens
MLTPPLLLLLPLLSALVAAAIDAPKTCSPKQFACRDQITCISKGWRCDGERDCPDGSDEAPEICPQSKAQRCQPNEHNCLGTELCVPMSRLCNGVQDCMDGSDEGPHCRELQGNCSRLGCQHHCVPTLDGPTCYCNSSFQLQADGKTCKDFDECSVYGTCSQLCTNTDGSFICGCVEGYLLQPDNRSCKAKNEPVDRPPVLLIANSQNILATYLSGAQVSTITPTSTRQTTAMDFSYANETVCWVHVGDSAAQTQLKCARMPGLKGFVDEHTINISLSLHHVEQMAIDWLTGNFYFVDDIDDRIFVCNRNGDTCVTLLDLELYNPKGIALDPAMGKVFFTDYGQIPKVERCDMDGQNRTKLVDSKIVFPHGITLDLVSRLVYWADAYLDYIEVVDYEGKGRQTIIQGILIEHLYGLTVFENYLYATNSDNANAQQKTSVIRVNRFNSTEYQVVTRVDKGGALHIYHQRRQPRVRSHACENDQYGKPGGCSDICLLANSHKARTCRCRSGFSLGSDGKSCKKPEHELFLVYGKGRPGIIRGMDMGAKVPDEHMIPIENLMNPRALDFHAETGFIYFADTTSYLIGRQKIDGTERETILKDGIHNVEGVAVDWMGDNLYWTDDGPKKTISVARLEKAAQTRKTLIEGKMTHPRAIVVDPLNGWMYWTDWEEDPKDSRRGRLERAWMDGSHRDIFVTSKTVLWPNGLSLDIPAGRLYWVDAFYDRIETILLNGTDRKIVYEGPELNHAFGLCHHGNYLFWTEYRSGSVYRLERGVGGAPPTVTLLRSERPPIFEIRMYDAQQQQVGTNKCRVNNGGCSSLCLATPGSRQCACAEDQVLDADGVTCLANPSYVPPPQCQPGEFACANSRCIQERWKCDGDNDCLDNSDEAPALCHQHTCPSDRFKCENNRCIPNRWLCDGDNDCGNSEDESNATCSARTCPPNQFSCASGRCIPISWTCDLDDDCGDRSDESASCAYPTCFPLTQFTCNNGRCININWRCDNDNDCGDNSDEAGCSHSCSSTQFKCNSGRCIPEHWTCDGDNDCGDYSDETHANCTNQATRPPGGCHTDEFQCRLDGLCIPLRWRCDGDTDCMDSSDEKSCEGVTHVCDPSVKFGCKDSARCISKAWVCDGDNDCEDNSDEENCESLACRPPSHPCANNTSVCLPPDKLCDGNDDCGDGSDEGELCDQCSLNNGGCSHNCSVAPGEGIVCSCPLGMELGPDNHTCQIQSYCAKHLKCSQKCDQNKFSVKCSCYEGWVLEPDGESCRSLDPFKPFIIFSNRHEIRRIDLHKGDYSVLVPGLRNTIALDFHLSQSALYWTDVVEDKIYRGKLLDNGALTSFEVVIQYGLATPEGLAVDWIAGNIYWVESNLDQIEVAKLDGTLRTTLLAGDIEHPRAIALDPRDGILFWTDWDASLPRIEAASMSGAGRRTVHRETGSGGWPNGLTVDYLEKRILWIDARSDAIYSARYDGSGHMEVLRGHEFLSHPFAVTLYGGEVYWTDWRTNTLAKANKWTGHNVTVVQRTNTQPFDLQVYHPSRQPMAPNPCEANGGQGPCSHLCLINYNRTVSCACPHLMKLHKDNTTCYEFKKFLLYARQMEIRGVDLDAPYYNYIISFTVPDIDNVTVLDYDAREQRVYWSDVRTQAIKRAFINGTGVETVVSADLPNAHGLAVDWVSRNLFWTSYDTNKKQINVARLDGSFKNAVVQGLEQPHGLVVHPLRGKLYWTDGDNISMANMDGSNRTLLFSGQKGPVGLAIDFPESKLYWISSGNHTINRCNLDGSGLEVIDAMRSQLGKATALAIMGDKLWWADQVSEKMGTCSKADGSGSVVLRNSTTLVMHMKVYDESIQLDHKGTNPCSVNNGDCSQLCLPTSETTRSCMCTAGYSLRSGQQACEGVGSFLLYSVHEGIRGIPLDPNDKSDALVPVSGTSLAVGIDFHAENDTIYWVDMGLSTISRAKRDQTWREDVVTNGIGRVEGIAVDWIAGNIYWTDQGFDVIEVARLNGSFRYVVISQGLDKPRAITVHPEKGYLFWTEWGQYPRIERSRLDGTERVVLVNVSISWPNGISVDYQDGKLYWCDARTDKIERIDLETGENREVVLSSNNMDMFSVSVFEDFIYWSDRTHANGSIKRGSKDNATDSVPLRTGIGVQLKDIKVFNRDRQKGTNVCAVANGGCQQLCLYRGRGQRACACAHGMLAEDGASCREYAGYLLYSERTILKSIHLSDERNLNAPVQPFEDPEHMKNVIALAFDYRAGTSPGTPNRIFFSDIHFGNIQQINDDGSRRITIVENVGSVEGLAYHRGWDTLYWTSYTTSTITRHTVDQTRPGAFERETVITMSGDDHPRAFVLDECQNLMFWTNWNEQHPSIMRAALSGANVLTLIEKDIRTPNGLAIDHRAEKLYFSDATLDKIERCEYDGSHRYVILKSEPVHPFGLAVYGEHIFWTDWVRRAVQRANKHVGSNMKLLRVDIPQQPMGIIAVANDTNSCELSPCRINNGGCQDLCLLTHQGHVNCSCRGGRILQDDLTCRAVNSSCRAQDEFECANGECINFSLTCDGVPHCKDKSDEKPSYCNSRRCKKTFRQCSNGRCVSNMLWCNGADDCGDGSDEIPCNKTACGVGEFRCRDGTCIGNSSRCNQFVDCEDASDEMNCSATDCSSYFRLGVKGVLFQPCERTSLCYAPSWVCDGANDCGDYSDERDCPGVKRPRCPLNYFACPSGRCIPMSWTCDKEDDCEHGEDETHCNKFCSEAQFECQNHRCISKQWLCDGSDDCGDGSDEAAHCEGKTCGPSSFSCPGTHVCVPERWLCDGDKDCADGADESIAAGCLYNSTCDDREFMCQNRQCIPKHFVCDHDRDCADGSDESPECEYPTCGPSEFRCANGRCLSSRQWECDGENDCHDQSDEAPKNPHCTSQEHKCNASSQFLCSSGRCVAEALLCNGQDDCGDSSDERGCHINECLSRKLSGCSQDCEDLKIGFKCRCRPGFRLKDDGRTCADVDECSTTFPCSQRCINTHGSYKCLCVEGYAPRGGDPHSCKAVTDEEPFLIFANRYYLRKLNLDGSNYTLLKQGLNNAVALDFDYREQMIYWTDVTTQGSMIRRMHLNGSNVQVLHRTGLSNPDGLAVDWVGGNLYWCDKGRDTIEVSKLNGAYRTVLVSSGLREPRALVVDVQNGYLYWTDWGDHSLIGRIGMDGSSRSVIVDTKITWPNGLTLDYVTERIYWADAREDYIEFASLDGSNRHVVLSQDIPHIFALTLFEDYVYWTDWETKSINRAHKTTGTNKTLLISTLHRPMDLHVFHALRQPDVPNHPCKVNNGGCSNLCLLSPGGGHKCACPTNFYLGSDGRTCVSNCTASQFVCKNDKCIPFWWKCDTEDDCGDHSDEPPDCPEFKCRPGQFQCSTGICTNPAFICDGDNDCQDNSDEANCDIHVCLPSQFKCTNTNRCIPGIFRCNGQDNCGDGEDERDCPEVTCAPNQFQCSITKRCIPRVWVCDRDNDCVDGSDEPANCTQMTCGVDEFRCKDSGRCIPARWKCDGEDDCGDGSDEPKEECDERTCEPYQFRCKNNRCVPGRWQCDYDNDCGDNSDEESCTPRPCSESEFSCANGRCIAGRWKCDGDHDCADGSDEKDCTPRCDMDQFQCKSGHCIPLRWRCDADADCMDGSDEEACGTGVRTCPLDEFQCNNTLCKPLAWKCDGEDDCGDNSDENPEECARFVCPPNRPFRCKNDRVCLWIGRQCDGTDNCGDGTDEEDCEPPTAHTTHCKDKKEFLCRNQRCLSSSLRCNMFDDCGDGSDEEDCSIDPKLTSCATNASICGDEARCVRTEKAAYCACRSGFHTVPGQPGCQDINECLRFGTCSQLCNNTKGGHLCSCARNFMKTHNTCKAEGSEYQVLYIADDNEIRSLFPGHPHSAYEQAFQGDESVRIDAMDVHVKAGRVYWTNWHTGTISYRSLPPAAPPTTSNRHRRQIDRGVTHLNISGLKMPRGIAIDWVAGNVYWTDSGRDVIEVAQMKGENRKTLISGMIDEPHAIVVDPLRGTMYWSDWGNHPKIETAAMDGTLRETLVQDNIQWPTGLAVDYHNERLYWADAKLSVIGSIRLNGTDPIVAADSKRGLSHPFSIDVFEDYIYGVTYINNRVFKIHKFGHSPLVNLTGGLSHASDVVLYHQHKQPEVTNPCDRKKCEWLCLLSPSGPVCTCPNGKRLDNGTCVPVPSPTPPPDAPRPGTCNLQCFNGGSCFLNARRQPKCRCQPRYTGDKCELDQCWEHCRNGGTCAASPSGMPTCRCPTGFTGPKCTQQVCAGYCANNSTCTVNQGNQPQCRCLPGFLGDRCQYRQCSGYCENFGTCQMAADGSRQCRCTAYFEGSRCEVNKCSRCLEGACVVNKQSGDVTCNCTDGRVAPSCLTCVGHCSNGGSCTMNSKMMPECQCPPHMTGPRCEEHVFSQQQPGHIASILIPLLLLLLLVLVAGVVFWYKRRVQGAKGFQHQRMTNGAMNVEIGNPTYKMYEGGEPDDVGGLLDADFALDPDKPTNFTNPVYATLYMGGHGSRHSLASTDEKRELLGRGPEDEIGDPLA

SEQ ID NO: 8005 - protein, 292 aa, Homo sapiens
MLTPPLLLLLPLLSALVAAAIDAPKTCSPKQFACRDQITCISKGWRCDGERDCPDGSDEAPEICPQSKAQRCQPNEHNCLGTELCVPMSRLCNGVQDCMDGSDEGPHCRELQGNCSRLGCQHHCVPTLDGPTCYCNSSFQLQADGKTCKDFDECSVYGTCSQLCTNTDGSFICGCVEGYLLQPDNRSCKAKNEPVDRPPVLLIANSQNILATYLSGAQVSTITPTSTRQTTAMDFSYANETVCWVHVGDSAAQTQLKCARMPGLKGFVDEHTINISLSLHLCVFSKSQQEMG

SEQ ID NO: 8006 - protein, 296 aa, Homo sapiens
MLTPPLLLLLPLLSALVAAAIDAPKTCSPKQFACRDQITCISKGWRCDGERDCPDGSDEAPEICPQSKAQRCQPNEHNCLGTELCVPMSRLCNGVQDCMDGSDEGPHCRELQGNCSRLGCQHHCVPTLDGPTCYCNSSFQLQADGKTCKDFDECSVYGTCSQLCTNTDGSFICGCVEGYLLQPDNRSCKAKNEPVDRPPVLLIANSQNILATYLSGAQVSTITPTSTRQTTAMDFSYANETVCWVHVGDSAAQTQLKCARMPGLKGFVDEHTINISLSLHRRSRKRAQENEVTQHG

SEQ ID NO: 8007 - protein, 439 aa, Homo sapiens
MLTPPLLLLLPLLSALVAAAIDAPKTCSPKQFACRDQITCISKGWRCDGERDCPDGSDEAPEICPQSKAQRCQPNEHNCLGTELCVPMSRLCNGVQDCMDGSDEGPHCRELQGNCSRLGCQHHCVPTLDGPTCYCNSSFQLQADGKTCKDFDECSVYGTCSQLCTNTDGSFICGCVEGYLLQPDNRSCKAKNEPVDRPPVLLIANSQNILATYLSGAQVSTITPTSTRQTTAMDFSYANETVCWVHVGDSAAQTQLKCARMPGLKGFVDEHTINISLSLHHVEQMAIDWLTGNFYFVDDIDDRIFVCNRNGDTCVTLLDLELYNPKGIALDPAMGKVFFTDYGQIPKVERCDMDGQNRTKLVDSKIVFPHGITLDLVSRLVYWADAYLDYIEVVDYEGKGRQTIIQGILVRELLSEVLWGNHDPGPSGEGGSLCRGTVL

SEQ ID NO: 8008 - protein, 183 aa, Homo sapiens
NGQDNCGDGEDERDCPEVTCAPNQFQCSITKRCIPRVWVCDRDNDCVDGSDEPANCTQMTCGVDEFRCKDSGRCIPARWKCDGEDDCGDGSDEPKEECGEPRPHSRRKTVYLDERTCEPYQFRCKNNRCVPGRWQCDYDNDCGDNSDEESCTPRPCSESEFSCANGRCIAGRWKCDGDHDCAD

SEQ ID NO: 8009 - protein, 139 aa, Homo sapiens
  SITE 1: note = misc_feature - Xaa can be any naturally occurring amino acid
XRPGAFERETVITMSGDDHPRAFVLDECQNLMFWTNWNEQHPSIMRAALSGANVLTLIEKDIRTPNGLAIDHRAEKLYFSDATLDKIERCEYDGSHRYVNSLHAESTTVAARTCVCSLTRAMSTAHAEGAESSRMTSPA

SEQ ID NO: 8010 - protein, 500 aa, Homo sapiens
MASVAQESAGSQRRLPPRHGALRGLLLLCLWLPSGRAALPPAAPLSELHAQLSGVEQLLEEFRRQLQQERPQEELELELRAGGGPQEDCPGPGSGGYSAMPDAIIRTKDSLAAGASFLRAPAAVRGWRQCVAACCSEPRCSVAVVELPRRPAPPAAVLGCYLFNCTARGRNVCKFALHSGYSSYSLSRAPDGAALATARASPRQEKDAPPLSKAGQDVVLHLPTDGVVLDGRESTDDHAIVQYEWALLQGDPSVDMKVPQSGTLKLSHLQEGTYTFQLTVTDTAGQRSSDNVSVTVLRAAYSTGGCLHTCSRYHFFCDDGCCIDITLACDGVQQCPDGSDEDFCQNLGLDRKMVTHTAASPALPRTTGPSEDAGGDSLVEKSQKATAPNKPPALSNTEKRNHSAFWGPESQIIPVMPDSSSSGKNRKEESYIFESKGDGGGGEHPAPETGAVLPLALGLAITALLLLMVACRLRLVKQKLKKARPITSEESDYLINGMYL

SEQ ID NO: 8011 - protein, 325 aa, Homo sapiens
MASVAQESAGSQRRLPPRHGALRGLLLLCLWLPSGRAALPPAAPLSELHAQLSGVEQLLEEFRRQLQQERPQEELELELRAGGGPQEDCPGPGSGGYSAMPDAIIRTKDSLAAGASFLRAPAAVRGWRQCVAACCSEPRCSVAVVELPRRPAPPAAVLGCYLFNCTARGRNVCKFALHSGYSSYSLSRAPDGAALATARASPRQEKDAPPLSKAGQDVVLHLPTDGVVLDGRESTDDHAIVQYEWALLQGDPSVDMKVPQSGTLKLSHLQEGTYTFQLTVTDTAGQRSSDNVSVTVLRAAYSTGDGWSICCICSKREAKEFSETS

SEQ ID NO: 8012 - protein, 4599 aa, Homo sapiens
MSEFLLALLTLSGLLPIARVLTVGADRDQQLCDPGEFLCHDHVTCVSQSWLCDGDPDCPDDSDESLDTCPEEVEIKCPLNHIACLGTNKCVHLSQLCNGVLDCPDGYDEGVHCQELLSNCQQLNCQYKCTMVRNSTRCYCEDGFEITEDGRSCKDQDECAVYGTCSQTCRNTHGSYTCSCVEGYLMQPDNRSCKAKIEPTDRPPILLIANFETIEVFYLNGSKMATLSSVNGNEIHTLDFIYNEDMICWIESRESSNQLKCIQITKAGGLTDEWTINILQSFHNVQQMAIDWLTRNLYFVDHVGDRIFVCNSNGSVCVTLIDLELHNPKAIAVDPIAGKLFFTDYGNVAKVERCDMDGMNRTRIIDSKTEQPAALALDLVNKLVYWVDLYLDYVGVVDYQGKNRHTVIQGRQVRHLYGITVFEDYLYATNSDNYNIVRINRFNGTDIHSLIKIENAWGIRIYQKRTQPTVRSHACEVDPYGMPGGCSHICLLSSSYKTRTCRCRTGFNLGSDGRSCKRPKNELFLFYGKGRPGIVRGMDLNTKIADEYMIPIENLVNPRALDFHAETNYIYFADTTSFLIGRQKIDGTERETILKDDLDNVEGIAVDWIGNNLYWTNDGHRKTINVARLEKASQSRKTLLEGEMSHPRGIVVDPVNGWMYWTDWEEDEIDDSVGRIEKAWMDGFNRQIFVTSKMLWPNGLTLDFHTNTLYWCDAYYDHIEKVFLNGTHRKIVYSGRELNHPFGLSHHGNYVFWTDYMNGSIFQLDLITSEVTLLRHERPPLFGLQIYDPRKQQGDNMCRVNNGGCSTLCLAIPGGRVCACADNQLLDENGTTCTFNPGEALPHICKAGEFRCKNRHCIQARWKCDGDDDCLDGSDEDSVNCFNHSCPDDQFKCQNNRCIPKRWLCDGANDCGSNEDESNQTCTARTCQVDQFSCGNGRCIPRAWLCDREDDCGDQTDEMASCEFPTCEPLTQFVCKSGRCISSKWHCDSDDDCGDGSDEVGCVHSCFDNQFRCSSGRCIPGHWACDGDNDCGDFSDEAQINCTKEEIHSPAGCNGNEFQCHPDGNCVPDLWRCDGEKDCEDGSDEKGCNGTIRLCDHKTKFSCWSTGRCINKAWVCDGDIDCEDQSDEDDCDSFLCGPPKHPCANDTSVCLQPEKLCNGKKDCPDGSDEGYLCDECSLNNGGCSNHCSVVPGRGIVCSCPEGLQLNKDNKTCEIVDYCSNHLKCSQVCEQHKHTVKCSCYEGWKLDVDGESCTSVDPFEAFIIFSIRHEIRRIDLHKRDYSLLVPGLRNTIALDFHFNQSLLYWTDVVEDRIYRGKLSESGGVSAIEVVVEHGLATPEGLTVDWIAGNIYWIDSNLDQIEVAKLDGSLRTTLIAGAMEHPRAIALDPRYGILFWTDWDANFPRIESASMSGAGRKTIYKDMKTGAWPNGLTVDHFEKRIVWTDARSDAIYSALYDGTNMIEIIRGHEYLSHPFAVSLYGSEVYWTDWRTNTLSKANKWTGQNVSVIQKTSAQPFDLQIYHPSRQPQAPNPCAANDGKGPCSHMCLINHNRSAACACPHLMKLSSDKKTCYEMKKFLLYARRSEIRGVDIDNPYFNFITAFTVPDIDDVTVIDFDASEERLYWTDIKTQTIKRAFINGTGLETVISRDIQSIRGLAVDWVSRNLYWISSEFDETQINVARLDGSLKTSIIHGIDKPQCLAAHPVRGKLYWTDGNTINMANMDGSNSKILFQNQKEPVGLSIDYVENKLYWISSGNGTINRCNLDGGNLEVIESMKEELTKATALTIMDKKLWWADQNLAQLGTCSKRDGRNPTILRNKTSGVVHMKVYDKEAQQGSNSCQLNNGGCSQLCLPTSETTRTCMCTVGYYLQKNRMSCQGIESFLMYSVHEGIRGIPLEPSDKMDALMPISGTSFAVGIDFHAENDTIYWTDMGFNKISRAKRDQTWKEDIITNGLGRVEGIAVDWIAGNIYWTDHGFNLIEVARLNGSFRYVIISQGLDQPRSIAVHPEKGLLFWTEWGQMPCIGKARLDGSEKVVLVSMGIAWPNGISIDYEENKLYWCDARTDKIERIDLETGGNREMVLSGSNVDMFSVAVFGAYIYWSDRAHANGSVRRGHKNDATETITMRTGLGVNLKEVKIFNRVREKGTNVCARDNGGCKQLCLYRGNSRRTCACAHGYLAEDGVTCLRHEGYLLYSGRTILKSIHLSDETNLNSPIRPYENPRYFKNVIALAFDYNQRRKGTNRIFYSDAHFGNIQLIKDNWEDRQVIVENVGSVEGLAYHRAWDTLYWTSSTTSSITRHTVDQTRPGAFDREAVITMSEDDHPHVLALDECQNLMFWTNWNEQHPSIMRSTLTGKNAQVVVSTDILTPNGLTIDYRAEKLYFSDGSLGKIERCEYDGSQRHVIVKSGPGTFLSLAVYDNYIFWSDWGRRAILRSNKYTGGDTKILRSDIPHQPMGIIAVANDTNSCELSPCALLNGGCHDLCLLTPNGRVNCSCRGDRILLEDNRCVTKNSSCNAYSEFECGNGECIDYQLTCDGIPHCKDKSDEKLLYCENRSCRRGFKPCYNRRCIPHGKLCDGENDCGDNSDELDCKVSTCATVEFRCADGTCIPRSARCNQNIDCADASDEKNCNNTDCTHFYKLGVKTTGFIRCNSTSLCVLPTWICDGSNDCGDYSDELKCPVQNKHKCEENYFSCPSGRCILNTWICDGQKDCEDGRDEFHCDSSCSWNQFACSAQKCISKHWICDGEDDCGDGLDESDSICGAITCAADMFSCQGSRACVPRHWLCDGERDCPDGSDELSTAGCAPNNTCDENAFMCHNKVCIPKQFVCDHDDDCGDGSDESPQCGYRQCGTEEFSCADGRCLLNTQWQCDGDFDCPDHSDEAPLNPKCKSAEQSCNSSFFMCKNGRCIPSGGLCDNKDDCGDGSDERNCHINECLSKKVSGCSQDCQDLPVSYKCKCWPGFQLKDDGKTCVDIDECSSGFPCSQQCINTYGTYKCLCTDGYEIQPDNPNGCKSLSDEEPFLILADHHEIRKISTDGSNYTLLKQGLNNVIAIDFDYREEFIYWIDSSRPNGSRINRMCLNGSDIKVVHNTAVPNALAVDWIGKNLYWSDTEKRIIEVSKLNGLYPTILVSKRLKFPRDLSLDPQAGYLYWIDCCEYPHIGRVGMDGTNQSVVIETKISRPMALTIDYVNRRLYWADENHIEFSNMDGSHRHKVPNQDIPGVIALTLFEDYIYWTDGKTKSLSRAHKTSGADRLSLIYSWHAITDIQVYHSYRQPDVSKHLCMINNGGCSHLCLLAPGKTHTCACPTNFYLAADNRTCLSNCTASQFRCKTDKCIPFWWKCDTVDDCGDGSDEPDDCPEFRCQPGRFQCGTGLCALPAFICDGENDCGDNSDELNCDTHVCLSGQFKCTKNQKCIPVNLRCNGQDDCGDEEDERDCPENSCSPDYFQCKTTKHCISKLWVCDEDPDCADASDEANCDKKTCGPHEFQCKNNNCIPDHWRCDSQNDCSDNSDEENCKPQTCTLKDFLCANGDCVSSRFWCDGDFDCADGSDERNCETSCSKDQFRCSNGQCIPAKWKCDGHEDCKYGEDEKSCEPASPTCSSREYICASDGCISASLKCNGEYDCADGSDEMDCVTECKEDQFRCKNKAHCIPIRWLCDGIHDCVDGSDEENCERGGNICRADEFLCNNSLCKLHFWVCDGEDDCGDNSDEAPDMCVKFLCPSTRPHRCRNNRICLQSEQMCNGIDECGDNSDEDHCGGKLTYKARPCKKDEFACSNKKCIPMDLQCDRLDDCGDGSDEQGCRIAPTEYTCEDNVNPCGDDAYCNQIKTSVFCRCKPGFQRNMKNRQCEDLNECLVFGTCSHQCINVEGSYKCVCDQNFQERNNTCIAEGSEDQVLYIANDTDILGFIYPFNYSGDHQQISHIEHNSRITGMDVYYQRDMIIWSTQFNPGGIFYKRIHGREKRQANSGLICPEFKRPRDIAVDWVAGNIYWTDHSRMHWFSYYTTHWTSLRYSINVGQLNGPNCTRLLTNMAGEPYAIAVNPKRGMMYWTVVGDHSHIEEAAMDGTLRRILVQKNLQRPTGLAVDYFSERIYWADFELSIIGSVLYDGSNSVVSVSSKQGLLHPHRIDIFEDYIYGAGPKNGVFRVQKFGHGSVEYLALNIDKTKGVLISHRYKQLDLPNPCLDLACEFLCLLNPSGATCVCPEGKYLINGTCNDDSLLDDSCKLTCENGGRCILNEKGDLRCHCWPSYSGERCEVNHCSNYCQNGGTCVPSVLGRPTCSCALGFTGPNCGKTVCEDFCQNGGTCIVTAGNQPYCHCQPEYTGDRCQYYVCHHYCVNSESCTIGDDGSVECVCPTRYEGPKCEVDKCVRCHGGHCIINKDSEDIFCNCTNGKIASSCQLCDGYCYNGGTCQLDPETNVPVCLCSTNWSGTQCERPAPKSSKSDHISTRSIAIIVPLVLLVTLITTLVIGLVLCKRKRRTKTIRRQPIINGGINVEIGNPSYNMYEVDHDHNDGGLLDPGFMIDPTKARYIGGGPSAFKLPHTAPPIYLNSDLKGPLTAGPTNYSNPVYAKLYMDGQNCRNSLGSVDERKELLPKKIEIGIRETVA

SEQ ID NO: 8013 - protein, 782 aa, Homo sapiens [sequence omitted]

SEQ ID NO: 8014 - protein, 280 aa, Homo sapiens
  SITE 1: note = misc_feature - Xaa can be any naturally occurring amino acid
XRPTCSCALGFTGPNCGKTVCEDFCQNGGTCIVTAGNQPYCHCQPEYTGDRCQYYVCHHYCVNSESCTIGDDGSVECVCPTRYEGPKCEVDKCVRCHGGHCIINKDSEDIFCNCTNGKIASSCQLCDGYCYNGGTCQLDPETNVPVCLCSVGFKSQRCDQKENPCDHYCQNEGICTLTAFNEPRCKCSTNWSGTQCERPAPKSSKSDHISTRSIAIIVPLVLLVTLITTLVIGLVLCKRKRRTKTIRRQPIINGGINVEIGNPSYNMYEVDHDHNDGGLL

SEQ ID NO: 8015 - protein, 798 aa, Homo sapiens
  SITE 1: note = misc_feature - Xaa can be any naturally occurring amino acid
XSNKKCIPMDLQCDRLDDCGDGSDEQGCRIAPTEYTCEDNVNPCGDDAYCNQIKTSVFCRCKPGFQRNMKNRQCEDLNECLVFGTCSHQCINVEGSYKCVCDQNFQERNNTCIAEGSEDQVLYIANDTDILGFIYPFNYSGDHQQISHIEHNSRITGMDVYYQRDMIIWSTQFNPGGIFYKRIHGREKRQANSGLICPEFKRPRDIAVDWVAGNIYWTDHSRMHWFSYYTTHWTSLRYSINVGQLNGPNCTRLLTNMAGEPYAIAVNPKRGMMYWTVVGDHSHIEEAAMDGTLRRILVQKNLQRPTGLAVDYFSERIYWADFELSIIGSVLYDGSNSVVSVSSKQGLLHPHRIDIFEDYIYGAGPKNGVFRVQKFGHGSVEYLALNIDKTKGVLISHRYKQLDLPNPCLDLACEFLCLLNPSGATCVCPEGKYLINGTCNDDSLLDDSCKLTCENGGRCILNEKGDLRCHCWPSYSGERCEVNHCSNYCQNGGTCVPSVLGRPTCSCALGFTGPNCGKTVCEDFCQNGGTCIVTAGNQPYCHCQPEYTGDRCQYYVCHHYCVNSESCTIGDDGSVECVCPTRYEGPKCEVDKCVRCHGGHCIINKDSEDIFCNCTNGKIASSCQLCDGYCYNGGTCQLDPETNVPVCLCSTNWSGTQCERPAPKSSKSDHISTRSIAIIVPLVLLVTLITTLVIGLVLCKRKRRTKTIRRQPIINGGINVEIGNPSYNMYEVDHDHNDGGLLDPGFMIDPTKPTNYSNPVYAKLYMDGQNCRNSLGSVDERKELLPKKIEIGIRETVA

SEQ ID NO: 8016 - protein, 4655 aa, Homo sapiens
MDRGPAAVACTLLLALVACLAPASGQECDSAHFRCGSGHCIPADWRCDGTKDCSDDADEIGCAVVTCQQGYFKCQSEGQCIPNSWVCDQDQDCDDGSDERQDCSQSTCSSHQITCSNGQCIPSEYRCDHVRDCPDGADENDCQYPTCEQLTCDNGACYNTSQKCDWKVDCRDSSDEINCTEICLHNEFSCGNGECIPRAYVCDHDNDCQDGSDEHACNYPTCGGYQFTCPSGRCIYQNWVCDGEDDCKDNGDEDGCESGPHDVHKCSPREWSCPESGRCISIYKVCDGILDCPGREDENNTSTGKYCSMTLCSALNCQYQCHETPYGGACFCPPGYIINHNDSRTCVEFDDCQIWGICDQKCESRPGRHLCHCEEGYILERGQYCKANDSFGEASIIFSNGRDLLIGDIHGRSFRILVESQNRGVAVGVAFHYHLQRVFWTDTVQNKVFSVDINGLNIQEVLNVSVETPENLAVDWVNNKIYLVETKVNRIDMVNLDGSYRVTLITENLGHPRGIAVDPTVGYLFFSDWESLSGEPKLERAFMDGSNRKDLVKTKLGWPAGVTLDMISKRVYWVDSRFDYIETVTYDGIQRKTVVHGGSLIPHPFGVSLFEGQVFFTDWTKMAVLKANKFTETNPQVYYQASLRPYGVTVYHSLRQPYATNPCKDNNGGCEQVCVLSHRTDNDGLGFRCKCTFGFQLDTDERHCIAVQNFLIFSSQVAIRGIPFTLSTQEDVMVPVSGNPSFFVGIDFDAQDSTIFFSDMSKHMIFKQKIDGTGREILAANRVENVESLAFDWISKNLYWTDSHYKSISVMRLADKTRRTVVQYLNNPRSVVVHPFAGYLFFTDWFRPAKIMRAWSDGSHLLPVINTTLGWPNGLAIDWAASRLYWVDAYFDKIEHSTFDGLDRRRLGHIEQMTHPFGLAIFGEHLFFTDWRLGAIIRVRKADGGEMTVIRSGIAYILHLKSYDVNIQTGSNACNQPTHPNGDCSHFCFPVPNFQRVCGCPYGMRLASNHLTCEGDPTNEPPTEQCGLFSFPCKNGRCVPNYYLCDGVDDCHDNSDEQLCGTLNNTCSSSAFTCGHGECIPAHWRCDKRNDCVDGSDEHNCPTHAPASCLDTQYTCDNHQCISKNWVCDTDNDCGDGSDEKNCNSTETCQPSQFNCPNHRCIDLSFVCDGDKDCVDGSDEVGCVLNCTASQFKCASGDKCIGVTNRCDGVFDCSDNSDEAGCPTRPPGMCHSDEFQCQEDGICIPNFWECDGHPDCLYGSDEHNACVPKTCPSSYFHCDNGNCIHRAWLCDRDNDCGDMSDEKDCPTQPFRCPSWQWQCLGHNICVNLSVVCDGIFDCPNGTDESPLCNGNSCSDFNGGCTHECVQEPFGAKCLCPLGFLLANDSKTCEDIDECDILGSCSQHCYNMRGSFRCSCDTGYMLESDGRTCKVTASESLLLLVASQNKIIADSVTSQVHNIYSLVENGSYIVAVDFDSISGRIFWSDATQGKTWSAFQNGTDRRVVFDSSIILTETIAIDWVGRNLYWTDYALETIEVSKIDGSHRTVLISKNLTNPRGLALDPRMNEHLLFWSDWGHHPRIERASMDGSMRTVIVQDKIFWPCGLTIDYPNRLLYFMDSYLDYMDFCDYNGHHRRQVIASDLIIRHPYALTLFEDSVYWTDRATRRVMRANKWHGGNQSVVMYNIQWPLGIVAVHPSKQPNSVNPCAFSRCSHLCLLSSQGPHFYSCVCPSGWSLSPDLLNCLRDDQPFLITVRQHIIFGISLNPEVKSNDAMVPIAGIQNGLDVEFDDAEQYIYWVENPGEIHRVKTDGTNRTVFASISMVGPSMNLALDWISRNLYSTNPRTQSIEVLTLHGDIRYRKTLIANDGTALGVGFPIGITVDPARGKLYWSDQGTDSGVPAKIASANMDGTSVKTLFTGNLEHLECVTLDIEEQKLYWAVTGRGVIERGNVDGTDRMILVHQLSHPWGIAVHDSFLYYTDEQYEVIERVDKATGANKIVLRDNVPNLRGLQVYHRRNAAESSNGCSNNMNACQQICLPVPGGLFSCACATGFKLNPDNRSCSPYNSFIVVSMLSAIRGFSLELSDHSETMVPVAGQGRNALHVDVDVSSGFIYWCDFSSSVASDNAIRRIKPDGSSLMNIVTHGIGENGVRGIAVDWVAGNLYFTNAFVSETLIEVLRINTTYRRVLLKVTVDMPRHIVVDPKNRYLFWADYGQRPKIERSFLDCTNRTVLVSEGIVTPRGLAVDRSDGYVYWVDDSLDIIARIRINGENSEVIRYGSRYPTPYGITVFENSIIWVDRNLKKIFQASKEPENTEPPTVIRDNINWLRDVTIFDKQVQPRSPAEVNNNPCLENNGGCSHLCFALPGLHTPKCDCAFGTLQSDGKNCAISTENFLIFALSNSLRSLHLDPENHSPPFQTINVERTVMSLDYDSVSDRIYFTQNLASGVGQISYATLSSGIHTPTVIASGIGTADGIAFDWITRRIYYSDYLNQMINSMAEDGSNRTVIARVPKPRAIVLDPCQGYLYWADWDTHAKIERATLGGNFRVPIVNSSLVMPSGLTLDYEEDLLYWVDASLQRIERSTLTGVDREVIVNAAVHAFGLTLYGQYIYWTDLYTQRIYRANKYDGSGQIAMTTNLLSQPRGINTVVKNQKQQCNNPCEQFNGGCSHICAPGPNGAECQCPHEGNWYLANNRKHCIVDNGERCGASSFTCSNGRCISEEWKCDNDNDCGDGSDEMESVCALHTCSPTAFTCANGRCVQYSYRCDYYNDCGDGSDEAGCLFRDCNATTEFMCNNRRCIPREFICNGVDNCHDNNTSDEKNCPDRTCQSGYTKCHNSNICIPRVYLCDGDNDCGDNSDENPTYCTTHTCSSSEFQCASGRCIPQHWYCDQETDCFDASDEPASCGHSERTCLADEFKCDGGRCIPSEWICDGDNDCGDMSDEDKRHQCQNQNCSDSEFLCVNDRPPDRRCIPQSWVCDGDVDCTDGYDENQNCTRRTCSENEFTCGYGLCIPKIFRCDRHNDCGDYSDERGCLYQTCQQNQFTCQNGRCISKTFVCDEDNDCGDGSDELMHLCHTPEPTCPPHEFKCDNGRCIEMMKLCNHLDDCLDNSDEKGCGINECHDPSISGCDHNCTDTLTSFYCSCRPGYKLMSDKRTCVDIDECTEMPFVCSQKCENVIGSYICKCAPGYLREPDGKTCRQNSNIEPYLIFSNRYYLRNLTIDGYFYSLILEGLDNVVALDFDRVEKRLYWIDTQRQVIERMFLNKTNKETIINHRLPAAESLAVDWVSRKLYWLDARLDGLFVSDLNGGHRRMLAQHCVDANNTFCFDNPRGLALHPQYGYLYWADWGHRAYIGRVGMDGTNKSVIISTKLEWPNGITIDYTNDLLYWADAHLGYIEYSDLEGHHRHTVYDGALPHPFAITIFEDTIYWTDWNTRTVEKGNKYDGSNRQTLVNTTHRPFDIHVYHPYRQPIVSNPCGTNNGGCSHLCLIKPGGKGFTCECPDDFRTLQLSGSTYCMPMCSSTQFLCANNEKCIPIWWKCDGQKDCSDGSDELALCPQRFCRLGQFQCSDGNCTSPQTLCNAHQNCPDGSDEDRLLCENHHCDSNEWQCANKRCIPESWQCDTFNDCEDNSDEDSSHCASRTCRPGQFRCANGRCIPQAWKCDVDNDCGDHSDEPIEECMSSAHLCDNFTEFSCKTNYRCIPKWAVCNGVDDCRDNSDEQGCEERTCHPVGDFRCKNHHCIPLRWQCDGQNDCGDNSDEENCAPRECTESEFRCVNQQCIPSRWICDHYNDCGDNSDERDCEMRTCHPEYFQCTSGHCVHSELKCDGSADCLDASDEADCPTRFPDGAYCQATMFECKNHVCIPPYWKCDGDDDCGDGSDEELHLCLDVPCNSPNRFRCDNNRCIYSHEVCNGVDDCGDGTDETEEHCRKPTPKPCTEYEYKCGNGHCIPHDNVCDDADDCGDWSDELGCNKGKERTCAENICEQNCTQLNEGGFICSCTAGFETNVFDRTSCLDINECEQFGTCPQHCRNTKGSYECVCADGFTSMSDRPGKRCAAEGSSPLLLLPDNVRIRKYNLSSERFSEYLQDEEYIQAVDYDWDPKDIGLSVVYYTVRGEGSRFGAIKRAYIPNFESGRNNLVQEVDLKLKYVMQPDGIAVDWVGRHIYWSDVKNKRIEVAKLDGRYRKWLISTDLDQPAAIAVNPKLGLMFWTDWGKEPKIESAWMNGEDRNILVFEDLGWPTGLSIDYLNNDRIYWSDFKEDVIETIKYDGTDRRVIAKEAMNPYSLDIFEDQLYWISKEKGEVWKQNKFGQGKKEKTLVVNPWLTQVRIFHQLRYNKSVPNLCKQICSHLCLLRPGGYSCACPQGSSFIEGSTTECDAAIELPINLPPPCRCMHGGNCYFDETDLPKCKCPSGYTGKYCEMAFSKGISPGTTAVAVLLTILLIVVIGALAIAGFFHYRRTGSLLPALPKLPSLSSLVKPSENGNGVTFRSGADLNMDIGVSGFGPETAIDRSMAMSEDFVMEMGKQPIIFENPMYSARDSAVKVVQPIQVTVSENVDNKNYGSPINPSEIVPETNPTSPAADGTQVTKWNLFKRKSKQTTNFENPIYAQMENEQKESVAATPPPSPSLPAKPKPPSRRDPTPTYSATEDTFKDTANLVKEDSEV

SEQ ID NO: 8017 - protein, 1225 aa, Homo sapiens
MDRGPAAVACTLLLALVACLAPASGQECDSAHFRCGSGHCIPADWRCDGTKDCSDDADEIGCAVVTCQQGYFKCQSEGQCIPNSWVCDQDQDCDDGSDERQDCSQSTCSSHQITCSNGQCIPSEYRCDHVRDCPDGADENDCQYPTCEQLTCDNGACYNTSQKCDWKVDCRDSSDEINCTEICLHNEFSCGNGECIPRAYVCDHDNDCQDGSDEHACNYPTCGGYQFTCPSGRCIYQNWVCDGEDDCKDNGDEDGCESGPHDVHKCSPREWSCPESGRCISIYKVCDGILDCPGREDENNTSTGKYCSMTLCSALNCQYQCHETPYGGACFCPPGYIINHNDSRTCVEFDDCQIWGICDQKCESRPGRHLCHCEEGYILERGQYCKANDSFGEASIIFSNGRDLLIGDIHGRSFRILVESQNRGVAVGVAFHYHLQRVFWTDTVQNKVFSVDINGLNIQEVLNVSVETPENLAVDWVNNKIYLVETKVNRIDMVNLDGSYRVTLITENLGHPRGIAVDPTVGKTVVHGGSLIPHPFGVSLFEGQVFFTDWTKMAVLKANKFTETNPQVYYQASLRPYGVTVYHSLRQPYATNPCKDNNGGCEQVCVLSHRTDNDGLGFRCKCTFGFQLDTDERHCIGREILAANRVENVESLAFDWISKNLYWTDSHYKSISVMRLADKTRRTVVQYLNNPRSVVVHPFAGYLFFTDWFRPAKIMRAWSDGSHLLPVINTTLGWPNGLAIDWAASRLYWVDAYFDKIEHSTFDGLDRRRLGHIEQMTHPFGLAIFGEHLFFTDWRLGAIIRVRKADGGEMTVIRSGIAYILHLKSYDVNIQTGSNACNQPTHPNGDCSHFCFPVPNFQRVCGCPYGMRLASNHLTCEGDPTNEPPTEQCGLFSFPCKNGRCVPNYYLCDGVDDCHDNSDEQLCGTLNNTCSSSAFTCGHGECIPAHWRCDKRNDCVDGSDEHNCPTHAPASCLDTQYTCDNHQCISKNWVCDTDNDCGDGSDEKNCNSTETCQPSQFNCPNHRCIDLSFVCDGDKDCVDGSDEVGCVLNCTASQFKCASGDKCIGVTNRCDGVFDCSDNSDEAGCPTRPPGMCHSDEFQCQEDGICIPNFWECDGHPDCLYGSDEHNACVPKTCPSSYFHCDNGNCIHRAWLCDRDNDCGDMSDEKDCPTQPFRCPSWQWQCLGHNICVNLSVVCDGIFDCPNGTDESPLCSKFPDHSLLAINSF

SEQ ID NO: 8018 - protein, 1905 aa, Homo sapiens
MRRQWGALLLGALLCAHGLASSPECACGRSHFTCAVSALGECTCIPAQWQCDGDNDCGDHSDEDGCILPTCSPLDFHCDNGKCIRRSWVCDGDNDCEDDSDEQDCPPRECEEDEFPCQNGYCIRSLWHCDGDNDCGDNSDEQCDMRKCSDKEFRCSDGSCIAEHWYCDGDTDCKDGSDEENCPSAVPAPPCNLEEFQCAYGRCILDIYHCDGDDDCGDWSDESDCSSHQPCRSGEFMCDSGLCINAGWRCDGDADCDDQSDERNCTTSMCTAEQFRCHSGRCVRLSWRCDGEDDCADNSDEENCENTGSPQCALDQFLCWNGRCIGQRKLCNGVNDCGDNSDESPQQNCRPRTGEENCNVNNGGCAQKCQMVRGAVQCTCHTGYRLTEDGHTCQDVNECAEEGYCSQGCTNSEGAFQCWCETGYELRPDRRSCKALGPEPVLLFANRIDIRQVLPHRSEYTLLLNNLENAIALDFHHRRELVFWSDVTLDRILRANLNGSNVEEVVSTGLESPGGLAVDWVHDKLYWTDSGTSRIEVANLDGAHRKVLLWQNLEKPRAIALHPMEGTIYWTDWGNTPRIEASSMDGSGRRIIADTHLFWPNGLTIDYAGRRMYWVDAKHHVIERANLDGSHRKAVISQGLPHPFAITVFEDSLYWTDWHTKSINSANKFTGKNQEIIRNKLHFPMDIHTLHPQRQPAGKNRCGDNNGGCTHLCLPSGQNYTCACPTGFRKISSHACAQSLDKFLLFARRMDIRRISFDTEDLSDDVIPLADVRSAVALDWDSRDDHVYWTDVSTDTISRAKWDGTGQEVVVDTSLESPAGLAIDWVTNKLYWTDAGTDRIEVANTDGSMRTVLIWENLDRPRDIVVEPMGGYMYWTDWGASPKIERAGMDASGRQVIISSNLTWPNGLAIDYGSQRLYWADAGMKTIEFAGLDGSKRKVLIGSQLPHPFGLTLYGERIYWTDWQTKSIQSADRLTGLDRETLQENLENLMDIHVFHRRRPPVSTPCAMENGGCSHLCLRSPNPSGFSCTCPTGINLLSDGKTCSPGMNSFLIFARRIDIRMVSLDIPYFADVVVPINITMKNTIAIGVDPQEGKVYWSDSTLHRISRANLDGSQHEDIITTGLQTTDGLAVDAIGRKVYWTDTGTNRIEVGNLDGSMRKVLVWQNLDSPRAIVLYHEMGFMYWTDWGENAKLERSGMDGSDRAVLINNNLGWPNGLTVDKASSQLLWADAHTERIEAADLNGANRHTLVSPVQHPYGLTLLDSYIYWTDWQTRSIHRADKGTGSNVILVRSNLPGLMDMQAVDRAQPLGFNKCGSRNGGCSHLCLPRPSGFSCACPTGIQLKGDGKTCDPSPETYLLFSSRGSIRRISLDTSDHTDVHVPVPELNNVISLDYDSVDGKVYYTDVFLDVIRRADLNGSNMETVIGRGLKTTDGLAVDWVARNLYWTDTGRNTIEASRLDGSCRKVLINNSLDEPRAIAVFPRKGYLFWTDWGHIAKIERANLDGSERKVLINTDLGWPNGLTLDYDTRRIYWVDAHLDRIESADLNGKLRQVLVSHVSHPFALTQQDRWIYWTDWQTKSIQRVDKYSGRNKETVLANVEGLMDIIVVSPQRQTGTNACGVNNGGCTHLCFARASDFVCACPDEPDSRPCSLVPGLVPPAPRATGMSEKSPVLPNTPPTTLYSSTTRTRTSLEEVEGRCSERDARLGLCARSNDAVPAAPGEGLHISYAIGGLLSILLILVVIAALMLYRHKKSKFTDPGMGNLTYSNPSYRTSTQEVKIEAIPKPAMYNQLCYKKEGGPDHNYTKEKIKIVEGICLLSGDDAEWDDLKQLRSSRGGLLRDHVCMKTDTVSIQASSGSLDDTETEQLLQEEQSECSSVHTAATPERRGSLPDTGWKHERKLSSESQV

SEQ ID NO: 8019 - protein, 133 aa, Homo sapiens
MRRQWGALLLGALLCAHVLPTCSPLDFHCDNGKCIRRSWVCDGDNDCEDDSDEQDCPPRECEEDEFPCQNGYCIRSLWHCDGDNDCGDNSDEQCDMRKCSDKEFRCSDGSCIAEHWYCDGDTDCKDGSDEENC

SEQ ID NO: 8020 - protein, 357 aa, Homo sapiens
MAPRRVRSFLRGLPALLLLLLFLGPWPAASHGGKYSREKNQPKPSPKRESGEEFRMEKLNQLWEKAQRLHLPPVRLAELHADLKIQERDELAWKKLKLDGLDEDGEKEARLIRNLNVILAKYGLDGKKDARQVTSNSLSGTQEDGLDDPRLEKLWHKAKTSGKFSGEELDKLWREFLHHKEKVHEYNVLLETLSRTEEIHENVISPSDLSDIKGSVLHSRHTELKEKLRSINQGLDRLRRVSHQGYSTEAEFEEPRVIDLWDLAQSANLTDKELEAFREELKHFEAKIEKHNHYQKQLEIAHEKLRHAESVGDGERVSRSREKHALLEGRTKELGYTVKKHLQDLSGRISRARHNEL

SEQ ID NO: 8021 - protein, 105 aa, Homo sapiens
MAPRRVRSFLRGLPALLLLLLFLGPWPAASHGGKYSREKNQPKPSPKRESGEEFRMEKLNQLWEKAQRNLPVASLLRGQFLAVSWSVLLVAHRLLPFVRSCIFLP

SEQ ID NO: 8022 - protein, 104 aa, Homo sapiens
MRVVTIVILLCFCKAAELRKASPGSVRSRVNHGRAGGGRRGSNPVKRYAPGLPCDVYTYLHEKYLDCQERKLVYVLPGWPQDLLHMLLARNKIRTLKNNMFSKF

SEQ ID NO: 8023 - protein, 313 aa, Homo sapiens
MRVVTIVILLCFCKAAELRKASPGSVRSRVNHGRAGGGRRGSNPVKRYAPGLPCDVYTYLHEKYLDCQERKLVYVLPGWPQDLLHMLLARNKIRTLKNNMFSKFKKLKSLDLQQNEISKIESEAFFGLNKLTTLLLQHNQIKVLTEEVFIYTPLLSYLRLYDNPWHCTCEIETLISMLQIPRNRNLGNYAKCESPQEQKNKKLRQIKSEQLCNEEEKEQLDPKPQVSGRPPVIKPEVDSTFCHNYVFPIQTLDCKRKELKKVPNNIPPDIVKLDLSYNKINQLRPKEFEDVHELKKLNLSSNGIEFIDPGSLR

SEQ ID NO: 8024 - protein, 441 aa, Homo sapiens
MRVVTIVILLCFCKAAELRKASPGSVRSRVNHGRAGGGRRGSNPVKRYAPGLPCDVYTYLHEKYLDCQERKLVYVLPGWPQDLLHMLLARNKIRTLKNNMFSKFKKLKSLDLQQNEISKIESEAFFGLNKLTTLLLQHNQIKVLTEEVFIYTPLLSYLRLYDNPWHCTCEIETLISMLQIPRNRNLGNYAKCESPQEQKNKKLRQIKSEQLCNEEEKEQLDPKPQVSGRPPVIKPEVDSTFCHNYVFPIQTLDCKRKELKKVPNNIPPDIVKLDLSYNKINQLRPKEFEDVHELKKLNLSSNGIEFIDPAAFLGLTHLEELDLSNNSLQNFDYGVLEDLYFLKLLWLRDNPWRCDYNIHYLYYWLKHHYNVHFNGLECKTPEEYKGWSVGKYIRSYYEECPKDKLPAYPESFDQDTEDDEWEKKHRDHTAKKQSVIITIVG

SEQ ID NO: 8025 - protein, 186 aa, Homo sapiens
MRPQILLLLALLTLGLAAQHQDKVPCKMVDKKVSCQVLGLLQVPSVLPPDTETLDLSGNQLRSILASPLGFYTALRHLDLSTNEISFLQPGAFQALTHLEHLSLAHNRLAMATALSAGGLGPLPRVTSLDLSGNSLYSGLLERLLGEAPSLHTLSLAENSLTRLTRHTFRDMPALEQLDLHSNVLM

SEQ ID NO: 8026 - protein, 662 aa, Homo sapiens
MRPQILLLLALLTLGLAAQHQDKVPCKMVDKKVSCQVLGLLQVPSVLPPDTETLDLSGNQLRSILASPLGFYTALRHLDLSTNEISFLQPGAFQALTHLEHLSLAHNRLAMATALSAGGLGPLPRVTSLDLSGNSLYSGLLERLLGEAPSLHTLSLAENSLTRLTRHTFRDMPALEQLDLHSNVLMDIEDGAFEGLPRLTHLNLSRNSLTCISDFSLQQLRVLDLSCNSIEAFQTASQPQAEFQLTWLDLRENKLLHFPDLAALPRLIYLNLSNNLIRLPTGPPQDSKGIHAPSEGWSALPLSAPSGNASGRPLSQLLNLDLSYNEIELIPDSFLEHLTSLCFLNLSRNCLRTFEARRLGSLPCLMLLDLSHNALETLELGARALGSLRTLLLQGNALRDLPPYTFANLASLQRLNLQGNRVSPCGGPDEPGPSGCVAFSGITSLRSLSLVDNEIELLRAGAFLHTPLTELDLSSNPGLEVATGALGGLEASLEVLALQGNGLMVLQVDLPCFICLKRLNLAENRLSHLPAWTQAVSLEVLDLRNNSFSLLPGSAMGGLETSLRRLYLQGNPLSCCGNGWLAAQLHQGRVDVDATQDLICRFSSQEEVSLSHVRPEDCEKGGLKNINLIIILTFILVSAILLTTLAACCCVRRQKFNQQYKA

SEQ ID NO: 8027 - protein, 662 aa, Homo sapiens; identical to SEQ ID NO: 8026

SEQ ID NO: 8028 - protein, 662 aa, Homo sapiens; identical to SEQ ID NO: 8026

SEQ ID NO: 8029 - protein, 55 aa, Homo sapiens
MNLVDLWLTRSLSMCLLLQSFVLMILCFHSASMCPKGCLCSSSGGLNVTCSNANL

SEQ ID NO: 8030 - protein, 163 aa, Homo sapiens
MNLVDLWLTRSLSMCLLLQSFVLMILCFHSASMCPKGCLCSSSGGLNVTCSNANLKEIPRDLPPETVLLYLDSNQITSIPNEIFKDLHQLRVLNLSKNGIEFIDEHAFKGVAETLQTLDLSDNRIQSVHKNAFNNLKARARIANNPWHCDCTLQQVLRSMASN

SEQ ID NO: 8031 - protein, 259 aa, Homo sapiens
MNLVDLWLTRSLSMCLLLQSFVLMILCFHSASMCPKGCLCSSSGGLNVTCSNANLKEIPRDLPPETVLLYLDSNQITSIPNEIFKDLHQLRVLNLSKNGIEFIDEHAFKGVAETLQTLDLSDNRIQSVHKNAFNNLKARARIANNPWHCDCTLQQVLRSMASNHETAHNVICKTSVLDEHAGRPFLNAANDADLCNLPKKTTDYAMLVTMFGWFTMVISYVVYYVRQNQEDARRHLEYLKSLPSRQKKADEPDDISTVV

SEQ ID NO: 8032 - protein, 259 aa, Homo sapiens; identical to SEQ ID NO: 8031

SEQ ID NO: 8033 - protein, 259 aa, Homo sapiens; identical to SEQ ID NO: 8031

SEQ ID NO: 8034 - protein, 238 aa, Homo sapiens
MARARGSPCPPLPPGRMSWPHGALLFLWLFSPPLGAGGGGVAVTSAAGGGSPPATSCPVACSCSNQASRVICTRRDLAEVPASIPVNTRYLNLQENGIQVIRTDTFKHLRHLEILQLSKNLVRKIEVGAFNGLPSLNTLELFDNRLTTVPTQAFEYLSKLRELWLRNNPIESIPSYAFNRVPSLRRLDLGELKRLEYISEAAFEGLVNLRYLNLGMCNLKDIPNLTALVRLEELELSG

SEQ ID NO: 8035 - protein, 713 aa, Homo sapiens
MARARGSPCPPLPPGRMSWPHGALLFLWLFSPPLGAGGGGVAVTSAAGGGSPPATSCPVACSCSNQASRVICTRRDLAEVPASIPVNTRYLNLQENGIQVIRTDTFKHLRHLEILQLSKNLVRKIEVGAFNGLPSLNTLELFDNRLTTVPTQAFEYLSKLRELWLRNNPIESIPSYAFNRVPSLRRLDLGELKRLEYISEAAFEGLVNLRYLNLGMCNLKDIPNLTALVRLEELELSGNRLDLIRPGSFQGLTSLRKLWLMHAQVATIERNAFDDLKSLEELNLSHNNLMSLPHDLFTPLHRLERVHLNHNPWHCNCDVLWLSWWLKETVPSNTTCCARCHAPAGLKGRYIGELDQSHFTCYAPVIVEPPTDLNVTEGMAAELKCRTGTSMTSVNWLTPNGTLMTHGSYRVRISVLHDGTLNFTNVTVQDTGQYTCMVTNSAGNTTASATLNVSAVDPVAAGGTGSGGGGPGGSGGVGGGSGGYTYFTTVTVETLETQPGEEALQPRGTEKEPPGPTTDGVWGGGRPGDAAGPASSSTTAPAPRSSRPTEKAFTVPITDVTENALKDLDDVMKTTKIIIGCFVAITFMAAVMLVAFYKLRKQHQLHKHHGPTRTVEIINVEDELPAASAVSVAAAAAVASGGGVGGDSHLALPALERDHLNHHHYVAAAFKAHYSSNPSGGGCGGKGPPGLNSIHEPLLFKSGSKENVQETQI

SEQ ID NO: 8036 - protein, 713 aa, Homo sapiens; identical to SEQ ID NO: 8035

SEQ ID NO: 8037 - protein, 71 aa, Homo sapiens
MCGLQFSLPCLRLFLVVTCYLLLLLHKEILGCSSVCQLCTGRQINCRNLGLSSIPKNFPESTVFLLASKGP

SEQ ID NO: 8038 - protein, 622 aa, Homo sapiens
MCGLQFSLPCLRLFLVVTCYLLLLLHKEILGCSSVCQLCTGRQINCRNLGLSSIPKNFPESTVFLYLTGNNISYINESELTGLHSLVALYLDNSNILYVYPKAFVQLRHLYFLFLNNNFIKRLDPGIFKGLLNLRNLYLQYNQVSFVPRGVFNDLVSVQYLNLQRNRLTVLGSGTFVGMVALRILDLSNNNILRISESGFQHLENLACLYLGSNNLTKVPSNAFEVLKSLRRLSLSHNPIEAIQPFAFKGLANLEYLLLKNSRIRNVTRDGFSGINNLKHLILSHNDLENLNSDTFSLLKNLIYLKLDRNRIISIDNDTFENMGASLKILNLSFNNLTALHPRVLKPLSSLIHLQANSNPWECNCKLLGLRDWLASSAITLNIYCQNPPSMRGRALRYINITNCVTSSINVSRAWAVVKSPHIHHKTTALMMAWHKVTTNGSPLENTETENITFWERIPTSPAGRFFQENAFGNPLETTAVLPVQIQLTTSVTLNLEKNSALPNDAASMSGKTSLICTQEVEKLNEAFDILLAFFILACVLIIFLIYKVVQFKQKLKASENSRENRLEYYSFYQSARYNVTASICNTSPNSLESPGLEQIRLHKQIVPENEAQVILFEHSAL

SEQ ID NO: 8039 - protein, 708 aa, Homo sapiens
MKDMPLRIHVLLGLAITTLVQAVDKKVDCPRLCTCEIRPWFTPRSIYMEASTVDCNDLGLLTFPARLPANTQILLLQTNNIAKIEYSTDFPVNLTGLDLSQNNLSSVTNINVKKMPQLLSVYLEENKLTELPEKCLSELSNLQELYINHNLLSTISPGAFIGLHNLLRLHLNSNRLQMINSKWFDALPNLEILMIGENPIIRIKDMNFKPLINLRSLVIAGINLTEIPDNALVGLENLESISFYDNRLIKVPHVALQKVVNLKFLDLNKNPINRIRRGDFSNMLHLKELGINNMPELISIDSLAVDNLPDLRKIEATNNPRLSYIHPNAFFRLPKLESLMLNSNALSALYHGTIESLPNLKEISIHSNPIRCDCVIRWMNMNKTNIRFMEPDSLFCVDPPEFQGQNVRQVHFRDMMEICLPLIAPESFPSNLNVEAGSYVSFHCRATAEPQPEIYWITPSGQKLLPNTLTDKFYVHSEGTLDINGVTPKEGGLYTCIATNLVGADLKSVMIKVDGSFPQDNNGSLNIKIRDIQANSVLVSWKASSKILKSSVKWTAFVKTENSHAAQSARIPSDVKVYNLTHLNPSTEYKICIDIPTIYQKNRKKCVNVTTKGLHPDQKEYEKNNTTTLMACLGGLLGIIGVICLISCLSPEMNCDGGHSYVRNYLQKPTFALGELYPPLINLWEAGKEKSTSLKVKATVIGLPTNMS

SEQ ID NO: 8040 - protein, 708 aa, Homo sapiens; identical to SEQ ID NO: 8039

SEQ ID NO: 8041 - protein, 273 aa, Homo sapiens
MKDMPLRIHVLLGLAITTLVQAVDKKVDCPRLCTCEIRPWFTPRSIYMEASTVDCNDLGLLTFPARLPANTQILLLQTNNIAKIEYSTDFPVNLTGLDLSQNNLSSVTNINVKKMPQLLSVYLEENKLTELPEKCLSELSNLQELYINHNLLSTISPGAFIGLHNLLRLHLNSNRLQMINSKWFDALPNLEILMIGENPIIRIKDMNFKPLINLRSLVIAGINLTEIPDNALVGLENLESISFYDNRLIKVPHVALQKVVNLKFLDLNKNPIN

SEQ ID NO: 8042 - protein, 708 aa, Homo sapiens; identical to SEQ ID NO: 8039

SEQ ID NO: 8043 - protein, 109 aa, Homo sapiens
MDFLLLGLCLYWLLRRPSGVVLCLLGACFQMLPAAPSGCPQLCRCEGRLLYCEALNLTEAPHNLSGLLGLSLRYNSLSELRAGQFTGLMQLTWLYLDHNHICSVQGDAF

SEQ ID NO: 8044 - protein, 183 aa, Homo sapiens
MDFLLLGLCLYWLLRRPSGVVLCLLGACFQMLPAAPSGCPQLCRCEGRLLYCEALNLTEAPHNLSGLLGLSLRYNSLSELRAGQFTGLMQLTWLYLDHNHICSVQGDAFQKLRRVKELTLSSNQITQLPNTTFRPMPNLRSVDLSYNKLQALAPDLFHGLRKLTTLHMRANAIQFVPVRIFQD

SEQ ID NO: 8045 - protein, 223 aa, Homo sapiens
MDFLLLGLCLYWLLRRPSGVVLCLLGACFQMLPAAPSGCPQLCRCEGRLLYCEALNLTEAPHNLSGLLGLSLRYNSLSELRAGQFTGLMQLTWLYLDHNHICSVQGDAFQKLRRVKELTLSSNQITQLPNTTFRPMPNLRSVDLSYNKLQALAPDLFHGLRKLTTLHMRANAIQFVPVRIFQDCRSLKFLDIGYNQLKSLARNSFAGLFKLTELHLEHNDLVK

SEQ ID NO: 8046 - protein, 522 aa, Homo sapiens
MDFLLLGLCLYWLLRRPSGVVLCLLGACFQMLPAAPSGCPQLCRCEGRLLYCEALNLTEAPHNLSGLLGLSLRYNSLSELRAGQFTGLMQLTWLYLDHNHICSVQGDAFQKLRRVKELTLSSNQITQLPNTTFRPMPNLRSVDLSYNKLQALAPDLFHGLRKLTTLHMRANAIQFVPVRIFQDCRSLKFLDIGYNQLKSLARNSFAGLFKLTELHLEHNDLVKVNFAHFPRLISLHSLCLRRNKVAIVVSSLDWVWNLEKMDLSGNEIEYMEPHVFETVPHLQSLQLDSNRLTYIEPRILNSWKSLTSITLAGNLWDCGRNVCALASWLNNFQGRYDGNLQCASPEYAQGEDVLDAVYAFHLCEDGAEPTSGHLLSAVTNRSDLGPPASSATTLADGGEGQHDGTFEPATVALPGGEHAENAVQIHKVVTGTMALIFSFLIVVLVLYVSWKCFPASLRQLRQCFVTQRRKQKQKQTMHQMAAMSAQEYYVDYKPNHIEGALVIINEYGSCTCHQQPARECEV

SEQ ID NO: 8047 - protein, 522 aa, Homo sapiens; identical to SEQ ID NO: 8046

SEQ ID NO: 8048 - protein, 522 aa, Homo sapiens; identical to SEQ ID NO: 8046

SEQ ID NO: 8049 - protein, 522 aa, Homo sapiens; identical to SEQ ID NO: 8046

SEQ ID NO: 8050 - protein, 38 aa, Homo sapiens
MAVISAPRALLWPSEAADLAFTFQLPADYPSTPVLGLS

SEQ ID NO: 8051 - protein, 516 aa, Homo sapiens
MGLHFKWPLGAPMLAAIYAMSMVLKMLPALGMACPPKCRCEKLLFYCDSQGFHSVPNATDKGSLGLSLRHNHITELERDQFASFSQLTWLHLDHNQISTVKEDAFQGLYKLKELILSSNKIFYLPNTTFTQLINLQNLDLSFNQLSSLHPELFYGLRKLQTLHLRSNSLRTIPVRLFWDCRSLEFLDLSTNRLRSLARNGFAGLIKLRELHLEHNQLTKINFAHFLRLSSLHTLFLQWNKISNLTCGMEWTWGTLEKLDLTGNEIKAIDLTVFETMPNLKILLMDNNKLNSLDSKILNSLRSLTTVGLSGNLWECSARICALASWLGSFQGRWEHSILCHSPDHTQGEDILDAVHGFQLCWNLSTTVTVMATTYRDPTTEYTKRISSSSYHVGDKEIPTTAGIAVTTEEHFPEPDNAIFTQRVITGTMALLFSFFFIIFIVFISRKCCPPTLRRIRQCSMVQNHRQLRSQTRLHMSNMSDQGPYNEYEPTHEGPFIIINGYGQCKCQQLPYKECEV

SEQ ID NO: 8052 - protein, 77 aa, Homo sapiens
MVFISRKCCPPTLRRIRQCSMVQNHRQLRSQTRLHMSNMSDQGPYNEYEPTHEGPFIIINGYGQCKCQQLPYKECEV

SEQ ID NO: 8053 - protein, 590 aa, Homo sapiens
MGFHLITQLKGMSVVLVLLPTLLLVMLTGAQRACPKNCRCDGKIVYCESHAFADIPENISGGSQGLSLRFNSIQKLKSNQFAGLNQLIWLYLDHNYISSVDEDAFQGIRRLKELILSSNKITYLHNKTFHPVPNLRNLDLSYNKLQTLQSEQFKGLRKLIILHLRSNSLKTVPIRVFQDCRNLDFLDLGYNRLRSLSRNAFAGLLKLKELHLEHNQFSKINFAHFPRLFNLRSIYLQWNRIRSISQGLTWTWSSLHNLDLSGNDIQGIEPGTFKCLPNLQKLNLDSNKLTNISQETVNAWISLISITLSGNMWECSRSICPLFYWLKNFKGNKESTMICAGPKHIQGEKVSDAVETYNICSEVQVVNTERSHLVPQTPQKPLIIPRPTIFKPDVTQSTFETPSPSPGFQIPGAEQEYEHVSFHKIIAGSVALFLSVAMILLVIYVSWKRYPASMKQLQQHSLMKRRRKKARESERQMNSPLQEYYVDYKPTNSETMDISVNGSGPCTYTISGSRECEMPHHMKPLPYYSYDQPVIGYCQAHQPLHVTKGYETVSPEQDESPGLELGRDHSFIATIARSAAPAIYLERIAN

SEQ ID NO: 8054 - protein, 518 aa, Homo sapiens
MGFHLITQLKGMSVVLVLLPTLLLVMLTGAQRACPKNCRCDGKIVYCESHAFADIPENISGGSQGLSLRFNSIQKLKSNQFAGLNQLIWLYLDHNYISSVDEDAFQGIRRLKELILSSNKITYLHNKTFHPVPNLRNLDLSYNKLQTLQSEQFKGLRKLIILHLRSNSLKTVPIRVFQDCRNLDFLDLGYNRLRSLSRNAFAGLLKLKELHLEHNQFSKINFAHFPRLFNLRSIYLQWNRIRSISQGLTWTWSSLHNLDLSGNDIQGIEPGTFKCLPNLQKLNLDSNKLTNISQETVNAWISLISITLSGNMWECSRSICPLFYWLKNFKGNKESTMICAGPKHIQGEKVSDAVETYNICSEVQVVNTERSHLVPQTPQKPLIIPRPTIFKPDVTQSTFETPSPSPGFQIPGAEQEYEHVSFHKIIAGSVALFLSVAMILLVIYVSWKRYPASMKQLQQHSLMKRRRKKARESERQMNSPLQEYYVDYKPTNSETMDISVNGSGPCTYTISGSRECEV

SEQ ID NO: 8055 - protein, 590 aa, Homo sapiens; identical to SEQ ID NO: 8053

SEQ ID NO: 8056 - protein, 591 aa, Homo sapiens
MPGFHLITQLKGMSVVLVLLPTLLLVMLTGAQRACPKNCRCDGKIVYCESHAFADIPENISGGSQGLSLRFNSIQKLKSNQFAGLNQLIWLYLDHNYISSVDEDAFQGIRRLKELILSSNKITYLHNKTFHPVPNLRNLDLSYNKLQTLQSEQFKGLRKLIILHLRSNSLKTVPIRVFQDCRNLDFLDLGYNRLRSLSRNAFAGLLKLKELHLEHNQFSKINFAHFPRLFNLRSIYLQWNRIRSISQGLTWTWSSLHNLDLSGNDIQGIEPGTFKCLPNLQKLNLDSNKLTNISQETVNAWISLISITLSGNMWECSRSICPLFYWLKNFKGNKESTMICAGPKHIQGEKVSDAVETYNICSEVQVVNTERSHLVPQTPQKPLIIPRPTIFKPDVTQSTFETPSPSPGFQIPGAEQEYEHVSFHKIIAGSVALFLSVAMILLVIYVSWKRYPASMKQLQQHSLMKRRRKKARESERQMNSPLQEYYVDYKPTNSETMDISVNGSGPCTYTISGSRECEMPHHMKPLPYYSYDQPVIGYCQAHQPLHVTKGYETVSPEQDESPGLELGRDHSFIATIARSAAPAIYLERIAN

SEQ ID NO: 8057 - protein, 519 aa, Homo sapiens
MPGFHLITQLKGMSVVLVLLPTLLLVMLTGAQRACPKNCRCDGKIVYCESHAFADIPENISGGSQGLSLRFNSIQKLKSNQFAGLNQLIWLYLDHNYISSVDEDAFQGIRRLKELILSSNKITYLHNKTFHPVPNLRNLDLSYNKLQTLQSEQFKGLRKLIILHLRSNSLKTVPIRVFQDCRNLDFLDLGYNRLRSLSRNAFAGLLKLKELHLEHNQFSKINFAHFPRLFNLRSIYLQWNRIRSISQGLTWTWSSLHNLDLSGNDIQGIEPGTFKCLPNLQKLNLDSNKLTNISQETVNAWISLISITLSGNMWECSRSICPLFYWLKNFKGNKESTMICAGPKHIQGEKVSDAVETYNICSEVQVVNTERSHLVPQTPQKPLIIPRPTIFKPDVTQSTFETPSPSPGFQIPGAEQEYEHVSFHKIIAGSVALFLSVAMILLVIYVSWKRYPASMKQLQQHSLMKRRRKKARESERQMNSPLQEYYVDYKPTNSETMDISVNGSGPCTYTISGSRECEV

SEQ ID NO: 8058 - protein, 24 aa, Homo sapiens
MSVVLVLLPTLLLVMLTGAQRACP

SEQ ID NO: 8059 - protein, 93 aa, Homo sapiens
MLAPGSSPGQRGRLALQWRQVSWITCWIALYAVEALPTCPFSCKCDSRSLEVDCSGLGLTTVPPDVPAATRTLLLLNNKLSALPSWAFANLSS

SEQ ID NO: 8060 - protein, 96 aa, Homo sapiens
MLAPGSSPGQRGRLALQWRQVSWITCWIALYAVEALPTCPFSCKCDSRSLEVDCSGLGLTTVPPDVPAATRTLLLLNNKLSALPSWAFANLSSLQR

SEQ ID NO: 8061 - protein, 370 aa, Homo sapiens
MLAPGSSPGQRGRLALQWRQVSWITCWIALYAVEALPTCPFSCKCDSRSLEVDCSGLGLTTVPPDVPAATRTLLLLNNKLSALPSWAFANLSSLQRLDLSNNFLDRLPRSIFGDLTNLTELQLRNNSIRTLDRDLLRHSPLLRHLDLSINGLAQLPPGLFDGLLALRSLSLRSNRLQNLDRLTFEPLANLQLLQVGDNPWECDCNLREFKHWMEWFSYRGGRLDQLACTLPKELRGKDMRMVPMEMFNYCSQLEDENSSAGLDIPGPPCTKASPEPAKPKPGAEPEPEPSTACPQKQRHRPASVRRAMGTVIIAGVVCGVVCIMMVVAAAYGCIYASLMAKYHRELKKRQPLMGDPEGEHEDQKQISSVA

SEQ ID NO: 8062 - protein, 370 aa, Homo sapiens; identical to SEQ ID NO: 8061

SEQ ID NO: 8063 - protein, 370 aa, Homo sapiens; identical to SEQ ID NO: 8061

SEQ ID NO: 8064 - protein, 114 aa, Homo sapiens
DSVRTVRVVATKQGNAVTLGDYYQGRRITITGNADLTFDQTAWGDSGVYYCSVVSAQDLQGNNEAYAELIVLGRTSGVAELLPGFQAGPIEVYAAGKAATSGVPSIYAPSTYAH

SEQ ID NO: 8065 - protein, 493 aa, Homo sapiens
MALLAGGLSRGLGSHPAAAGRDAVVFVWLLLSTWCTAPARAIQVTVSNPYHVVILFQPVTLPCTYQMTSTPTQPIVIWKYKSFCRDRIADAFSPASVDNQLNAQLAAGNPGYNPYVECQDSVRTVRVVATKQGNAVTLGDYYQGRRITITGMYAAGKAATSGVPSIYAPSTYAHLSPAKTPPPPAMIPMGPAYNGYPGGYPGDVDRSSSAGGQGSYVPLLRDTDSSVASEVRSGYRIQASQQDDSMRVLYYMEKELANFDPSRPGPPSGRVERAMSEVTSLHEDDWRSRPSRGPALTPIRDEEWGGHSPRSPRGWDQEPAREQAGGGWRARRPRARSVDALDDLTPPSTAESGSRSPTSNGGRSRAYMPPRSRSRDDLYDQDDSRDFPRSRDPHYDDFRSRERPPADPRSHHHRTRDPRDNGSRSGDLPYDGRLLEEAVRKKGSEERRRPHKEEEEEAYYPPAPPPYSETDSQASRERRLKKNLALSRESLVV

SEQ ID NO: 8066 - protein, 601 aa, Homo sapiens
MALLAGGLSRGLGSHPAAAGRDAVVFVWLLLSTWCTAPARAIQVTVSNPYHVVILFQPVTLPCTYQMTSTPTQPIVIWKYKSFCRDRIADAFSPASVDNQLNAQLAAGNPGYNPYVECQDSVRTVRVVATKQGNAVTLGDYYQGRRITITGNADLTFDQTAWGDSGVYYCSVVSAQDLQGNNEAYAELIVLGRTSGVAELLPGFQAGPIEDWLFVVVVCLAAFLIFLLLGICWCQCCPHTCCCYVRCPCCPDKCCCPEALYAAGKAATSGVPSIYAPSTYAHLSPAKTPPPPAMIPMGPAYNGYPGGYPGDVDRSSSAGGQGSYVPLLRDTDSSVASEVRSGYRIQASQQDDSMRVLYYMEKELANFDPSRPGPPSGRVERAMSEVTSLHEDDWRSRPSRGPALTPIRDEEWGGHSPRSPRGWDQEPAREQAGGGWRARRPRARSVDALDDLTPPSTAESGSRSPTSNGGRSRAYMPPRSRSRDDLYDQDDSRDFPRSRDPHYDDFRSRERPPADPRSHHHRTRDPRDNGSRSGDLPYDGRLLEEAVRKKGSEERRRPHKEEEEEAYYPPAPPPYSETDSQASRERRLKKNLALSRESLVV

SEQ ID NO: 8067 - protein, 591 aa, Homo sapiens
MQQDGLGVGTRNGSGKGRSVHPSWPWCAPRPLRYFGRDARARRAQTAAMALAIQVTVSNPYHVVILFQPVTLPCTYQMTSTPTQPIVIWKYKSFCRDRIADAFSPASVDNQLNAQLAAGNPGYNPYVECQDSVRTVRVVATKQGNAVTLGDYYQGRRITITGNADLTFDQTAWGDSGVYYCSVVSAQDLQGNNEAYAELIVLGRTSGVAELLPGFQAGPIEDWLFVVVVCLAAFLIFLLLGICWCQCCPHTCCCYVRCPCCPDKCCCPEALYAAGKAATSGVPSIYAPSTYAHLSPAKTPPPPAMIPMGPAYNGYPGGYPGDVDRSSSVRSGYRIQASQQDDSMRVLYYMEKELANFDPSRPGPPSGRVERAMSEVTSLHEDDWRSRPSRGPALTPIRDEEWGGHSPRSPRGWDQEPAREQAGGGWRARRPRARSVDALDDLTPPSTAESGSRSPTSNGGRSRAYMPPRSRSRDDLYDQDDSRDFPRSRDPHYDDFRSRERPPADPRSHHHRTRDPRDNGSRSGDLPYDGRLLEEAVRKKGSEERRRPHKEEEEEAYYPPAPPPYSETDSQASRERRLKKNLALSRESLVV

SEQ ID NO: 8068 - protein, 630 aa, Homo sapiens
MQQDGLGVGTRNGSGKGRSVHPSWPWCAPRPLRYFGRDARARRAQTAAMALLAGGLSRGLGSHPAAAGRDAVVFVWLLLSTWCTAPARAIQVTVSNPYHVVILFQPVTLPCTYQMTSTPTQPIVIWKYKSFCRDRIADAFSPASVDNQLNAQLAAGNPGYNPYVECQDSVRTVRVVATKQGNAVTLGDYYQGRRITITGNADLTFDQTAWGDSGVYYCSVVSAQDLQGNNEAYAELIVLDWLFVVVVCLAAFLIFLLLGICWCQCCPHTCCCYVRCPCCPDKCCCPEALYAAGKAATSGVPSIYAPSTYAHLSPAKTPPPPAMIPMGPAYNGYPGGYPGDVDRSSSAGGQGSYVPLLRDTDSSVASEVRSGYRIQASQQDDSMRVLYYMEKELANFDPSRPGPPSGRVERAMSEVTSLHEDDWRSRPSRGPALTPIRDEEWGGHSPRSPRGWDQEPAREQAGGGWRARRPRARSVDALDDLTPPSTAESGSRSPTSNGGRSRAYMPPRSRSRDDLYDQDDSRDFPRSRDPHYDDFRSRERPPADPRSHHHRTRDPRDNGSRSGDLPYDGRLLEEAVRKKGSEERRRPHKEEEEEAYYPPAPPPYSETDSQASRERRLKKNLALSRESLVV

SEQ ID NO: 8069 - protein, 629 aa, Homo sapiens
MQQDGLGVGTRNGSGKGRSVHPSWPWCAPRPLRYFGRDARARRAQTAAMALLAGGLSRGLGSHPAAAGRDAVVFVWLLLSTWCTAPARAIQVTVSNPYHVVILFQPVTLPCTYQMTSTPTQPIVIWKYKSFCRDRIADAFSPASVDNQLNAQLAAGNPGYNPYVECQDSVRTVRVVATKQGNAVTLGDYYQGRRITITGNADLTFDQTAWGDSGVYYCSVVSAQDLQGNNEAYAELIVLDWLFVVVVCLAAFLIFLLLGICWCQCCPHTCCCYVRCPCCPDKCCCPEALYAAGKAATSGVPSIYAPSTYAHLSPAKTPPPPAMIPMGPAYNGYPGGYPGDVDRSSSAGGQGSYVPLLRDTDSSVASVRSGYRIQASQQDDSMRVLYYMEKELANFDPSRPGPPSGRVERAMSEVTSLHEDDWRSRPSRGPALTPIRDEEWGGHSPRSPRGWDQEPAREQAGGGWRARRPRARSVDALDDLTPPSTAESGSRSPTSNGGRSRAYMPPRSRSRDDLYDQDDSRDFPRSRDPHYDDFRSRERPPADPRSHHHRTRDPRDNGSRSGDLPYDGRLLEEAVRKKGSEERRRPHKEEEEEAYYPPAPPPYSETDSQASRERRLKKNLALSRESLVV

SEQ ID NO: 8070 - protein, 649 aa, Homo sapiens
MQQDGLGVGTRNGSGKGRSVHPSWPWCAPRPLRYFGRDARARRAQTAAMALLAGGLSRGLGSHPAAAGRDAVVFVWLLLSTWCTAPARAIQVTVSNPYHVVILFQPVTLPCTYQMTSTPTQPIVIWKYKSFCRDRIADAFSPASVDNQLNAQLAAGNPGYNPYVECQDSVRTVRVVATKQGNAVTLGDYYQGRRITITGNADLTFDQTAWGDSGVYYCSVVSAQDLQGNNEAYAELIVLGRTSGVAELLPGFQAGPIEDWLFVVVVCLAAFLIFLLLGICWCQCCPHTCCCYVRCPCCPDKCCCPEALYAAGKAATSGVPSIYAPSTYAHLSPAKTPPPPAMIPMGPAYNGYPGGYPGDVDRSSSAGGQGSYVPLLRDTDSSVASEVRSGYRIQASQQDDSMRVLYYMEKELANFDPSRPGPPSGRVERAMSEVTSLHEDDWRSRPSRGPALTPIRDEEWGGHSPRSPRGWDQEPAREQAGGGWRARRPRARSVDALDDLTPPSTAESGSRSPTSNGGRSRAYMPPRSRSRDDLYDQDDSRDFPRSRDPHYDDFRSRERPPADPRSHHHRTRDPRDNGSRSGDLPYDGRLLEEAVRKKGSEERRRPHKEEEEEAYYPPAPPPYSETDSQASRERRLKKNLALSRESLVV

SEQ ID NO: 8071 - protein, 649 aa, Homo sapiens; identical to SEQ ID NO: 8070

SEQ ID NO: 8072 - protein, 581 aa, Homo sapiens
MQQDGLGVGTRNGSGKGRSVHPSWPWCAPRPLRYFGRDARARRAQTAAMALLAGGLSRGLGSHPAAAGRDAVVFVWLLLSTWCTAPARAIQVTVSNPYHVVILFQPVTLPCTYQMTSTPTQPIVIWKYKSFCRDRIADAFSPASVDNQLNAQLAAGNPGYNPYVECQDSVRTVRVVATKQGNAVTLGDYYQGRRITITGNADLTFDQTAWGDSGVYYCSVVSAQDLQGNNEAYAELIVLVYAAGKAATSGVPSIYAPSTYAHLSPAKTPPPPAMIPMGPAYNGYPGGYPGDVDRSSSAGGQGSYVPLLRDTDSSVASEVRSGYRIQASQQDDSMRVLYYMEKELANFDPSRPGPPSGRVERAMSEVTSLHEDDWRSRPSRGPALTPIRDEEWGGHSPRSPRGWDQEPAREQAGGGWRARRPRARSVDALDDLTPPSTAESGSRSPTSNGGRSRAYMPPRSRSRDDLYDQDDSRDFPRSRDPHYDDFRSRERPPADPRSHHHRTRDPRDNGSRSGDLPYDGRLLEEAVRKKGSEERRRPHKEEEEEAYYPPAPPPYSETDSQASRERRLKKNLALSRESLVV

SEQ ID NO: 8073 - protein, 51 aa, Homo sapiens
MQQDGLGVGTRNGSGKGRSVHPSWPWCAPRPLSSCQGHPGDRVQPLPRGDP

SEQ ID NO: 8074 - protein, 139 aa, Homo sapiens
MTSTPTQPIVIWKYKSFCRDRIADAFSPASVDNQLNAQLAAGNPGYNPYVECQDSVRTVRVVATKQGNAVTLGDYYQGRRITITGNADLTFDQTAWGDSGVYYCSVVSAQDLQGNNEAYAELIVLDWLFVVVVCLAAFL

SEQ ID NO: 8075 - protein, 35 aa, Homo sapiens
MLSRNDAPSVLVPGPGLLRAGTPLCISAEAASAQQ

SEQ ID NO: 8076 - protein, 36 aa, Homo sapiens
MLSRNDDICIYGGLGLGGLLLLAVVLLSACLCWLHR

SEQ ID NO: 8077 - protein, 66 aa, Homo sapiens
MLSRNDDICIYGGLGLGGLLLLAVVLLSACLCWLHRRAPSVLVPGPGLLRAGTPLCISAEAASAQQ

SEQ ID NO: 8078 - protein, 44 aa, Homo sapiens
MLSRNDDICIYGGLGLGGLLLLAVVLLSACLCWLHRREAASAQQ

SEQ ID NO: 8079 - protein, 59 aa, Homo sapiens
MLSRNDDICIYGGLGLGGLLLLAVVLLSACLCWLHRRGPGLLRAGTPLCISAEAASAQQ

SEQ ID NO: 8080 - protein, 97 aa, Homo sapiens
MLSRNDDICIYGGLGLGGLLLLAVVLLSACLCWLHRRVKRLERSWAQGSSEQELHYASLQRLPVPSSEGPDLRGRDKRGTKEDPRADYACIAENKPT

SEQ ID NO: 8081 - protein, 104 aa, Homo sapiens
MLSRNDDICIYGGLGLGGLLLLAVVLLSACLCWLHRRVKRLERSWHLLSWSQAQGSSEQELHYASLQRLPVPSSEGPDLRGRDKRGTKEDPRADYACIAENKPT

SEQ ID NO: 8082 - protein, 66 aa, Homo sapiens
MLSRNDDICIYGGLGLGGLLLLAVVLLSACLCWLHRRVKRLERSWRLPVPSSEGPDLRGRDKRGTK

SEQ ID NO: 8083 - protein, 13 aa, Homo sapiens
MLSRNDEAASAQQ

SEQ ID NO: 8084 - protein, 28 aa, Homo sapiens
MLSRNDGPGLLRAGTPLCISAEAASAQQ

SEQ ID NO: 8085 - protein, 28 aa, Homo sapiens
MLSRNDGPGLLRAGTPLCISAEAASAQQ

SEQ ID NO: 8086 - protein, 28 aa, Homo sapiens
MLSRNDGPGLLRAGTPLCISAEAASAQQ

SEQ ID NO: 8087 - protein, 66 aa, Homo sapiens
MLSRNDVKRLERSWAQGSSEQELHYASLQRLPVPSSEGPDLRGRDKRGTKEDPRADYACIAENKPT

SEQ ID NO: 8088 - protein, 66 aa, Homo sapiens; identical to SEQ ID NO: 8087

SEQ ID NO: 8089 - protein, 73 aa, Homo sapiens
MLSRNDVKRLERSWHLLSWSQAQGSSEQELHYASLQRLPVPSSEGPDLRGRDKRGTKEDPRADYACIAENKPT

SEQ ID NO: 8090 - protein, 51 aa, Homo sapiens
MLSRNDVKRLERSWRLPVPSSEGPDLRGRDKRGTKEDPRADYACIAENKPT

SEQ ID NO: 8091 - protein, 60 aa, Homo sapiens
  SITE 1: note = misc_feature - Xaa can be any naturally occurring amino acid
XDICIYGGLGLGGLLLLAVVLLSACLCWLHRREAGEELGPGLLRAGTPLCISAEAASAQQ

SEQ ID NO: 8092 - protein, 35 aa, Homo sapiens
  SITE 1: note = misc_feature - Xaa can be any naturally occurring amino acid
XGGLLLLAVVLLSACLCWLHRREAGEELEAASAQQ

SEQ ID NO: 8093 - protein, 205 aa, Homo sapiens
MTPPERLFLPRVCGTTLHLLLLGLLLVLLPGAQGLPGVGLTPSAAQTARQHPKMHLAHSTLKPAAHLIGDPSKQNSLLWRANTDRAFLQDGFSLSNNSLLVPTSGIYFVYSQVVFSGKAYSPKATSSPLYLAHEVQLFSSQYPFHVPLLSSQKMVYPGLQEPWLHSMYHGAAFQLTQGDQLSTHTDGIPHLVLSPSTVFFGAFAL

SEQ ID NO: 8094 - protein, 205 aa, Homo sapiens; identical to SEQ ID NO: 8093

SEQ ID NO: 8095 - protein, 270 aa, Homo sapiens
ECQHRHLCAHGQCRNTEGSFQCVCDQGYRASGLGDHCEDINECLEDKSVCQRGDCINTAGSYDCTCPDGFQLDDNKTCQDINECEHPGLCGPQGECLNTEGSFHCVCQQGFSISADGRTCEDVNECELLSGVCGEAFCENVEGSFLCVCADENQEYSPMTGQCRSRTSTDLDVDVDQPKEEKKECYYNLNDASLCDNVLAPNVTKQECCCTSGVGWGDNCEIFPCPVLGTAEFTEMCPKGKGFVPAGESSSEAGGENYKDADECLLFGQE

SEQ ID NO: 8096 - protein, 1721 aa, Homo sapiens
MAGAWLRWGLLLWAGLLASSAHGRLRRITYVVHPGPGLAAGALPLSGPPRSRTFNVALNARYSRSSAAAGAPSRASPGVPSERTRRTSKPGGAALQGLRPPPPPPPEPARPAVPGGQLHPNPGGHPAAAPFTKQGRQVVRSKVPQETQSGGGSRLQVHQKQQLQGVNVCGGRCCHGWSKAPGSQRCTKPSCVPPCQNGGMCLRPQLCVCKPGTKGKACETIAAQDTSSPVFGGQSPGAASSWGPPEQAAKHTSSKKADTLPRVSPVAQMTLTLKPKPSVGLPQQIHSQVTPLSSQSVVIHHGQTQEYVLKPKYFPAQKGISGEQSTEGSFPLRYVQDQVAAPFQLSNHTGRIKVVFTPSICKVTCTKGSCQNSCEKGNTTTLISENGHAADTLTATNFRVVICHLPCMNGGQCSSRDKCQCPPNFTGKLCQIPVHGASVPKLYQHSQQPGKALGTHVIHSTHTLPLTVTSQQGVKVKFPPNIVNIHVKHPPEASVQIHQVSRIDGPTGQKTKEAQPGQSQVSYQGLPVQKTQTIHSTYSHQQVIPHVYPVAAKTQLGRCFQETIGSQCGKALPGLSKQEDCCGTVGTSWGFNKCQKCPKKPSYHGYNQMMECLPGYKRVNNTFCQDINECQLQGVCPNGECLNTMGSYRCTCKIGFGPDPTFSSCVPDPPVISEEKGPCYRLVSSGRQCMHPLSVHLTKQLCCCSVGKAWGPHCEKCPLPGTAAFKEICPGGMGYTVSGVHRRRPIHHHVGKGPVFVKPKNTQPVAKSTHPPPLPAKEEPVEALTFSREHGPGVAEPEVATAPPEKEIPSLDQEKTKLEPGQPQLSPGISTIHLHPQFPVVIEKTSPPVPVEVAPEASTSSASQVIAPTQVTEINECTVNPDICGAGHCINLPVRYTCICYEGYRFSEQQRKCVDIDECTQVQHLCSQGRCENTEGSFLCICPAGFMASEEGTNCIDVDECLRPDVCGEGHCVNTVGAFRCEYCDSGYRMTQRGRCEDIDECLNPSTCPDEQCVNSPGSYQCVPCTEGFRGWNGQCLDVDECLEPNVCANGDCSNLEGSYMCSCHKGYTRTPDHKHCRDIDECQQGNLCVNGQCKNTEGSFRCTCGQGYQLSAAKDQCEDIDECQHRHLCAHGQCRNTEGSFQCVCDQGYRASGLGDHCEDINECLEDKSVCQRGDCINTAGSYDCTCPDGFQLDDNKTCQDINECEHPGLCGPQGECLNTEGSFHCVCQQGFSISADGRTCEDIDECVNNTVCDSHGFCDNTAGSFRCLCYQGFQAPQDGQGCVDVNECELLSGVCGEAFCENVEGSFLCVCADENQEYSPMTGQCRSRTSTDLDVDVDQPKEEKKECYYNLNDASLCDNVLAPNVTKQECCCTSGVGWGDNCEIFPCPVLGTAEFTEMCPKGKGFVPAGESSSEAGGENYKDADECLLFGQEICKNGFCLNTRPGYECYCKQGTYYDPVKLQCFDMDECQDPSSCIDGQCVNTEGSYNCFCTHPMVLDASEKRCIRPAESNEQIEETDVYQDLCWEHLSDEYVCSRPLVGKQTTYTECCCLYGEAWGMQCALCPLKDSDDYAQLCNIPVTGRRQPYGRDALVDFSEQYTPEADPYFIQDRFLNSFEELQAEECGILNGCENGRCVRVQEGYTCDCFDGYHLDTAKMTCVDVNECDELNNRMSLCKNAKCINTDGSYKCLCLPGYVPSDKPNYCTPLNTALNLEKDSDLE

SEQ ID NO: 8097 - protein, 1395 aa, Homo sapiens
MDTKLMCLLFFFSLPPLLVSNHTGRIKVVFTPSICKVTCTKGSCQNSCEKGNTTTLISENGHAADTLTATNFRVVICHLPCMNGGQCSSRDKCQCPPNFTGKLCQIPVHGASVPKLYQHSQQPGKALGTHVIHSTHTLPLTVTSQQGVKVKFPPNIVNIHVKHPPEASVQIHQVSRIDGPTGQKTKEAQPGQSQVSYQGLPVQKTQTIHSTYSHQQVIPHVYPVAAKTQLGRCFQETIGSQCGKALPGLSKQEDCCGTVGTSWGFNKCQKCPKKPSYHGYNQMMECLPGYKRVNNTFCQDINECQLQGVCPNGECLNTMGSYRCTCKIGFGPDPTFSSCVPDPPVISEEKGPCYRLVSSGRQCMHPLSVHLTKQLCCCSVGKAWGPHCEKCPLPGTAAFKEICPGGMGYTVSGVHRRRPIHHHVGKGPVFVKPKNTQPVAKSTHPPPLPAKEEPVEALTFSREHGPGVAEPEVATAPPEKEIPSLDQEKTKLEPGQPQLSPGISTIHLHPQFPVVIEKTSPPVPVEVAPEASTSSASQVIAPTQVTEINECTVNPDICGAGHCINLPVRYTCICYEGYRFSEQQRKCVDIDECTQVQHLCSQGRCENTEGSFLCICPAGFMASEEGTNCIDVDECLRPDVCGEGHCVNTVGAFRCEYCDSGYRMTQRGRCEDIDECLNPSTCPDEQCVNSPGSYQCVPCTEGFRGWNGQCLDVDECLEPNVCANGDCSNLEGSYMCSCHKGYTRTPDHKHCRDIDECQQGNLCVNGQCKNTEGSFRCTCGQGYQLSAAKDQCEDIDECQHRHLCAHGQCRNTEGSFQCVCDQGYRASGLGDHCEDINECLEDKSVCQRGDCINTAGSYDCTCPDGFQLDDNKTCQDINECEHPGLCGPQGECLNTEGSFHCVCQQGFSISADGRTCEDIDECVNNTVCDSHGFCDNTAGSFRCLCYQGFQAPQDGQGCVDVNECELLSGVCGEAFCENVEGSFLCVCADENQEYSPMTGQCRSRTSTDLDVDVDQPKEEKKECYYNLNDASLCDNVLAPNVTKQECCCTSGVGWGDNCEIFPCPVLGTAEFTEMCPKGKGFVPAGESSSEAGGENYKDADECLLFGQEICKNGFCLNTRPGYECYCKQGTYYDPVKLQCFDMDECQDPSSCIDGQCVNTEGSYNCFCTHPMVLDASEKRCIRPAESNEQIEETDVYQDLCWEHLSDEYVCSRPLVGKQTTYTECCCLYGEAWGMQCALCPLKDSDDYAQLCNIPVTGRRQPYGRDALVDFSEQYTPEADPYFIQDRFLNSFEELQAEECGILNGCENGRCVRVQEGYTCDCFDGYHLDTAKMTCVDVNECDELNNRMSLCKNAKCINTDGSYKCLCLPGYVPSDKPNYCTPLNTALNLEKDSDLE

SEQ ID NO: 8098 - protein, 1353 aa, Homo sapiens
MDTKLMCLLFFFSLPPLLVSNHTGRIKVVFTPSICKVTCTKGSCQNSCEKGNTTTLISENGHAADTLTATNFRVVICHLPCMNGGQCSSRDKCQCPPNFTGKLCQIPVHGASVPKLYQHSQQPGKALGTHVIHSTHTLPLTVTSQQGVKVKFPPNIVNIHVKHPPEASVQIHQVSRIDGPTGQKTKEAQPGQSQVSYQGLPVQKTQTIHSTYSHQQVIPHVYPVAAKTQLGRCFQETIGSQCGKALPGLSKQEDCCGTVGTSWGFNKCQKCPKKPSYHGYNQMMECLPGYKRVNNTFCQDINECQLQGVCPNGECLNTMGSYRCTCKIGFGPDPTFSSCVPDPPVISEEKGPCYRLVSSGRQCMHPLSVHLTKQLCCCSVGKAWGPHCEKCPLPGTAAFKEICPGGMGYTVSGVHRRRPIHHHVGKGPVFVKPKNTQPVAKSTHPPPLPAKEEPVEALTFSREHGPGVAEPEVATAPPEKEIPSLDQEKTKLEPGQPQLSPGISTIHLHPQFPVVIEKTSPPVPVEVAPEASTSSASQVIAPTQVTEINECTVNPDICGAGHCINLPVRYTCICYEGYRFSEQQRKCVDIDECTQVQHLCSQGRCENTEGSFLCICPAGFMASEEGTNCIDVDECLRPDVCGEGHCVNTVGAFRCEYCDSGYRMTQRGRCEDIDECLNPSTCPDEQCVNSPGSYQCVPCTEGFRGWNGQCLDVDECLEPNVCANGDCSNLEGSYMCSCHKGYTRTPDHKHCRDIDECQQGNLCVNGQCKNTEGSFRCTCGQGYQLSAAKDQCEDIDECQHRHLCAHGQCRNTEGSFQCVCDQGYRASGLGDHCEDINECLEDKSVCQRGDCINTAGSYDCTCPDGFQLDDNKTCQDINECEHPGLCGPQGECLNTEGSFHCVCQQGFSISADGRTCEDVNECELLSGVCGEAFCENVEGSFLCVCADENQEYSPMTGQCRSRTSTDLDVDVDQPKEEKKECYYNLNDASLCDNVLAPNVTKQECCCTSGVGWGDNCEIFPCPVLGTAEFTEMCPKGKGFVPAGESSSEAGGENYKDADECLLFGQEICKNGFCLNTRPGYECYCKQGTYYDPVKLQCFDMDECQDPSSCIDGQCVNTEGSYNCFCTHPMVLDASEKRCIRPAESNEQIEETDVYQDLCWEHLSDEYVCSRPLVGKQTTYTECCCLYGEAWGMQCALCPLKDSDDYAQLCNIPVTGRRQPYGRDALVDFSEQYTPEADPYFIQDRFLNSFEELQAEECGILNGCENGRCVRVQEGYTCDCFDGYHLDTAKMTCVDVNECDELNNRMSLCKNAKCINTDGSYKCLCLPGYVPSDKPNYCTPLNTALNLEKDSDLE

SEQ ID NO: 8099 - protein, 1342 aa, Homo sapiens
MDTKLMCLLFFFSLPPLLVSNHTGRIKVVFTPSICKVTCTKGSCQNSCEKGNTTTLISENGHAADTLTATNFRVVICHLPCMNGGQCSSRDKCQCPPNFTGKLCQIPVHGASVPKLYQHSQQPGKALGTHVIHSTHTLPLTVTSQQGVKVKFPPNIVNIHVKHPPEASVQIHQVSRIDGPTGQKTKEAQPGQSQVSYQGLPVQKTQTIHSTYSHQQVIPHVYPVAAKTQLGRCFQETIGSQCGKALPGLSKQEDCCGTVGTSWGFNKCQKCPKKPSYHGYNQMMECLPGYKRVNNTFCQDINECQLQGVCPNGECLNTMGSYRCTCKIGFGPDPTFSSCVPDPPVISEEKGPCYRLVSSGRQCMHPLSVHLTKQLCCCSVGKAWGPHCEKCPLPGTAKEEPVEALTFSREHGPGVAEPEVATAPPEKEIPSLDQEKTKLEPGQPQLSPGISTIHLHPQFPVVIEKTSPPVPVEVAPEASTSSASQVIAPTQVTEINECTVNPDICGAGHCINLPVRYTCICYEGYRFSEQQRKCVDIDECTQVQHLCSQGRCENTEGSFLCICPAGFMASEEGTNCIDVDECLRPDVCGEGHCVNTVGAFRCEYCDSGYRMTQRGRCEDIDECLNPSTCPDEQCVNSPGSYQCVPCTEGFRGWNGQCLDVDECLEPNVCANGDCSNLEGSYMCSCHKGYTRTPDHKHCRDIDECQQGNLCVNGQCKNTEGSFRCTCGQGYQLSAAKDQCEDIDECQHRHLCAHGQCRNTEGSFQCVCDQGYRASGLGDHCEDINECLEDKSVCQRGDCINTAGSYDCTCPDGFQLDDNKTCQDINECEHPGLCGPQGECLNTEGSFHCVCQQGFSISADGRTCEDIDECVNNTVCDSHGFCDNTAGSFRCLCYQGFQAPQDGQGCVDVNECELLSGVCGEAFCENVEGSFLCVCADENQEYSPMTGQCRSRTSTDLDVDVDQPKEEKKECYYNLNDASLCDNVLAPNVTKQECCCTSGVGWGDNCEIFPCPVLGTAEFTEMCPKGKGFVPAGESSSEAGGENYKDADECLLFGQEICKNGFCLNTRPGYECYCKQGTYYDPVKLQCFDMDECQDPSSCIDGQCVNTEGSYNCFCTHPMVLDASEKRCIRPAESNEQIEETDVYQDLCWEHLSDEYVCSRPLVGKQTTYTECCCLYGEAWGMQCALCPLKDSDDYAQLCNIPVTGRRQPYGRDALVDFSEQYTPEADPYFIQDRFLNSFEELQAEECGILNGCENGRCVRVQEGYTCDCFDGYHLDTAKMTCVDVNECDELNNRMSLCKNAKCINTDGSYKCLCLPGYVPSDKPNYCTPLNTALNLEKDSDLE

SEQ ID NO: 8100 - protein, 1340 aa, Homo sapiens
MDTKLMCLLFFFSLPPLLVSNHTGRIKVVFTPSICKVTCTKGSCQNSCEKGNTTTLISENGHAADTLTATNFRVVICHLPCMNGGQCSSRDKCQCPPNFTGKLCQIPVHGASVPKLYQHSQQPGKALGTHVIHSTHTLPLTVTSQQGVKVKFPPNIVNIHVKHPPEASVQIHQVSRIDGPTGQKTKEAQPGQSQVSYQGLPVQKTQTIHSTYSHQQVIPHVYPVAAKTQLGRCFQETIGSQCGKALPGLSKQEDCCGTVGTSWGFNKCQKCPKKPSYHGYNQMMECLPGYKRVNNTFCQDINECQLQGVCPNGECLNTMGSYRCTCKIGFGPDPTFSSCVPDPPVISEEKGPCYRLVSSGRQCMHPLSVHLTKQLCCCSVGKAWGPHCEKCPLPGTAKEEPVEALTFSREHGPGVAEPEVATAPPEKEIPSLDQEKTKLEPGQPQLSPGISTIHLHPQFPVVIEKTSPPVPVEVAPEASTSSASQVIAPTQVTEINECTVNPDICGAGHCINLPVRYTCICYEGYRFSEQQRKCVDIDECTQVQHLCSQGRCENTEGSFLCICPAGFMASEEGTNCIDVDECLRPDVCGEGHCVNTVGAFRCEYCDSGYRMTQRGRCEDIDECLNPSTCPDEQCVNSPGSYQCVPCTEGFRGWNGQCLDVDECLEPNVCANGDCSNLEGSYMCSCHKGYTRTPDHKHCRDIDECQQGNLCVNGQCKNTEGSFRCTCGQGYQLSAAKDQCEDIDECQHRHLCAHGQCRNTEGSFQCVCDQGYRASGLGDHCEDINECLEDKSVCQRGDCINTAGSYDCTCPDGFQLDDNKTCQDINECEHPGLCGPQGECLNTEGSFHCVCQQGFSISADGRTCEDIDECVNNTVCDSHGFCDNTAGSFRCLCYQGFQAPQDGQGCVDVNECELLSGVCGEAFCENVEGSFLCVCADENQEYSPMTGQCRSRTSTDVDVDQPKEEKKECYYNLNDASLCDNVLAPNVTKQECCCTSGVGWGDNCEIFPCPVLGTAEFTEMCPKGKGFVPAGESSSEAGGENYKDADECLLFGQEICKNGFCLNTRPGYECYCKQGTYYDPVKLQCFDMDECQDPSSCIDGQCVNTEGSYNCFCTHPMVLDASEKRCIRPAESNEQIEETDVYQDLCWEHLSDEYVCSRPLVGKQTTYTECCCLYGEAWGMQCALCPLKDSDDYAQLCNIPVTGRRQPYGRDALVDFSEQYTPEADPYFIQDRFLNSFEELQAEECGILNGCENGRCVRVQEGYTCDCFDGYHLDTAKMTCVDVNECDELNNRMSLCKNAKCINTDGSYKCLCLPGYVPSDKPNYCTPLNTALNLEKDSDLE

SEQ ID NO: 8101 - protein, 219 aa, Homo sapiens
MGSYRCTCKIGFGPDPTFSSCVPDPPVISEEKGPCYRLVSSGRQCMHPLSVHLTKQLCCCSVGKAWGPHCEKCPLPGTGKGPVFVKPKNTQPVAKSTHPPPLPAKEEPVEALTFSREHGPGVAEPEVATAPPEKEIPSLDQEKTKLEPGQPQLSPGISTIHLHPQFPVVIEKTSPPVPVEVAPEASTSSASQVIAPTQVTEINECTVNPDICGAGHCIN

SEQ ID NO: 8102 - protein, 101 aa, Homo sapiens
MNGGQCSSRDKCQCPPNFTGKLCQIPVHGASVPKLYQHSQQPGKALGTHVIHSTHTLPLTVTSQQGVKVKFPPNIVNIHVKHPPEASVQIHQVSRIDGPTG

SEQ ID NO: 8103 - protein, 221 aa, Homo sapiens
SSGRQCMHPLSVHLTKQLCCCSVGKAWGPHCEKCPLPGTAAFKEICPGGMGYTVSGVHRRRPIHHHVGKGPVFVKPKNTQPVAKSTHPPPLPAKEEPVEALTFSREHGPGVAEPEVATAPPEKEIPSLDQEKTKLEPGQPQLSPGISTIHLHPQFPGIVIEKTSPPVPVEVAPEASTSSASQVIAPTQVTEINECTVNPDICGAGHCINLPVRYTCICYEG

SEQ ID NO: 8104 - protein, 267 aa, Homo sapiens
  SITE 1: note = misc_feature - Xaa can be any naturally occurring amino acid
XGRCEDIDECLNPSTCPDEQCVNSPGSYQCVPCTEGFRGWNGQCLDIDECQQGNLCVNGQCKNTEGSFRCTCGQGYQLSAAKDQCEDIDECQHRHLCAHGQCRNTEGSFQCVCDQGYRASGLGDHCEDINECLEDKSVCQRGDCINTAGSYDCTCPDGFQLDDNKTCQDINECEHPGLCGPQGECLNTEGSFHCVCQQGFSISADGRTCEDIDECVNNTVCDSHGFCDNTAGSFRCLCYQGFQAPQDGQGCVDVNECELLSGVCGEA

SEQ ID NO: 8105 - protein, 1821 aa, Homo sapiens
MRPRTKARSPGRALRNPWRGFLPLTLALFVGAGHAQRDPVGRYEPAGGDANRLRRPGGSYPAAAAAKVYSLFREQDAPVAGLQPVERAQPGWGSPRRPTEAEARRPSRAQQSRRVQPPAQTRRSTPLGQQQPAPRTRAAPALPRLGTPQRSGAAPPTPPRGRLTGRNVCGGQCCPGWTTANSTNHCIKPVCEPPCQNRGSCSRPQLCVCRSGFRGARCEEVIPDEEFDPQNSRLAPRRWAERSPNLRRSSAAGEGTLARAQPPAPQSPPAPQSPPAGTLSGLSQTHPSQQHVGLSRTVRLHPTATASSQLSSNALPPGPGLEQRDGTQQAVPLEHPSSPWGLNLTEKIKKIKIVFTPTICKQTCARGHCANSCERGDTTTLYSQGGHGHDPKSGFRIYFCQIPCLNGGRCIGRDECWCPANSTGKFCHLPIPQPDREPPGRGSRPRALLEAPLKQSTFTLPLSNQLASVNPSLVKVHIHHPPEASVQIHQVAQVRGGVEEALVENSVETRPPPWLPASPGHSLWDSNNIPARSGEPPRPLPPAAPRPRGLLGRCYLNTVNGQCANPLLELTTQEDCCGSVGAFWGVTLCAPCPPRPASPVIENGQLECPQGYKRLNLTHCQDINECLTLGLCKDAECVNTRGSYLCTCRPGLMLDPSRSRCVSDKAISMLQGLCYRSLGPGTCTLPLAQRITKQICCCSRVGKAWGSECEKCPLPGTEAFREICPAGHGYTYASSDIRLSMRKAEEEELARPPREQGQRSSGALPGPAERQPLRVVTDTWLEAGTIPDKGDSQAGQVTTSVTHAPAWVTGNATTPPMPEQGIAEIQEEQVTPSTDVLVTLSTPGIDRCAAGATNVCGPGTCVNLPDGYRCVCSPGYQLHPSQAYCTDDNECLRDPCKGKGRCINRVGSYSCFCYPGYTLATSGATQECQDINECEQPGVCSGGQCTNTEGSYHCECDQGYIMVRKGHCQDINECRHPGTCPDGRCVNSPGSYTCLACEEGYRGQSGSCVDVNECLTPGVCAHGKCTNLEGSFRCSCEQGYEVTSDEKGCQDVDECASRASCPTGLCLNTEGSFACSACENGYWVNEDGTACEDLDECAFPGVCPSGVCTNTAGSFSCKDCDGGYRPSPLGDSCEDVDECEDPQSSCLGGECKNTVGSYQCLCPQGFQLANGTVCEDVNECMGEEHCAPHGECLNSHGSFFCLCAPGFVSAEGGTSCQDVDECATTDPCVGGHCVNTEGSFNCLCETGFQPSPESGECVDIDECEDYGDPVCGTWKCENSPGSYRCVLGCQPGFHMAPNGDCIDIDECANDTMCGSHGFCDNTDGSFRCLCDQGFEISPSGWDCVDVNECELMLAVCGAALCENVEGSFLCLCASDLEEYDAQEGHCRPRGAGGQSMSEAPTGDHAPAPTRMDCYSGQKGHAPCSSVLGRNTTQAECCCTQGASWGDACDLCPSEDSAEFSEICPSGKGYIPVEGAWTFGQTMYTDADECVIFGPGLCPNGRCLNTVPGYVCLCNPGFHYDASHKKCEDHDECQDLACENGECVNTEGSFHCFCSPPLTLDLSQQRCMNSTSSTEDLPDHDIHMDICWKKVTNDVCSEPLRGHRTTYTECCCQDGEAWSQQCALCPPRSSEVYAQLCNVARIEAEREAGVHFRPGYEYGPGPDDLHYSIYGPDGAPFYNYLGPEDTVPEPAFPNTAGHSADRTPILESPLQPSELQPHYVASHPEPPAGFEGLQAEECGILNGCENGRCVRVREGYTCDCFEGFQLDAAHMACVDVNECDDLNGPAVLCVHGYCENTEGSYRCHCSPGYVAEAGPPHCTAKE

SEQ ID NO: 8106 - protein, 1769 aa, Homo sapiens
MRPRTKARSPGRALRNPWRGFLPLTLALFVGAGHAQRDPVGRYEPAGGDANRLRRPGGSYPAAAAAKVYSLFREQDAPVAGLQPVERAQPGWGSPRRPTEAEARRPSRAQQSRRVQPPAQTRRSTPLGQQQPAPRTRAAPALPRLGTPQRSGAAPPTPPRGRLTGRNVCGGQCCPGWTTANSTNHCIKPVCEPPCQNRGSCSRPQLCVCRSGFRGARCEEVIPDEEFDPQNSRLAPRRWAERSPNLRRSSAAGEGTLARAQPPAPQSPPAPQSPPAGTLSGLSQTHPSQQHVGLSRTVRLHPTATASSQLSSNALPPGPGLEQRDGTQQAVPLEHPSSPWGLNLTEKIKKIKIVFTPTICKQTCARGHCANSCERGDTTTLYSQGGHGHDPKSGFRIYFCQIPCLNGGRCIGRDECWCPANSTGKFCHLPIPQPDREPPGRGSRPRALLEAPLKQSTFTLPLSNQLASVNPSLVKVHIHHPPEASVQIHQVAQVRGGVEEALVENSVETRPPPWLPASPGHSLWDSNNIPARSGEPPRPLPPAAPRPRGLLGRCYLNTVNGQCANPLLELTTQEDCCGSVGAFWGVTLCAPCPPRPASPVIENGQLECPQGYKRLNLTHCQDINECLTLGLCKDAECVNTRGSYLCTCRPGLMLDPSRSRCVSDKAISMLQGLCYRSLGPGTCTLPLAQRITKQICCCSRVGKAWGSECEKCPLPGTEAFREICPAGHGYTYASSDIRLSMRKAEEEELARPPREQGQRSSGALPGPAERQPLRVVTDTWLEAGTIPDKGDSQAGQVTTSVTHAPAWVTGNATTPPMPEQGIAEIQEEQVTPSTDVLVTLSTPGIDRCAAGATNVCGPGTCVNLPDGYRCVCSPGYQLHPSQAYCTDDNECLRDPCKGKGRCINRVGSYSCFCYPGYTLATSGATQECQDINECEQPGVCSGGQCTNTEGSYHCECDQGYIMVRKGHCQDINECRHPGTCPDGRCVNSPGSYTCLACEEGYRGQSGSCVDVNECLTPGVCAHGKCTNLEGSFRCSCEQGYEVTSDEKGCQDVDECASRASCPTGLCLNTEGSFACSACENGYWVNEDGTACEDLDECAFPGVCPSGVCTNTAGSFSCKDCDGGYRPSPLGDSCEDVDECEDPQSSCLGGECKNTVGSYQCLCPQGFQLANGTVCEDVNECMGEEHCAPHGECLNSHGSFFCLCAPGFVSAEGGTSCQDVDECATTDPCVGGHCVNTEGSFNCLCETGFQPSPESGECVDIDECEDYGDPVCGTWKCENSPGSYRCVLGCQPGFHMAPNGDCIDIDECANDTMCGSHGFCDNTDGSFRCLCDQGFEISPSGWDCVDVNECELMLAVCGAALCENVEGSFLCLCASDLEEYDAQEGHCRPRGAGGQSMSEAPTGDHAPAPTRMDCYSGQKGHAPCSSVLGRNTTQAECCCTQGASWGDACDLCPSEDSAEFSEICPSGKGYIPVEGAWTFGQTMYTDADECVIFGPGLCPNGRCLNTVPGYVCLCNPGFHYDASHKKCEDHDECQDLACENGECVNTEGSFHCFCSPPLTLDLSQQRCMNSTSSTEDLPDHDIHMDICWKKVTNDVCSEPLRGHRTTYTECCCQDGEAWSQQCALCPPRSSEVYAQLCNVARIEAEREAGVHFRPGYEYGPGPDDLHYSIYGPDGAPFYNYLGPEDTVPEPAFPNTAGHSADRTPILESPLQPSELQPHYVASHPGLCCCKTGEEVGTKAVSLPSPPPASHIASRSPQPASKGFRRRSAAS

SEQ ID NO: 8107 - protein, 1777 aa, Homo sapiens
MRPRTKARSPGRALRNPWRGFLPLTLALFVGAGHAQRDPVGRYEPAGGDANRLRRPGGSYPAAAAAKVYSLFREQDAPVAGLQPVERAQPGWGSPRRPTEAEARRPSRAQQSRRVQPPAQTRRSTPLGQQQPAPRTRAAPALPRLGTPQRSGAAPPTPPRGRLTGRNVCGGQCCPGWTTANSTNHCIKPVCEPPCQNRGSCSRPQLCVCRSGFRGARCEEVIPDEEFDPQNSRLAPRRWAERSPNLRRSSAAGEGTLARAQPPAPQSPPAPQSPPAGTLSGLSQTHPSQQHVGLSRTVRLHPTATASSQLSSNALPPGPGLEQRDGTQQAVPLEHPSSPWGLNLTEKIKKIKIVFTPTICKQTCARGHCANSCERGDTTTLYSQGGHGHDPKSGFRIYFCQIPCLNGGRCIGRDECWCPANSTGKFCHLPIPQPDREPPGRGSRPRALLEAPLKQSTFTLPLSNQLASVNPSLVKVHIHHPPEASVQIHQVAQVRGGVEEALVENSVETRPPPWLPASPGHSLWDSNNIPARSGEPPRPLPPAAPRPRGLLGRCYLNTVNGQCANPLLELTTQEDCCGSVGAFWGVTLCAPCPPRPASPVIENGQLECPQGYKRLNLTHCQDINECLTLGLCKDAECVNTRGSYLCTCRPGLMLDPSRSRCVSDKAISMLQGLCYRSLGPGTCTLPLAQRITKQICCCSRVGKAWGSECEKCPLPGTEAFREICPAGHGYTYASSDIRLSMRKAEEEELARPPREQGQRSSGALPGPAERQPLRVVTDTWLEAGTIPDKGDSQAGQVTTSVTHAPAWVTGNATTPPMPEQGIAEIQEEQVTPSTDVLVTLSTPGIDRCAAGATNVCGPGTCVNLPDGYRCVCSPGYQLHPSQAYCTDDNECLRDPCKGKGRCINRVGSYSCFCYPGYTLATSGATQECQDINECEQPGVCSGGQCTNTEGSYHCECDQGYIMVRKGHCQDINECRHPGTCPDGRCVNSPGSYTCLACEEGYRGQSGSCVDVNECLTPGVCAHGKCTNLEGSFRCSCEQGYEVTSDEKGCQDVDECASRASCPTGLCLNTEGSFACSACENGYWVNEDGTACEDLDECAFPGVCPSGVCTNTAGSFSCKDCDGGYRPSPLGDSCEDVDECEDPQSSCLGGECKNTVGSYQCLCPQGFQLANGTVCEDVNECMGEEHCAPHGECLNSHGSFFCLCAPGFVSAEGGTSCQDVDECATTDPCVGGHCVNTEGSFNCLCETGFQPSPESGECVDIDECANDTMCGSHGFCDNTDGSFRCLCDQGFEISPSGWDCVDVNECELMLAVCGAALCENVEGSFLCLCASDLEEYDAQEGHCRPRGAGGQSMSEAPTGDHAPAPTRMDCYSGQKGHAPCSSVLGRNTTQAECCCTQGASWGDACDLCPSEDSAEFSEICPSGKGYIPVEGAWTFGQTMYTDADECVIFGPGLCPNGRCLNTVPGYVCLCNPGFHYDASHKKCEDHDECQDLACENGECVNTEGSFHCFCSPPLTLDLSQQRCMNSTSSTEDLPDHDIHMDICWKKVTNDVCSEPLRGHRTTYTECCCQDGEAWSQQCALCPPRSSEVYAQLCNVARIEAEREAGVHFRPGYEYGPGPDDLHYSIYGPDGAPFYNYLGPEDTVPEPAFPNTAGHSADRTPILESPLQPSELQPHYVASHPEPPAGFEGLQAEECGILNGCENGRCVRVREGYTCDCFEGFQLDAAHMACVDVNECDDLNGPAVLCVHGYCENTEGSYRCHCSPGYVAEAGPPHCTAKE

SEQ ID NO: 8108 - protein, 233 aa, Homo sapiens
  SITE 1: note = misc_feature - Xaa can be any naturally occurring amino acid
XTEGSFACSACENGYWVNEDGTACEDLDECAFPGVCPSGVCTNTAGSFSCKDCDGGYRPSPLGDSCEDVDECEDPQSSCLGGECKNTVGSYQCLCPQGFQLANGTVCEDVNECMGEEHCAPHGECLNSHGSFFCLCAPGFVSAEGGTSCQDIDECEDYGDPVCGTWKCENSPGSYRCVLGCQPGFHMAPNGDCIDIDECANDTMCGSHGFCDNTDGSFRCLCDQGFEISPSGW

SEQ ID NO: 8109 - protein, 144 aa, Homo sapiens
FQDTLPKQPCGSNPLPGLTKQEDCCGSIGTAWGQSKCHKCPQLQYTGVQKPGPVRGEVGADCPQGYKRLNSTHCQADKPEEKSLCFRLVSPEHQCQHPLTTRLTRQLCCCSVGKAWGARCQRCPTDGTAAFKEICPAGKGYHIL

SEQ ID NO: 8110 - protein, 140 aa, Homo sapiens
LNECAKPHLCGDGGFCINFPGHYKCNCYPGYRLKASRPPVCEDIDECRDPSSCPDGKCENKPGSFKCIACQPGYRSQGGGACRDVNECAEGSPCSPGWCENLPGSFRCTCAQGYAPAPDGRSCLGERQHPRPGPPPPPTR

SEQ ID NO: 8111 - protein, 124 aa, Homo sapiens
MERAPERRDVCWSQRGEDGMCAGPLAGPALTFDDCCCRQGRGWGAQCRPCPPRGAGSHCPTSQSESNSFWDTSPLLLGKPPRDEDSSEEDSDECRCVSGRCVPRPGGAVCECPGGFQLDASRAR

SEQ ID NO: 8112 - protein, 306 aa, Homo sapiens
MLFGSEICKEGKCVNTQPGYECYCKQGFYYDGNLLECVDVDECLDESNCRNGVCENTRGGYRCACTPPAEYSPAQRQCLSPEEMDVDECQDPAACRPGRCVNLPGSYRCECRPPWVPGPSGRDCQLPESPAERAPERRDVCWSQRGEDGMCAGPLAGPALTFDDCCCRQGRGWGAQCRPCPPRGAGSHCPTSQSESNSFWDTSPLLLGKPPRDEDSSEEDSDECRCVSGRCVPRPGGAVCECPGGFQLDASRARCVDIDECRELNQRGLLCKSERCVNTSGSFRCVCKAGFARSRPHGACVPQRRR

SEQ ID NO: 8113 - protein, 222 aa, Homo sapiens
MLFGSEICKEGKCVNTQPGYECYCKQGFYYDGNLLECVDVDECLDESNCRNGVCENTRGGYRCACTPPAEYSPAQRQCLSPEEMERAPERRDVCWSQRGEDGMCAGPLAGPALTFDDCCCRQGRGWGAQCRPCPPRGAGSHCPTSQSESNSFWDTSPLLLGKPPRDEDSSEEDSDECRCVSGRCVPRPGGAVCECPGGFQLDASRARCVDIDECRELNQRGL

SEQ ID NO: 8114 - protein, 259 aa, Homo sapiens
MLFGSEICKEGKCVNTQPGYECYCKQGFYYDGNLLECVDVDECLDESNCRNGVCENTRGGYRCACTPPAEYSPAQRQCLSPEEMERAPERRDVCWSQRGEDGMCAGPLAGPALTFDDCCCRQGRGWGAQCRPCPPRGAGSHCPTSQSESNSFWDTSPLLLGKPPRDEDSSEEDSDECRCVSGRCVPRPGGAVCECPGGFQLDASRARCVDIDECRELNQRGLLCKSERCVNTSGSFRCVCKAGFARSRPHGACVPQRRR

SEQ ID NO: 8115 - protein, 733 aa, Homo sapiens
MPAETDECRLNQNICGHGECVPGPPDYSCHCNPGYRSHPQHRYCVDVNECEAEPCGPGRGICMNTGGSYNCHCNRGYRLHVGAGGRSCVDLNECAKPHLCGDGGFCINFPGHYKCNCYPGYRLKASRPPVCEDIDECRDPSSCPDGKCENKPGSFKCIACQPGYRSQGGGACRDVNECAEGSPCSPGWCENLPGSFRCTCAQGYAPAPDGRSCLDVDECEAGDVCDNGICSNTPGSFQCQCLSGYHLSRDRSHCEDIDECDFPAACIGGDCINTNGSYRCLCPQGHRLVGGRKCQDIDECSQDPSLCLPHGACKNLQGSYVCVCDEGFTPTQDQHGCEEVEQPHHKKECYLNFDDTVFCDSVLATNVTQQECCCSLGAGWGDHCEIYPCPVYSSAEFHSLCPDGKGYTQDNNIVNYGIPAHRDIDECMLFGSEICKEGKCVNTQPGYECYCKQGFYYDGNLLECVDVDECLDESNCRNGVCENTRGGYRCACTPPAEYSPAQRQCLSPEEMDVDECQDPAACRPGRCVNLPGSYRCECRPPWVPGPSGRDCQLPESPAERAPERRDVCWSQRGEDGMCAGPLAGPALTFDDCCCRQGRGWGAQCRPCPPRGAGSHCPTSQSESNSFWDTSPLLLGKPPRDEDSSEEDSDECRCVSGRCVPRPGGAVCECPGGFQLDASRARCVDIDECRELNQRGLLCKSERCVNTSGSFRCVCKAGFARSRPHGACVPQRRR

SEQ ID NO: 8116 - protein, 1256 aa, Homo sapiens
MPGPRGAAGGLAPEMRGAGAAGLLALLLLLLLLLLGLGGRVEGGPAGERGAGGGGALARERFKVVFAPVICKRTCLKGQCRDSCQQGSNMTLIGENGHSTDTLTGSGFRVVVCPLPCMNGGQCSSRNQCLCPPDFTGRFCQVPAGGAGGGTGGSGPGLSRTGALSTGALPPLAPEGDSVASKHAIYAVQVIADPPGPGEGPPAQHAAFLVPLGPGQISAEVQAPPPVVNVRVHHPPEASVQVHRIESSNAESAAPSQHLLPHPKPSHPRPPTQKPLGRCFQDTLPKQPCGSNPLPGLTKQEDCCGSIGTAWGQSKCHKCPQLQYTGVQKPGPVRGEVGADCPQGYKRLNSTHCQDINECAMPGVCRHGDCLNNPGSYRCVCPPGHSLGPSRTQCIADKPEEKSLCFRLVSPEHQCQHPLTTRLTRQLCCCSVGKAWGARCQRCPTDGTAAFKEICPAGKGYHILTSHQTLTIQGESDFSLFLHPDGPPKPQQLPESPSQAPPPEDTEEERGVTTDSPVSEERSVQQSHPTATTTPARPYPELISRPSPPTMRWFLPDLPPSRSAVEIAPTQVTETDECRLNQNICGHGECVPGPPDYSCHCNPGYRSHPQHRYCVDVNECEAEPCGPGRGICMNTGGSYNCHCNRGYRLHVGAGGRSCVDLNECAKPHLCGDGGFCINFPGHYKCNCYPGYRLKASRPPVCEDIDECRDPSSCPDGKCENKPGSFKCIACQPGYRSQGGGACRDVNECAEGSPCSPGWCENLPGSFRCTCAQGYAPAPDGRSCLDVDECEAGDVCDNGICSNTPGSFQCQCLSGYHLSRDRSHCEDIDECDFPAACIGGDCINTNGSYRCLCPQGHRLVGGRKCQDIDECSQDPSLCLPHGACKNLQGSYVCVCDEGFTPTQDQHGCEEVEQPHHKKECYLNFDDTVFCDSVLATNVTQQECCCSLGAGWGDHCEIYPCPVYSSAEFHSLCPDGKGYTQDNNIVNYGIPAHRDIDECMLFGSEICKEGKCVNTQPGYECYCKQGFYYDGNLLECVDVDECLDESNCRNGVCENTRGGYRCACTPPAEYSPAQRQCLSPEEMERAPERRDVCWSQRGEDGMCAGPLAGPALTFDDCCCRQGRGWGAQCRPCPPRGAGSHCPTSQSESNSFWDTSPLLLGKPPRDEDSSEEDSDECRCVSGRCVPRPGGAVCECPGGFQLDASRARCVDIDECRELNQRGLLCKSERCVNTSGSFRCVCKAGFARSRPHGACVPQRRR

SEQ ID NO: 8117 - protein, 1303 aa, Homo sapiens
MPGPRGAAGGLAPEMRGAGAAGLLALLLLLLLLLLGLGGRVEGGPAGERGAGGGGALARERFKVVFAPVICKRTCLKGQCRDSCQQGSNMTLIGENGHSTDTLTGSGFRVVVCPLPCMNGGQCSSRNQCLCPPDFTGRFCQVPAGGAGGGTGGSGPGLSRTGALSTGALPPLAPEGDSVASKHAIYAVQVIADPPGPGEGPPAQHAAFLVPLGPGQISAEVQAPPPVVNVRVHHPPEASVQVHRIESSNAESAAPSQHLLPHPKPSHPRPPTQKPLGRCFQDTLPKQPCGSNPLPGLTKQEDCCGSIGTAWGQSKCHKCPQLQYTGVQKPGPVRGEVGADCPQGYKRLNSTHCQDINECAMPGVCRHGDCLNNPGSYRCVCPPGHSLGPSRTQCIADKPEEKSLCFRLVSPEHQCQHPLTTRLTRQLCCCSVGKAWGARCQRCPTDGTAAFKEICPAGKGYHILTSHQTLTIQGESDFSLFLHPDGPPKPQQLPESPSQAPPPEDTEEERGVTTDSPVSEERSVQQSHPTATTTPARPYPELISRPSPPTMRWFLPDLPPSRSAVEIAPTQVTETDECRLNQNICGHGECVPGPPDYSCHCNPGYRSHPQHRYCVDVNECEAEPCGPGRGICMNTGGSYNCHCNRGYRLHVGAGGRSCVDLNECAKPHLCGDGGFCINFPGHYKCNCYPGYRLKASRPPVCEDIDECRDPSSCPDGKCENKPGSFKCIACQPGYRSQGGGACRDVNECAEGSPCSPGWCENLPGSFRCTCAQGYAPAPDGRSCLDVDECEAGDVCDNGICSNTPGSFQCQCLSGYHLSRDRSHCEDIDECDFPAACIGGDCINTNGSYRCLCPQGHRLVGGRKCQDIDECSQDPSLCLPHGACKNLQGSYVCVCDEGFTPTQDQHGCEEVEQPHHKKECYLNFDDTVFCDSVLATNVTQQECCCSLGAGWGDHCEIYPCPVYSSAEFHSLCPDGKGYTQDNNIVNYGIPAHRDIDECMLFGSEICKEGKCVNTQPGYECYCKQGFYYDGNLLECVDVDECLDESNCRNGVCENTRGGYRCACTPPAEYSPAQRQCLSPEEMDVDECQDPAACRPGRCVNLPGSYRCECRPPWVPGPSGRDCQLPESPAERAPERRDVCWSQRGEDGMCAGPLAGPALTFDDCCCRQGRGWGAQCRPCPPRGAGSHCPTSQSESNSFWDTSPLLLGKPPRDEDSSEEDSDECRCVSGRCVPRPGGAVCECPGGFQLDASRARCVDIDECRELNQRGLLCKSERCVNTSGSFRCVCKAGFARSRPHGACVPQRRR

SEQ ID NO: 8118 - protein, 116 aa, Homo sapiens
MPGPRGAAGGLAPEMRGAGAAGLLALLLLLLLLLLGLGGRVEGGPAGERGAGGGGALARERFKVVFAPVICKRTCLKGQCRDSCQQGSNMTLIGENGHSTDTLTGSGFRWCALSPA

SEQ ID NO: 8119 - protein, 1137 aa, Homo sapiens
MTLIGENGHSTDTLTGSGFRVVVCPLPCMNGGQCSSRNQCLCPPDFTGRFCQVPAGGAGGGTGGSGPGLSRTGALSTGALPPLAPEGDSVASKHAIYAVQVIADPPGPGEGPPAQHAAFLVPLGPGQISAEVQAPPPVVNVRVHHPPEASVQVHRIESSNAESAAPSQHLLPHPKPSHPRPPTQKPLGRCFQDTLPKQPCGSNPLPGLTKQEDCCGSIGTAWGQSKCHKCPQLQYTGVQKPGPVRGEVGADCPQGYKRLNSTHCQDINECAMPGVCRHGDCLNNPGSYRCVCPPGHSLGPSRTQCIADKPEEKSLCFRLVSPEHQCQHPLTTRLTRQLCCCSVGKAWGARCQRCPTDGTAAFKEICPAGKGYHILTSHQTLTIQGESDFSLFLHPDGPPKPQQLPESPSQAPPPEDTEEERGVTTDSPVSEERSVQQSHPTATTTPARPYPELISRPSPPTMRWFLPDLPPSRSAVEIAPTQVTETDECRLNQNICGHGECVPGPPDYSCHCNPGYRSHPQHRYCVDVNECEAEPCGPGRGICMNTGGSYNCHCNRGYRLHVGAGGRSCVDLNECAKPHLCGDGGFCINFPGHYKCNCYPGYRLKASRPPVCEDIDECRDPSSCPDGKCENKPGSFKCIACQPGYRSQGGGACRDVNECAEGSPCSPGWCENLPGSFRCTCAQGYAPAPDGRSCLDVDECEAGDVCDNGICSNTPGSFQCQCLSGYHLSRDRSHCEDIDECDFPAACIGGDCINTNGSYRCLCPQGHRLVGGRKCQDIDECSQDPSLCLPHGACKNLQGSYVCVCDEGFTPTQDQHGCEEVEQPHHKKECYLNFDDTVFCDSVLATNVTQQECCCSLGAGWGDHCEIYPCPVYSSAEFHSLCPDGKGYTQDNNIVNYGIPAHRDIDECMLFGSEICKEGKCVNTQPGYECYCKQGFYYDGNLLECVDVDECLDESNCRNGVCENTRGGYRCACTPPAEYSPAQRQCLSPEEMDVDECQDPAACRPGRCVNLPGSYRCECRPPWVPGPSGRDCQLPESPAERAPERRDVCWSQRGEDGMCAGPLAGPALTFDDCCCRQGRGWGAQCRPCPPRGAGSHCPTSQSESNSFWDTSPLLLGKPPRDEDSSEEDSDECRCVSG

SEQ ID NO: 8120 - protein, 907 aa, Homo sapiens
  SITE 1: note = misc_feature - Xaa can be any naturally occurring amino acid
XFAPVICKRTCLKGQCRDSCQQGSNMTLIGENGHSTDTLTGSGFRVADKPEEKSLCFRLVSPEHQCQHPLTTRLTRQLCCCSVGKAWGARCQRCPTDGTAAFKEICPAGKGYHILTSHQTLTIQGESDFSLFLHPDGPPKPQQLPESPSQAPPPEDTEEERGVTTDSPVSEERSVQQSHPTATTTPARPYPELISRPSPPTMRWFLPDLPPSRSAVEIAPTQVTETDECRLNQNICGHGECVPGPPDYSCHCNPGYRSHPQHRYCVDVNECEAEPCGPGRGICMNTGGSYNCHCNRGYRLHVGAGGRSCVDLNECAKPHLCGDGGFCINFPGHYKCNCYPGYRLKASRPPVCEDIDECRDPSSCPDGKCENKPGSFKCIACQPGYRSQGGGACRDVNECAEGSPCSPGWCENLPGSFRCTCAQGYAPAPDGRSCLDVDECEAGDVCDNGICSNTPGSFQCQCLSGYHLSRDRSHCEDIDECDFPAACIGGDCINTNGSYRCLCPQGHRLVGGRKCQDIDECSQDPSLCLPHGACKNLQGSYVCVCDEGFTPTQDQHGCEEVEQPHHKKECYLNFDDTVFCDSVLATNVTQQECCCSLGAGWGDHCEIYPCPVYSSAEFHSLCPDGKGYTQDNNIVNYGIPAHRDIDECMLFGSEICKEGKCVNTQPGYECYCKQGFYYDGNLLECVDVDECLDESNCRNGVCENTRGGYRCACTPPAEYSPAQRQCLSPEEMERAPERRDVCWSQRGEDGMCAGPLAGPALTFDDCCCRQGRGWGAQCRPCPPRGAGSHCPTSQSESNSFWDTSPLLLGKPPRDEDSSEEDSDECRCVSGRCVPRPGGAVCECPGGFQLDASRARCVDIDECRELNQRGLLCKSERCVNTSGSFRCVCKAGFARSRPHGACVPQRRR

SEQ ID NO: 8121 - protein, 69 aa, Homo sapiens
  SITE 1: note = misc_feature - Xaa can be any naturally occurring amino acid
XFAPVICKRTCLKGQCRDSCQQGSNMTLIGENGHSTDTLTGSGFRVGPAPRGECARPSPARGLSPGAPH

SEQ ID NO: 8122 - protein, 303 aa, Homo sapiens
ECLNTDGSFACTCAPGYRPGPRGASCLDVDECSEEDLCQSGICTNTDGSFECICPPGHRAGPDLASCLDVDECRERGPALCGSQRCENSPGSYRCVRDCDPGYHAGPEGTCDDVNECETLQGVCGAALCENVEGSFLCVCPNSPEEFDPMTGRCVPPRTSADVDECQLFRDQVCKSGVCVNTAPGYSCYCSNGYYYHTQRLECIDNDECADEEPACEGGRCVNTVGSYHCTCEPPLVLDGSQRRCVSNESQSLDDNLGVCWQEVGADLVCSHPRLDRQATYTECCCLYGEAWGMDCALCPAQD

SEQ ID NO: 8123 - protein, 1557 aa, Homo sapiens
MAGGVRLLWVSLLVLLAQLGPQPGLGRLGERLRVRFTPVVCGLRCVHGPTGSRCTPTCAPRNATSVDSGAPGGAAPGGPGFRAFLCPLICHNGGVCVKPDRCLCPPDFAGKFCQLHSSGARPPAPAVPGLTRSVYTMPLANHRDDEHGVASMVSVHVEHPQEASVVVHQVERVSGPWEEADAEAVARAEAAARAEAAAPYTVLAQSAPREDGYSDASGFGYCFRELRGGECASPLPGLRTQEVCCRGAGLAWGVHDCQLCSERLGNSERVSAPDGPCPTGFERVNGSCEDVDECATGGRCQHGECANTRGGYTCVCPDGFLLDSSRSSCISQHVISEAKGPCFRVLRDGGCSLPILRNITKQICCCSRVGKAWGRGCQLCPPFGSEGFREICPAGPGYHYSASDLRYNTRPLGQEPPRVSLSQPRTLPATSRPSAGFLPTHRLEPRPEPRPDPRPGPELPLPSIPAWTGPEIPESGPSSGMCQRNPQVCGPGRCISRPSGYTCACDSGFRLSPQGTRCIDVDECRRVPPPCAPGRCENSPGSFRCVCGPGFRAGPRAAECLDVDECHRVPPPCDLGRCENTPGSFLCVCPAGYQAAPHGASCQDVDECTQSPGLCGRGACKNLPGSFRCVCPAGFRGSACEEDVDECAQEPPPCGPGRCDNTAGSFHCACPAGFRSRGPGAPCQDVDECARSPPPCTYGRCENTEGSFQCVCPMGFQPNTAGSECEDVDECENHLACPGQECVNSPGSFQCRTCPSGHHLHRGRCTDVDECSSGAPPCGPHGHCTNTEGSFRCSCAPGYRAPSGRPGPCADVNECLEGDFCFPHGECLNTDGSFACTCAPGYRPGPRGASCLDVDECSEEDLCQSGICTNTDGSFECICPPGHRAGPDLASCLDVDECRERGPALCGSQRCENSPGSYRCVRDCDPGYHAGPEGTCDDVDECQEYGPEICGAQRCENTPGSYRCTPACDPGYQPTPGGGCQDVDECRNRSFCGAHAVCQNLPGSFQCLCDQGYEGARDGRHCVDVNECETLQGVCGAALCENVEGSFLCVCPNSPEEFDPMTGRCVPPRTSAGTFPGSQPQAPASPVLPARPPPPPLPRRPSTPRQGPVGSGRRECYFDTAAPDACDNILARNVTWQECCCTVGEGWGSGCRIQQCPGTETAEYQSLCPHGRGYLAPSGDLSLRRDVDECQLFRDQVCKSGVCVNTAPGYSCYCSNGYYYHTQRLECIDNDECADEEPACEGGRCVNTVGSYHCTCEPPLVLDGSQRRCVSNESQSLDDNLGVCWQEVGADLVCSHPRLDRQATYTECCCLYGEAWGMDCALCPAQDSDDFEALCNVLRPPAYSPPRPGGFGLPYEYGPDLGPPYQGLPYGPELYPPPALPYDPYPPPPGPFARREAPYGAPRFDMPDFEDDGGPYGESEAPAPPGPGTRWPYRSRDTRRSFPEPEEPPEGGSYAGSLAEPYEELEAEECGILDGCTNGRCVRVPEGFTCRCFDGYRLDMTRMACVDINECDEAEAASPLCVNARCLNTDGSFRCICRPGFAPTHQPHHCAPARPRA

SEQ ID NO: 8124 - protein, 44 aa, Homo sapiens
MGDVKALLFVAAARARRLGGAAASEPSAGSEAASPKSVQAPSGA

SEQ ID NO: 8125 - protein, 1587 aa, Homo sapiens
MGDVKALLFVAAARARRLGGAAASESLAVSEAFCRVRSCQPKKCAGPQRCLNPVPAVPSPSPSVRKRQVSLNWQPLTLQEARALLKRRRPRGPGGRGLLRRRPPQRAPAGKAPVLCPLICHNGGVCVKPDRCLCPPDFAGKFCQLHSSGARPPAPAVPGLTRSVYTMPLANHRDDEHGVASMVSVHVEHPQEASVVVHQVERVSGPWEEADAEAVARAEAAARAEAAAPYTVLAQSAPREDGYSDASGFGYCFRELRGGECASPLPGLRTQEVCCRGAGLAWGVHDCQLCSERLGNSERVSAPDGPCPTGFERVNGSCEDVDECATGGRCQHGECANTRGGYTCVCPDGFLLDSSRSSCISQHVISEAKGPCFRVLRDGGCSLPILRNITKQICCCSRVGKAWGRGCQLCPPFGSEGFREICPAGPGYHYSASDLRYNTRPLGQEPPRVSLSQPRTLPATSRPSAGFLPTHRLEPRPEPRPDPRPGPELPLPSIPAWTGPEIPESGPSSGMCQRNPQVCGPGRCISRPSGYTCACDSGFRLSPQGTRCIDVDECRRVPPPCAPGRCENSPGSFRCVCGPGFRAGPRAAECLDVDECHRVPPPCDLGRCENTPGSFLCVCPAGYQAAPHGASCQDVDECTQSPGLCGRGACKNLPGSFRCVCPAGFRGSACEEDVDECAQEPPPCGPGRCDNTAGSFHCACPAGFRSRGPGAPCQDVDECARSPPPCTYGRCENTEGSFQCVCPMGFQPNTAGSECEDVDECENHLACPGQECVNSPGSFQCRTCPSGHHLHRGRCTDVDECSSGAPPCGPHGHCTNTEGSFRCSCAPGYRAPSGRPGPCADVNECLEGDFCFPHGECLNTDGSFACTCAPGYRPGPRGASCLDVDECSEEDLCQSGICTNTDGSFECICPPGHRAGPDLASCLDVDECRERGPALCGSQRCENSPGSYRCVRDCDPGYHAGPEGTCDDVDECQEYGPEICGAQRCENTPGSYRCTPACDPGYQPTPGGGCQDVDECRNRSFCGAHAVCQNLPGSFQCLCDQGYEGARDGRHCVDVNECETLQGVCGAALCENVEGSFLCVCPNSPEEFDPMTGRCVPPRTSAGTFPGSQPQAPASPVLPARPPPPPLPRRPSTPRQGPVGSGRRECYFDTAAPDACDNILARNVTWQECCCTVGEGWGSGCRIQQCPGTETAEYQSLCPHGRGYLAPSGDLSLRRDVDECQLFRDQVCKSGVCVNTAPGYSCYCSNGYYYHTQRLECIDNDECADEEPACEGGRCVNTVGSYHCTCEPPLVLDGSQRRCVSNESQSLDDNLGVCWQEVGADLVCSHPRLDRQATYTECCCLYGEAWGMDCALCPAQDSDDFEALCNVLRPPAYSPPRPGGFGLPYEYGPDLGPPYQGLPYGPELYPPPALPYDPYPPPPGPFARREAPYGAPRFDMPDFEDDGGPYGESEAPAPPGPGTRWPYRSRDTRRSFPEPEEPPEGGSYAGSLAEPYEELEAEECGILDGCTNGRCVRVPEGFTCRCFDGYRLDMTRMACVDINECDEAEAASPLCVNARCLNTDGSFRCICRPGFAPTHQPHHCAPARPRA

SEQ ID NO: 8126 - protein, 44 aa, Homo sapiens
MLQPQALLFVAAARARRLGGAAASEPSAGSEAASPKSVQAPSGA

SEQ ID NO: 8127 - protein, 1624 aa, Homo sapiens
MPRPGTSGRRPLLLVLLLPLFAAATSAASPSPSPSQVVEVPGVPSRPASVAVCRCCPGQTSRRSRCIRAFCRVRSCQPKKCAGPQRCLNPVPAVPSPSPSVRKRQVSLNWQPLTLQEARALLKRRRPRGPGGRGLLRRRPPQRAPAGKAPVLCPLICHNGGVCVKPDRCLCPPDFAGKFCQLHSSGARPPAPAVPGLTRSVYTMPLANHRDDEHGVASMVSVHVEHPQEASVVVHQVERVSGPWEEADAEAVARAEAAARAEAAAPYTVLAQSAPREDGYSDASGFGYCFRELRGGECASPLPGLRTQEVCCRGAGLAWGVHDCQLCSERLGNSERVSAPDGPCPTGFERVNGSCEDVDECATGGRCQHGECANTRGGYTCVCPDGFLLDSSRSSCISQHVISEAKGPCFRVLRDGGCSLPILRNITKQICCCSRVGKAWGRGCQLCPPFGSEGFREICPAGPGYHYSASDLRYNTRPLGQEPPRVSLSQPRTLPATSRPSAGFLPTHRLEPRPEPRPDPRPGPELPLPSIPAWTGPEIPESGPSSGMCQRNPQVCGPGRCISRPSGYTCACDSGFRLSPQGTRCIDVDECRRVPPPCAPGRCENSPGSFRCVCGPGFRAGPRAAECLDVDECHRVPPPCDLGRCENTPGSFLCVCPAGYQAAPHGASCQDVDECTQSPGLCGRGACKNLPGSFRCVCPAGFRGSACEEDVDECAQEPPPCGPGRCDNTAGSFHCACPAGFRSRGPGAPCQDVDECARSPPPCTYGRCENTEGSFQCVCPMGFQPNTAGSECEDVDECENHLACPGQECVNSPGSFQCRTCPSGHHLHRGRCTDVDECSSGAPPCGPHGHCTNTEGSFRCSCAPGYRAPSGRPGPCADVNECLEGDFCFPHGECLNTDGSFACTCAPGYRPGPRGASCLDVDECSEEDLCQSGICTNTDGSFECICPPGHRAGPDLASCLDVDECRERGPALCGSQRCENSPGSYRCVRDCDPGYHAGPEGTCDDVDECQEYGPEICGAQRCENTPGSYRCTPACDPGYQPTPGGGCQDVDECRNRSFCGAHAVCQNLPGSFQCLCDQGYEGARDGRHCVDVNECETLQGVCGAALCENVEGSFLCVCPNSPEEFDPMTGRCVPPRTSAGTFPGSQPQAPASPVLPARPPPPPLPRRPSTPRQGPVGSGRRECYFDTAAPDACDNILARNVTWQECCCTVGEGWGSGCRIQQCPGTETAEYQSLCPHGRGYLAPSGDLSLRRDVDECQLFRDQVCKSGVCVNTAPGYSCYCSNGYYYHTQRLECIDNDECADEEPACEGGRCVNTVGSYHCTCEPPLVLDGSQRRCVSNESQSLDDNLGVCWQEVGADLVCSHPRLDRQATYTECCCLYGEAWGMDCALCPAQDSDDFEALCNVLRPPAYSPPRPGGFGLPYEYGPDLGPPYQGLPYGPELYPPPALPYDPYPPPPGPFARREAPYGAPRFDMPDFEDDGGPYGESEAPAPPGPGTRWPYRSRDTRRSFPEPEEPPEGGSYAGSLAEPYEELEAEECGILDGCTNGRCVRVPEGFTCRCFDGYRLDMTRMACVDINECDEAEAASPLCVNARCLNTDGSFRCICRPGFAPTHQPHHCAPARPRA

SEQ ID NO: 8128 - protein, 70 aa, Homo sapiens
MSARTAPFSWSGGKLRPKDQETLASGHTSWKALLFVAAARARRLGGAAASEPSAGSEAASPKSVQAPSGA

SEQ ID NO: 8129 - protein, 145 aa, Homo sapiens
PPGPGTRWPYRSRDTRRSFPEPEEPPEGGSYAGSLAEPYEELEAEECGILDGCTNGRCVRVPEGFTCRCFDGYRLDMTRMACVAFSSDRCLPSADINECDEAEAASPLCVNARCLNTDGSFRCICRPGFAPTHQPHHCAPARPRA

SEQ ID NO: 8130 - protein, 252 aa, Homo sapiens
  SITE 1: note = misc_feature - Xaa can be any naturally occurring amino acid
XFRCSCAPGYRAPSGRPGPCADVNECLEGDFCFPHGECLNTDGSFACTCAPGYRPGPRGASCLDVDECSEEDLCQSGICTNTDGSFECICPPGHRAGPDLASCLDVDECRERGPALCGSQRCENSPGSYRCVRDCDPGYHAGPEGTCDDVDECRNRSFCGAHAVCQNLPGSFQCLCDQGYEGARDGRHCVDVNECETLQGVCGAALCENVEGSFLCVCPNSPEEFDPMTGRCVPPRTSAGTFPGSQPQAPAS

SEQ ID NO: 8131 - protein, 182 aa, Homo sapiens
  SITE 1: note = misc_feature - Xaa can be any naturally occurring amino acid
XGPEICGAQRCENTPGSYRCTPACDPGYQPTPGGGCQDVDECRNRSFCGAHAVCQNLPGSFQCLCDQGYEGARDGRHCVDVNECETLQGVCGAALCENVEGSFLCVCPNSPEEFDPMTGRCVPPRTSADVDECQLFRDQVCKSGVCVNTAPGYSCYCSNGYYYHTQRLECIDNDECADEEPA

SEQ ID NO: 8132 - protein, 224 aa, Homo sapiens
  SITE 1: note = misc_feature - Xaa can be any naturally occurring amino acid
XNTDGSFACTCAPGYRPGPRGASCLDVDECSEEDLCQSGICTNTDGSFECICPPGHRAGPDLASCLDVDECRERGPALCGSQRCENSPGSYRCVRDCDPGYHAGPEGTCDDVDECQEYGPEICGAQRCENTPGSYRCTPACDPGYQPTPGGGCQDVNECETLQGVCGAALCENVEGSFLCVCPNSPEEFDPMTGRCVPPRTSAGTFPGSQPQAPASPVLPARPP

SEQ ID NO: 8133 - protein, 674 aa, Homo sapiens
  SITE 1: note = misc_feature - Xaa can be any naturally occurring amino acid
XNTEGSFQCVCPMGFQPNTAGSECEDVDECENHLACPGQECVNSPGSFQCRTCPSGHHLHRGRCTDVDECSSGAPPCGPHGHCTNTEGSFRCSCAPGYRAPSGRPGPCADVNECLEGDFCFPHGECLNTDGSFACTCAPGYRPGPRGASCLDVDECSEEDLCQSGICTNTDGSFECICPPGHRAGPDLASCLDVDECRERGPALCGSQRCENSPGSYRCVRDCDPGYHAGPEGTCDDVNECETLQGVCGAALCENVEGSFLCVCPNSPEEFDPMTGRCVPPRTSAGTFPGSQPQAPASPVLPARPPPPPLPRRPSTPRQGPVGSGRRECYFDTAAPDACDNILARNVTWQECCCTVGEGWGSGCRIQQCPGTETAEYQSLCPHGRGYLAPSGDLSLRRDVDECQLFRDQVCKSGVCVNTAPGYSCYCSNGYYYHTQRLECIDNDECADEEPACEGGRCVNTVGSYHCTCEPPLVLDGSQRRCVSNESQSLDDNLGVCWQEVGADLVCSHPRLDRQATYTECCCLYGEAWGMDCALCPAQDSDDFEALCNVLRPPAYSPPRPGGFGLPYEYGPDLGPPYQGLPYGPELYPPPALPYDPYPPPPGPFARREAPYGAPRFDMPDFEDDGGPYGESEAPAPPGPGTRWPYRSRDTRRSFPEPEEPPEGGSYAGSLAEP

SEQ ID NO: 8134 - protein, 94 aa, Homo sapiens
  SITE 1: note = misc_feature - Xaa can be any naturally occurring amino acid
XRFDMPDFEDDGGPYGESEAEECGILDGCTNGRCVRVPEGFTCRCFDGYRLDMTRMACVDINECDEAEAASPLCVNARCLNTDGSFRCICRPGF

SEQ ID NO: 8135 - protein, 957 aa, Homo sapiens
  SITE 1: note = misc_feature - Xaa can be any naturally occurring amino acid
XVDECRRVPPPCAPGRCENSPGSFRCVCGPGFRAGPRAAECLDVDECHRVPPPCDLGRCENTPGSFLCVCPAGYQAAPHGASCQDVDECARSPPPCTYGRCENTEGSFQCVCPMGFQPNTAGSECEDVDECENHLACPGQECVNSPGSFQCRTCPSGHHLHRGRCTDVDECSSGAPPCGPHGHCTNTEGSFRCSCAPGYRAPSGRPGPCADVNECLEGDFCFPHGECLNTDGSFACTCAPGYRPGPRGASCLDVDECSEEDLCQSGICTNTDGSFECICPPGHRAGPDLASCLDVDECRERGPALCGSQRCENSPGSYRCVRDCDPGYHAGPEGTCDDVDECQEYGPEICGAQRCENTPGSYRCTPACDPGYQPTPGGGCQDVDECRNRSFCGAHAVCQNLPGSFQCLCDQGYEGARDGRHCVDVNECETLQGVCGAALCENVEGSFLCVCPNSPEEFDPMTGRCVPPRTSAGTFPGSQPQAPASPVLPARPPPPPLPRRPSTPRQGPVGSGRRECYFDTAAPDACDNILARNVTWQECCCTVGEGWGSGCRIQQCPGTETAEYQSLCPHGRGYLAPSGDLSLRRDVDECQLFRDQVCKSGVCVNTAPGYSCYCSNGYYYHTQRLECIDNDECADEEPACEGGRCVNTVGSYHCTCEPPLVLDGSQRRCVSNESQSLDDNLGVCWQEVGADLVCSHPRLDRQATYTECCCLYGEAWGMDCALCPAQDSDDFEALCNVLRPPAYSPPRPGGFGLPYEYGPDLGPPYQGLPYGPELYPPPALPYDPYPPPPGPFARREAPYGAPRFDMPDFEDDGGPYGESEAPAPPGPGTRWPYRSRDTRRSFPEPEEPPEGGSYAGSLAEPYEELEAEECGILDGCTNGRCVRVPEGFTCRCFDGYRLDMTRMACVDINECDEAEAASPLCVNARCLNTDGSFRCICRPGFAPTHQPHHCAPARPRA

SEQ ID NO: 8136 - protein, 191 aa, Homo sapiens
  SITE 1: note = misc_feature - Xaa can be any naturally occurring amino acid
XVDECSEEDLCQSGICTNTDGSFECICPPGHRAGPDLASCLDVDECRERGPALCGSQRCENSPGSYRCVRDCDPGYHAGPEGTCDDVDECQEYGPEICGAQRCENTPGSYRCTPACDPGYQPTPGGGCQDVNECETLQGVCGAALCENVEGSFLCVCPNSPEEFDPMTGRCVPPRTSADVDECQLFRDQVC

SEQ ID NO: 8137 - protein, 189 aa, Homo sapiens
  SITE 1: note = misc_feature - Xaa can be any naturally occurring amino acid
XVDECSEEDLCQSGICTNTDGSFECICPPGHRAGPDLASCLDVDECRERGPALCGSQRCENSPGSYRCVRDCDPGYHAGPEGTCDDVDECRNRSFCGAHAVCQNLPGSFQCLCDQGYEGARDGRHCVDVNECETLQGVCGAALCENVEGSFLCVCPNSPEEFDPMTGRCVPPRTSAGTFPGSQPQAPAS

SEQ ID NO: 8138 - protein, 416 aa, Homo sapiens
MEATGISLASQLKVPPYASENQTCRDQEKEYYEPQHRICCSRCPPGTYVSAKCSRIRDTVCATCAENSYNEHWNYLTICQLCRPCDPVMGLEEIAPCTSKRKTQCRCQPGMFCAAWALECTHCELLSDCPPGTEAELKDEVGKGNNHCVPCKAGHFQNTSSPSARCQPHTRCENQGLVEAAPGTAQSDTTCKNPLEPLPPEMSGTMLMLAVLLPLAFFLLLATVFSCIWKSHPSLCRKLGSLLKRRPQGEGPNPVAGSWEPPKAHPYFPDLVQPLLPISGDVSPVSTGLPAAPVLEAGVPQQQSPLDLTREPQLEPGEQSQVAHGTNGIHVTGGSMTITGNIYIYNGPVLGGPPGPGDLPATPEPPYPIPEEGDPGPPGLSTPHQEDGKAWHLAETEHCGATPSNRGPRNQFITHD

SEQ ID NO: 8139 - protein, 148 aa, Homo sapiens
MGLEEIAPCTSKRKTQCRCQPGMFCAAWALECTHCELLSDCPPGTEAELKDEVGKGNNHCVPCKAGHFQNTSSPSARCQPHTRCENQGLVEAAPGTAQSDTTCKNPLEPLPPEMSEPALSKGVENLQALLYQAATGSSEASFPTLSPL

SEQ ID NO: 8140 - protein, 292 aa, Homo sapiens
MGLEEIAPCTSKRKTQCRCQPGMFCAAWALECTHCELLSDCPPGTEAELKDEVGKGNNHCVPCKAGHFQNTSSPSARCQPHTRCENQGLVEAAPGTAQSDTTCKNPLEPLPPEMSGSLLKRRPQGEGPNPVAGSWEPPKAHPYFPDLVQPLLPISGDVSPVSTGLPAAPVLEAGVPQQQSPLDLTREPQLEPGEQSQVAHGTNGIHVTGGSMTITGNIYIYNGPVLGGPPGPGDLPATPEPPYPIPEEGDPGPPGLSTPHQEDGKAWHLAETEHCGATPSNRGPRNQFITHD

SEQ ID NO: 8141 - protein, 74 aa, Homo sapiens
MGLEEIAPCTSKRKTQCRCQPGMFCAAWALECTHCELLSDCPPGTEAELKGVRTKVWWRQLQALPSPTQPAKIH

SEQ ID NO: 8142 - protein, 218 aa, Homo sapiens
MLLPWATSAPGLAWGPLVLGLFGLLAASQPQAVPPYASENQTCRDQEKEYYEPQHRICCSRCPPAKCSRIRDTVCATCAENSYNEHWNYLTICQLCRPCDPVMGLEEIAPCTSKRKTQCRCQPGMFCAAWALECTHCELLSDCPPGTEAELKDEVGKGNNHCVPCKAGHFQNTSSPSARCQPHTRCENQGLVEAAPGTAQSDTTCKNPLEPLPPEMSG

SEQ ID NO: 8143 - protein, 435 aa, Homo sapiens
MLLPWATSAPGLAWGPLVLGLFGLLAASQPQAVPPYASENQTCRDQEKEYYEPQHRICCSRCPPGTYVSAKCSRIRDTVCATCAENSYNEHWNYLTICQLCRPCDPVMGLEEIAPCTSKRKTQCRCQPGMFCAAWALECTHCELLSDCPPGTEAELKDEVGKGNNHCVPCKAGHFQNTSSPSARCQPHTRCENQGLVEAAPGTAQSDTTCKNPLEPLPPEMSGTMLMLAVLLPLAFFLLLATVFSCIWKSHPSLCRKLGSLLKRRPQGEGPNPVAGSWEPPKAHPYFPDLVQPLLPISGDVSPVSTGLPAAPVLEAGVPQQQSPLDLTREPQLEPGEQSQVAHGTNGIHVTGGSMTITGNIYIYNGPVLGGPPGPGDLPATPEPPYPIPEEGDPGPPGLSTPHQEDGKAWHLAETEHCGATPSNRGPRNQFITHD

SEQ ID NO: 8144 - protein, 696 aa, Homo sapiens
MGLCLAGRRRSVQWCAVSQPEATKCFQWQRNMRKVRGPPVSCIKRDSPIQCIQAIAENRADAVTLDGGFIYEAGLAPYKLRPVAAEVYGTERQPRTHYYAVAVVKKGGSFQLNELQGLKSCHTGLRRTAGWNVPIGTLRPFLNWTGPPEPIEAAVARFFSASCVPGADKGQFPNLCRLCAGTGENKCAFSSQEPYFSYSGAFKCLRDGAGDVAFIRESTVFEDLSDEAERDEYELLCPDNTRKPVDKFKDCHLARVPSHAVVARSVNGKEDAIWNLLRQAQEKFGKDKSPKFQLFGSPSGQKDLLFKDSAIGFSRVPPRIDSGLYLGSGYFTAIQNLRKSEEEVAARRARVVWCAVGEQELRKCNQWSGLSEGSVTCSSASTTEDCIALVLKGEADAMSLDGGYVYTAGKCGLVPVLAENYKSQQSSDPDPNCVDRPVEGYLAVAVVRRSDTSLTWNSVKGKKSCHTAVDRTAGWNIPMGLLFNQTGSCKFDEYFSQSCAPGSDPRSNLCALCIGDEQGENKCVPNSNERYYGYTGAFRCLAENAGDVAFVKDVTVLQNTDGNNNEAWAKDLKLADFALLCLDGKRKPVTEARSCHLAMAPNHAVVSRMDKVERLKQVLLHQQAKFGRNGSDCPDKFCLFQSETKNLLFNDNTECLARLHGKTTYEKYLGPQYVAGITNLKKCSTSPLLEACEFLR

SEQ ID NO: 8145 - protein, 182 aa, Homo sapiens
MKLVFLVLLFLGALGFLWMPFIRQPGLCLAGRRRSVQWCAVSQPEATKCFQWQRNMRKVRGPPVSCIKRDSPIQCIQAIAENRADAVTLDGGFIYEAGLAPYKLRPVAAEVYGTERQPRTHYYAVAVVKKGGSFQLNELQGLKSCHTGLRRTAGWNVPIGTLRPFLNWTGPPEPIEAAVARF

SEQ ID NO: 8146 - protein, 710 aa, Homo sapiens
MKLVFLVLLFLGALGLCLAGRRRSVQWCAVSQPEATKCFQWQRNMRKVRGPPVSCIKRDSPIQCIQAIAENRADAVTLDGGFIYEAGLAPYKLRPVAAEVYGTERQPRTHYYAVAVVKKGGSFQLNELQGLKSCHTGLRRTAGWNVPIGTLRPFLNWTGPPEPIEAAVARFFSASCVPGADKGQFPNLCRLCAGTGENKCAFSSQEPYFSYSGAFKCLRDGAGDVAFIRESTVFEDLSDEAERDEYELLCPDNTRKPVDKFKDCHLARVPSHAVVARSVNGKEDAIWNLLRQAQEKFGKDKSPKFQLFGSPSGQKDLLFKDSAIGFSRVPPRIDSGLYLGSGYFTAIQNLRKSEEEVAARRARVVWCAVGEQELRKCNQWSGLSEGSVTCSSASTTEDCIALVLKGEADAMSLDGGYVYTAGKCGLVPVLAENYKSQQSSDPDPNCVDRPVEGYLAVAVVRRSDTSLTWNSVKGKKSCHTAVDRTAGWNIPMGLLFNQTGSCKFDEYFSQSCAPGSDPRSNLCALCIGDEQGENKCVPNSNERYYGYTGAFRCLAENAGDVAFVKDVTVLQNTDGNNNEAWAKDLKLADFALLCLDGKRKPVTEARSCHLAMAPNHAVVSRMDKVERLKQVLLHQQAKFGRNGSDCPDKFCLFQSETKNLLFNDNTECLARLHGKTTYEKYLGPQYVAGITNLKKCSTSPLLEACEFLRK

SEQ ID NO: 8147 - protein, 708 aa, Homo sapiens
MKLVFLVLLFLGALGLCLAGRRRSVQWCAVSQPEATKCFQWQRNMRKVRGPPVSCIKRDSPIQCIQAIAENRADAVTLDGGFIYEAGLAPYKLRPVAAEVYGTERQPRTHYYAVAVVKKGGSFQLNELQGLKSCHTGLRRTAGWNVPIGTLRPFLNWTGPPEPIEAAVARFFSASCVPGADKGQFPNLCRLCAGTGENKCAFSSQEPYFSYSGAFKCLRDGAGDVAFIRESTVFEDLSDEAERDEYELLCPDNTRKPVDKFKDCHLARVPSHAVVARSVNGKEDAIWNLLRQAQEKFGKDKSPKFQLFGSPSGQKDLLFKDSAIGFSRVPPRIDSGLYLGSGYFTAIQNLRKSEEEVAARRARVVWCAVGEQELRKCNQWSGLSEGSVTCSSASTTEDCIALKGEADAMSLDGGYVYTAGKCGLVPVLAENYKSQQSSDPDPNCVDRPVEGYLAVAVVRRSDTSLTWNSVKGKKSCHTAVDRTAGWNIPMGLLFNQTGSCKFDEYFSQSCAPGSDPRSNLCALCIGDEQGENKCVPNSNERYYGYTGAFRCLAENAGDVAFVKDVTVLQNTDGNNNEAWAKDLKLADFALLCLDGKRKPVTEARSCHLAMAPNHAVVSRMDKVERLKQVLLHQQAKFGRNGSDCPDKFCLFQSETKNLLFNDNTECLARLHGKTTYEKYLGPQYVAGITNLKKCSTSPLLEACEFLRK

SEQ ID NO: 8148 - protein, 666 aa, Homo sapiens
MRKVRGPPVSCIKRDSPIQCIQAIAENRADAVTLDGGFIYEAGLAPYKLRPVAAEVYGTERQPRTHYYAVAVVKKGGSFQLNELQGLKSCHTGLRRTAGWNVPIGTLRPFLNWTGPPEPIEAAVARFFSASCVPGADKGQFPNLCRLCAGTGENKCAFSSQEPYFSYSGAFKCLRDGAGDVAFIRESTVFEDLSDEAERDEYELLCPDNTRKPVDKFKDCHLARVPSHAVVARSVNGKEDAIWNLLRQAQEKFGKDKSPKFQLFGSPSGQKDLLFKDSAIGFSRVPPRIDSGLYLGSGYFTAIQNLRKSEEEVAARRARVVWCAVGEQELRKCNQWSGLSEGSVTCSSASTTEDCIALVLKGEADAMSLDGGYVYTAGKCGLVPVLAENYKSQQSSDPDPNCVDRPVEGYLAVAVVRRSDTSLTWNSVKGKKSCHTAVDRTAGWNIPMGLLFNQTGSCKFDEYFSQSCAPGSDPRSNLCALCIGDEQGENKCVPNSNERYYGYTGAFRCLAENAGDVAFVKDVTVLQNTDGNNNEAWAKDLKLADFALLCLDGKRKPVTEARSCHLAMAPNHAVVSRMDKVERLKQVLLHQQAKFGRNGSDCPDKFCLFQSETKNLLFNDNTECLARLHGKTTYEKYLGPQYVAGITNLKKCSTSPLLEACEFLRK

SEQ ID NO: 8149 - protein, 864 aa, Homo sapiens
MGCWGQLLVWFGAAGAILCSSPGSQETFLRSSPLPLASPSPRDPKVSAPPSILEPASPLNSPGTEGSWLFSTCGASGRHGPTQTQCDGAYAGTSVVVTVGAAGQLRGVQLWRVPGPGQYLISAYGAAGGKGAKNHLSRAHGVFVSAIFSLGLGESLYILVGQQGEDACPGGSPESQLVCLGESRAVEEHAAMDGSEGVPGSRRWAGGGGGGGGATYVFRVRAGELEPLLVAAGGGGRAYLRPRDRGRTQASPEKLENRSEAPGSGGRGGAAGGGGGWTSRAPSPQAGRSLQEGAEGGQGCSEAWATLGWAAAGGFGGGGGACTAGGGGGGYRGGDASETDNLWADGEDGVSFIHPSSELFLQPLAVTENHGEVEIRRHLNCSHCPLRDCQWQAELQLAECLCPEGMELAVDNVTCMDLHKPPGPLVLMVAVVATSTLSLLMVCGVLILVKQKKWQGLQEMRLPSPELELSKLRTSAIRTAPNPYYCQVGLGPAQSWPLPPGVTEVSPANVTLLRALGHGAFGEVYEGLVIGLPGDSSPLQVAIKTLPELCSPQDELDFLMEALIISKFRHQNIVRCVGLSLRATPRLILLELMSGGDMKSFLRHSRPHLGQPSPLVMRDLLQLAQDIAQGCHYLEENHFIHRDIAARNCLLSCAGPSRVAKIGDFGMARDIYRASYYRRGDRALLPVKWMPPEAFLEGIFTSKTDSWSFGVLLWEIFSLGYMPYPGRTNQEVLDFVVGGGRMDPPRGCPGPVYRIMTQCWQHEPELRPSFASILERLQYCTQDPDVLNSLLPMELGPTPEEEGTSGLGNRSLECLRPPQPQELSPEKLKSWGGSPLGPWLSSGLKPLKSRGLQPQNLWNPTYRS

SEQ ID NO: 8150 - protein, 803 aa, Homo sapiens
MGCWGQLLVWFGAAGAILCSSPGSQETFLRSSPLPLASPSPRDPKVSAPPSILEPASPLNSPGTEGSWLFSTCGASGRHGPTQTQCDGAYAGTSVVVTVGAAGQLRGVQLWRVPGPGQYLISAYGAAGGKGAKNHLSRAHGVFVSAIFSLGLGESLYILVGQQGEDACPGGSPESQLVCLGESRAVEEHAAMDGSEGVPGSRRWAGGGGGGGGATYVFRVRAGELEPLLVAAGGGGRAYLRPRDRGRTQASPEKLENRSEAPGSGGRGGAAGGDASETDNLWADGEDGVSFIHPSSELFLQPLAVTENHGEVEIRRHLNCSHCPLRDCQWQAELQLAECLCPEGMELAVDNVTCMDLHKPPGPLVLMVAVVATSTLSLLMVCGVLILVKQKKWQGLQEMRLPSPELELSKLRTSAIRTAPNPYYCQVGLGPAQSWPLPPGVTEVSPANVTLLRALGHGAFGEVYEGLVIGLPGDSSPLQVAIKTLPELCSPQDELDFLMEALIISKFRHQNIVRCVGLSLRATPRLILLELMSGGDMKSFLRHSRPHLGQPSPLVMRDLLQLAQDIAQGCHYLEENHFIHRDIAARNCLLSCAGPSRVAKIGDFGMARDIYRASYYRRGDRALLPVKWMPPEAFLEGIFTSKTDSWSFGVLLWEIFSLGYMPYPGRTNQEVLDFVVGGGRMDPPRGCPGPVYRIMTQCWQHEPELRPSFASILERLQYCTQDPDVLNSLLPMELGPTPEEEGTSGLGNRSLECLRPPQPQELSPEKLKSWGGSPLGPWLSSGLKPLKSRGLQPQNLWNPTYRS

SEQ ID NO: 8151 - protein, 734 aa, Homo sapiens
MGCWGQLLVWFGAAGAILCSSPGSQETFLRSSPLPLASPSPRDPKVSAPPSILEPASPLNSPGTEGSWLFSTCGASGRHGPTQTQCDGAYAGTSVVVTVGAAGQLRGVQLWRVPGPGQYLISAYGAAGGKGAKNHLSRAHGVFVSAIFSLGLGESLYILVGQQGEDACPGGSPESQLVCLGESRAVEEHAAMDGSEGVPGSRRWAGGGGGGGGATYVFRVRAGELEPLLVAAGGGGRAYLRPRDRGRTQASPEKLENRSEAPGSGGRGGAAGGDASETDNLWADGEDGVSFIHPSSELFLQPLAVTENHGEVEIRRHLNCSHCPLRDCQWQAELQLAECLCPEGMELAVDNVTCMDLHKPPGPLVLMVAVVATSTLSLLMVCGVLILGGAWPGPVLASATRCHRGFPSQCYSAQTLPELCSPQDELDFLMEALIISKFRHQNIVRCVGLSLRATPRLILLELMSGGDMKSFLRHSRPHLGQPSPLVMRDLLQLAQDIAQGCHYLEENHFIHRDIAARNCLLSCAGPSRVAKIGDFGMARDIYRASYYRRGDRALLPVKWMPPEAFLEGIFTSKTDSWSFGVLLWEIFSLGYMPYPGRTNQEVLDFVVGGGRMDPPRGCPGPVYRIMTQCWQHEPELRPSFASILERLQYCTQDPDVLNSLLPMELGPTPEEEGTSGLGNRSLECLRPPQPQELSPEKLKSWGGSPLGPWLSSGLKPLKSRGLQPQNLWNPTYRS

SEQ ID NO: 8152 - protein, 562 aa, Homo sapiens
MGCWGQLLVWFGAAGGDASETDNLWADGEDGVSFIHPSSELFLQPLAVTENHGEVEIRRHLNCSHCPLRDCQWQAELQLAECLCPEGMELAVDNVTCMDLHKPPGPLVLMVAVVATSTLSLLMVCGVLILGTKRLAGTVDSRLLLSMKQKKWQGLQEMRLPSPELELSKLRTSAIRTAPNPYYCQVGLGPAQSWPLPPGVTEVSPANVTLLRALGHGAFGEVYEGLVIGLPGDSSPLQVAIKTLPELCSPQDELDFLMEALIISKFRHQNIVRCVGLSLRATPRLILLELMSGGDMKSFLRHSRPHLGQPSPLVMRDLLQLAQDIAQGCHYLEENHFIHRDIAARNCLLSCAGPSRVAKIGDFGMARDIYRASYYRRGDRALLPVKWMPPEAFLEGIFTSKTDSWSFGVLLWEIFSLGYMPYPGRTNQEVLDFVVGGGRMDPPRGCPGPVYRIMTQCWQHEPELRPSFASILERLQYCTQDPDVLNSLLPMELGPTPEEEGTSGLGNRSLECLRPPQPQELSPEKLKSWGGSPLGPWLSSGLKPLKSRGLQPQNLWNPTYRS

SEQ ID NO: 8153 - protein, 338 aa, Homo sapiens
MSLSAFTLFLALIGGTSGQYYDYDFPLSIYGQSSPNCAPECNCPESYPSAMYCDELKLKSVPMVPPGIKYLYLRNNQIDHIDEKAFENVTDLQWLILDHNLLENSKIKGRVFSKLKQLKKLHINHNNLTESVGPLPKSLEDLQLTHNKITKLGSFEGLVNLTFIHLQHNRLKEDAVSAAFKGLKSLEYLDLSFNQIARLPSGLPVSLLTLYLDNNKISNIPDEYFKRFNALQYLRLSHNELADSGIPGNSFNVSSLVELDLSYNKLKNIPTVNENLENYYLEVNQLEKFDIKSFCKILGPLSYSKIKHLRLDGNRISETSLPPDMYECLRVANEVTLN

SEQ ID NO: 8154 - protein, 176 aa, Homo sapiens
MKFSPAHYLLPLLPALVLSTRQDYEELEKQLKEVFKERSTILRQLTKTSRELDGIKVNLQSLKNDEQSAKTDVQKLLELGQKQREEMKSLQEALQNQLKETSEKAEKHQATINFLKTEVERKSKMIRDLQNEAQQLTDLEQKLAVAKNELEKAALDRESQMKAMKETVQLCLTSVF

SEQ ID NO: 8155 - protein, 346 aa, Homo sapiens
MKFSPAHYLLPLLPALVLSTRQDYEELEKQLKEVFKERSTILRQLTKTSRELDGIKVNLQSLKNDEQSAKTDVQKLLELGQKQREEMKSLQEALQNQLKETSEKAEKHQATINFLKTEVERKSKMIRDLQNENKSLKNKLLSGNKLCGIHAEESKKIQAQLKELRYGKKDLLFKAQQLTDLEQKLAVAKNELEKAALDRESQMKAMKETVQLCLTSVFRDQPPPPLSLITSNPTRMLLPPRNIASKLPDAAAKSKPQQSASGNNESSQVESTKEGNPSTTACDSQDEGRPCSMKHKESPPSNATAETEPIPQKLQMPPCSECEVKKAPEKPLTSFEGMAAREEKIL

SEQ ID NO: 8156 - protein, 260 aa, Homo sapiens
MKSLQEALQNQLKETSEKAEKHQATINFLKTEVERKSKMIRDLQNENKSLKNKLLSGNKLCGIHAEESKKIQAQLKELRYGKKDLLFKAQQLTDLEQKLAVAKNELEKAALDRESQMKAMKETVQLCLTSVFRDQPPPPLSLITSNPTRMLLPPRNIASKLPDAAAKSKPQQSASGNNESSQVESTKEGNPSTTACDSQDEGRPCSMKHKESPPSNATAETEPIPQKLQMPPCSECEVKKAPEKPLTSFEGMAAREEKIL

SEQ ID NO: 8157 - protein, 260 aa, Homo sapiens; identical to SEQ ID NO: 8156

SEQ ID NO: 8158 - protein, 978 aa, Homo sapiens
MGPPSSSGFYVSRAVALLLAGLVAALLLALAVLAALYGHCERVPPSELPGLRDLEAESSPPLRQKPTPTPKPSSARELAVTTTPSNWRPPGPWDQLRLPPWLVPLHYDLELWPQLRPDELPAGSLPFTGRVNITVRCTVATSRLLLHSLFQDCERAEVRGPLSPDDVWFALDTEYMVLELSEPLKPGSSYELQLSFSGLVKEDLREGLFLNVYTDQGERRALLASQLEPTFARYVFPCFDEPALKATFNITMIHHPSYVALSNMPKLGQSEKEDVNGSKWTVTTFSTTPHMPTYLVAFVICDYDHVNRTERGKEIRIWARKDAIANGSADFALNITGPIFSFLEDLFNISYSLPKTDIIALPSFDNHAMENWGLMIFDESGLLLEPKDQLTEKKTLISYVVSHEIGHQWFGNLVTMNWWNNIWLNEGFASYFEFEVINYFNPKLPRNEIFFSNILHNILREDHALVTRAVAMKVENFKTSEIQELFDIFTYSKGASMARMLSCFLNEHLFVSALKSYLKTFSYSNAEQDDLWRHFQMAIDDQSTVILPATIKNIMDSWTHQSGFPVITLNVSTGVMKQEPFYLENIKNRTLLTSNDTWIVPILWIKNGTTQPLVWLDQSSKVFPEMQVSDSDHDWVILNLNMTGYYRVNYDKLGWKKLNQQLEKDPKAIPVIHRLQLIDDAFSLSKNNYIEIETALELTKYLAEEDEIIVWHTVLVNLVTRDLVSEVNIYDIYSLLKRYLLKRLNLIWNIYSTIIRENVLALQDDYLALISLEKLFVTACWLGLEDCLQLSKELFAKWVDHPENEIPYPIKDVVLCYGIALGSDKEWDILLNTYTNTTNKEEKIQLAYAMSCSKDPWILNRYMEYAISTSPFTSNETNIIEVVASSEVGRYVAKDFLVNNWQAVSKRYGTQSLINLIYTIGRTVTTDLQIVELQQFFSNMLEEHQRIRVHANLQTIKNENLKNKKLSARIAAWLRRNT

SEQ ID NO: 8159 - protein, 990 aa, Homo sapiens
MGPPSSSGFYVSRAVALLLAGLVAALLLALAVLAALYGHCERVPPSELPGLRDLEAESSPPLRQKPTPTPKPSSARELAVTTTPSNWRPPGPWDQLRLPPWLVPLHYDLELWPQLRPDELPAGSLPFTGRVNITVRCTVATSRLLLHSLFQDCERAEVRGPLSPGTGNATVGRVPVDDVWFALDTEYMVLELSEPLKPGSSYELQLSFSGLVKEDLREGLFLNVYTDQGERRALLASQLEPTFARYVFPCFDEPALKATFNITMIHHPSYVALSNMPKLGQSEKEDVNGSKWTVTTFSTTPHMPTYLVAFVICDYDHVNRTERGKEIRIWARKDAIANGSADFALNITGPIFSFLEDLFNISYSLPKTDIIALPSFDNHAMENWGLMIFDESGLLLEPKDQLTEKKTLISYVVSHEIGHQWFGNLVTMNWWNNIWLNEGFASYFEFEVINYFNPKLPRNEIFFSNILHNILREDHALVTRAVAMKVENFKTSEIQELFDIFTYSKGASMARMLSCFLNEHLFVSALKSYLKTFSYSNAEQDDLWRHFQMAIDDQSTVILPATIKNIMDSWTHQSGFPVITLNVSTGVMKQEPFYLENIKNRTLLTSNDTWIVPILWIKNGTTQPLVWLDQSSKVFPEMQVSDSDHDWVILNLNMTGYYRVNYDKLGWKKLNQQLEKDPKAIPVIHRLQLIDDAFSLSKNNYIEIETALELTKYLAEEDEIIVWHTVLVNLVTRDLVSEVNIYDIYSLLKRYLLKRLNLIWNIYSTIIRENVLALQDDYLALISLEKLFVTACWLGLEDCLQLSKELFAKWVDHPENEIPYPIKDVVLCYGIALGSDKEWDILLNTYTNTTNKEEKIQLAYAMSCSKDPWILNRYMEYAISTSPFTSNETNIIEVVASSEVGRYVAKDFLVNNWQAVSKRYGTQSLINLIYTIGRTVTTDLQIVELQQFFSNMLEEHQRIRVHANLQTIKNENLKNKKLSARIAAWLRRNT

SEQ ID NO: 8160 - protein, 701 aa, Homo sapiens
MGPPSSSGFYVSRAVALLLAGLVAALLLALAVLAALYGHCERVPPSELPGLRDLEAESSPPLRQKPTPTPKPSSARELAVTTTPSNWRPPGPWDQLRLPPWLVPLHYDLELWPQLRPDELPAGSLPFTGRVNITVRCTVATSRLLLHSLFQDCERAEVRGPLSPGTGNATVGRVPVDDVWFALDTEYMVLELSEPLKPGSSYELQLSFSGLVKEDLREGLFLNVYTDQGERRALLASQLEPTFARYVFPCFDEPALKATFNITMIHHPSYVALSNMPKLGQSEKEDVNGSKWTVTTFSTTPHMPTYLVAFVICDYDHVNRTERGKEIRIWARKDAIANGSADFALNITGPIFSFLEDLFNISYSLPKTDIIALPSFDNHAMENWGLMIFDESGLLLEPKDQLTEKKTLISYVVSHEIGHQWFGNLVTMNWWNNIWLNEGFASYFEFEVINYFNPKLPRNEIFFSNILHNILREDHALVTRAVAMKVENFKTSEIQELFDIFTYSKGASMARMLSCFLNEHLFVSALKSYLKTFSYSNAEQDDLWRHFQMAIDDQSTVILPATIKNIMDSWTHQSGFPVITLNVSTGVMKQEPFYLENIKNRTLLTSNDTWIVPILWIKNGTTQPLVWLDQSSKVFPEMQVSDSDHDWVILNLNMTGYYRVNYDKLGWKKLNQQLEKDPKAIPVIHRLQLIDDAFSLSKGTY

SEQ ID NO: 8161 - protein, 226 aa, Homo sapiens
MKVENFKTSEIQELFDIFTYSKGASMARMLSCFLNEHLFVSALKSYLKTFSYSNAEQDDLWRHFQMAIDDQSTVILPATIKNIMDSWTHQSGFPVITLNVSTGVMKQEPFYLENIKNRTLLTSNDTWIVPILWIKNGTTQPLVWLDQSSKVFPEMQVSDSDHDWVILNLNMTGYYRVNYDKLGWKKLNQQLEKDPKAIPVIHRLQLIDDAFSLSNLQDFGHLKVPN

SEQ ID NO: 8162 - protein, 198 aa, Homo sapiens
MKVENFKTSEIQELFDIFTYSKGASMARMLSCFLNEHLFVSALKSYLKTFSYSNAEQDDLWRHFQMAIDDQSTVILPATIKNIMDSWTHQSGFPVITLNVSTGVMKQEPFYLENIKNRTLLTSNDTWIVPILWIKNGTTQPLVWLDQSSKVFPEMQVSDSDHDWVILNLNMTGYYRVNYDKLGWKKLNQQLEKDPKMR

SEQ ID NO: 8163 - protein, 198 aa, Homo sapiens; identical to SEQ ID NO: 8162

SEQ ID NO: 8164 - protein, 66 aa, Homo sapiens
MKIFLPVLLAALLGVERASSLMCFSCLNQKSNLYCLKPTICSDQDNYCVTVSASAGIASFPMQGIS

SEQ ID NO: 8165 - protein, 66 aa, Homo sapiens; identical to SEQ ID NO: 8164

SEQ ID NO: 8166 - protein, 73 aa, Homo sapiens
MKIFLPVLLAALLGVERASSLMCFSCLNQKSNLYCLKPTICSDQDNYCVTVSASAGIGECQASDRAFLPWPSP

SEQ ID NO: 8167 - protein, 66 aa, Homo sapiens
MKIFLPVLLAALLGVERASSLMCFSCLNQKSNLYCLKPTICSDQDNYCVTVSASAGIGGFAGGTDS

SEQ ID NO: 8168 - protein, 131 aa, Homo sapiens
MKIFLPVLLAALLGVERASSLMCFSCLNQKSNLYCLKPTICSDQDNYCVTVSASAGIGNLVTFGHSLSKTCSPACPIPEGVNVGVASMGISCCQSFLCNFSAADGGLRASVTLLGAGLLLSLLPALLRFGP

SEQ ID NO: 8169 - protein, 131 aa, Homo sapiens; identical to SEQ ID NO: 8168

SEQ ID NO: 8170 - protein, 131 aa, Homo sapiens; identical to SEQ ID NO: 8168

SEQ ID NO: 8171 - protein, 131 aa, Homo sapiens; identical to SEQ ID NO: 8168

SEQ ID NO: 8172 - protein, 131 aa, Homo sapiens; identical to SEQ ID NO: 8168

SEQ ID NO: 8173 - protein, 131 aa, Homo sapiens; identical to SEQ ID NO: 8168

SEQ ID NO: 8174 - protein, 131 aa, Homo sapiens; identical to SEQ ID NO: 8168

SEQ ID NO: 8175 - protein, 41 aa, Homo sapiens
MKIFLPVLLAALLGVEREEQSVLPEADHLLRPGQLLRDCVC

SEQ ID NO: 8176 - protein, 41 aa, Homo sapiens; identical to SEQ ID NO: 8175

SEQ ID NO: 8177 - protein, 147 aa, Homo sapiens
MTSGIPGCGGACVLPSRAPLRRRDPQHCSPTLSEAPLLRAHTQTRLLTRGLPTPNTTRTVQVSVTVTPTWSPVRPRQDRLLWFVTSRQDGHPLQNEDLLASAAGCPSGCGASQLADVLLLLEPEEQSVLPEADHLLRPGQLLRDCVC

SEQ ID NO: 8178 - protein, 201 aa, Homo sapiens
MKVHMLVGVLVMVGFTVGKVPVPDIRTCHFCLVEDPSVGCISGSEKCTISSSSLCMVITIYYDVKVRFIVRGCGQYISYRCQEKRNTYFAEYWYQAQCCQYDYCNSWSSPQLQSSLPEPHDRPLALPLSDSQIQWFYQALNLSLPLPNFHAGTEPDGLDPMVTLSLNLGLSFAELRRMYLFLNSSGLLVLPQAGLLTPHPS

SEQ ID NO: 8179 - protein, 146 aa, Homo sapiens
MVITIYYDVKVRFIVRGCGQYISYRCQEKRNTYFAEYWYQAQCCQYDYCNSWSSPQLQSSLPEPHDRPLALPLSDSQIQWFYQALNLSLPLPNFHAGTEPDGLDPMVTLSLNLGLSFAELRRMYLFLNSSGLLVLPQAGLLTPHPS

SEQ ID NO: 8180 - protein, 133 aa, Homo sapiens
MKPQFVGILLSSLLGAALGNRMRCYNCGGSPSSSCKEAVTTCGEGRPQPGLEQIKLPGNPPVTLIHQHPACVAAHHCNQVETESVGDVTYPAHRDCYLGDLCNSAVASHVAPAGILAAAATALTCLLPGLWSG

SEQ ID NO: 8181 - protein, 174 aa, Homo sapiens
MKPQFVGILLSSLLGAALGNRMRCYNCGGSPSSSCKEAVTTCGEGRPQPGLEQIKLPGNRRCFLRGLKIPLGSLKSHLLCPRRQVLKPGVQHPSFILSLSPSDLDSPTSSLRRSPSLQSSGDRVGGRRDLSSPQGLLPGRPVQQRRGKPCGPCRHFGCSSYRPDLSLARTVERI

SEQ ID NO: 8182 - protein, 66 aa, Homo sapiens
MGTSSIFLCVLFLCGALGLTMSPARGRLRCYICGFTKPCHPVPTECRDDEACGISIGTSDQSEITE

SEQ ID NO: 8183 - protein, 125 aa, Homo sapiens
MGTSSIFLCVLFLCGALGLTMSPARGRLRCYICGFTKPCHPVPTECRDDEACGISIGTSGKSCLSRAQCPLPGYATYWLHSYTLWHHCCEQDLCNIAASPQQLTSLLASLPLFVASFAGRGHLLH

SEQ ID NO: 8184 - protein, 100 aa, Homo sapiens
MGTSSIFLCVLFLCGALGLTMSPARGRLRCYICGFTKPCHPVPTECRDDEACGISIGTSGRTLVQWPFSRRLPTSIHPAFPVAPASACLFHPTDQSEITE

SEQ ID NO: 8185 - protein, 88 aa, Homo sapiens
MLQLYKSRDLGVQITSPRFLSLCLAMGTSSIFLCVLFLCGALGLTMSPARGRLRCYICGFTKPCHPVPTECRDDEACGISIGTSDAHC

SEQ ID NO: 8186 - protein, 161 aa, Homo sapiens
MLAPQRTRAPSPRAAPRPTRSMLPAAMKGLGLALLAVLLCSAPAHGLWCQDCTLTTNSSHCTPKQCQPSDTVCASVRITDPSSSRKDHSVNKMCASSCDFVKRHFFSDYLMGFINSGILKVDVDCCEKDLCNGAAGAGHSPWALAGGLLLSLGPALLWAGP

SEQ ID NO: 8187 - protein, 161 aa, Homo sapiens; identical to SEQ ID NO: 8186

SEQ ID NO: 8188 - protein, 140 aa, Homo sapiens
MLPAAMKGLGLALLAVLLCSAPAHGLWCQDCTLTTNSSHCTPKQCQPSDTVCASVRITDPSSSRKDHSVNKMCASSCDFVKRHFFSDYLMGFINSGILKVDVDCCEKDLCNGAAGAGHSPWALAGGLLLSLGPALLWAGP

SEQ ID NO: 8189 - protein, 140 aa, Homo sapiens; identical to SEQ ID NO: 8188

SEQ ID NO: 8190 - protein, 165 aa, Homo sapiens
MALLALLLVVALPRVWTDANLTARQRDPEDSQRTDEGDNRVWCHVCERENTFECQNPRRCKWTEPYCVIAAVKIFPRFFMVAKQCSAGCAAMERPKPEEKRFLLEEPMPFFYLKCCKIRYCNLEGPPINSSVFKEYAGSMGESCGGLWLAILLLLASIAAGLSLS

SEQ ID NO: 8191 - protein, 100 aa, Homo sapiens
MALLALLLVVALPRVWTDANLTARQRDPEDSQRTDEGDNRVWCHVCERENTFECQNPRRCKWTEPYCVIAAVRRSSGLVNSDSAQQSLSSPSVSTKLVGC

SEQ ID NO: 8192 - protein, 85 aa, Homo sapiens
MALLALLLVVALPRVWTDANLTARQRDPEDSQRTDEGDNRVWCHVCERENTFECQNPRRCKWTEPYCVIAAVSEYLRSCWGPKGR

SEQ ID NO: 8193 - protein, 105 aa, Homo sapiens
MALLALLLVVALPRVWTDANLTARQRDPEDSQRTDEGDNRVWCHVCERENTFECQNPRRCKWTEPYCVIAAVTVLRWLCSDGETQARGEAVSPGRAHALLLPQVL

SEQ ID NO: 8194 - protein, 138 aa, Homo sapiens
MERLVLTLCTLPLAVASAGCATTPARNLSCYQCFKVSSWTECPPTWCSPLDQVCISNEVVVSFKWSVRVLLSKRCAPRCPNDNMKFEWSPAPMVQGVITRRCCSWALCNRALTPQEGRWALRGGLLLQVGLSLLRALL

SEQ ID NO: 8195 - protein, 162 aa, Homo sapiens
MKGFTATLFLWTLIFPSCSGGGGGKAWPTHVVCSDSGLEVLYQSCDPLQDFGFSVEKCSKQLKSNINIRFGIILREDIKELFLDLALMSQGSSVLNFSYPICEAALPKFSFCGRRKGEQIYYAGPVNNPEFTIPQGEYQVLLELYTEKRSTVACANATIMCS

SEQ ID NO: 8196 - protein, 162 aa, Homo sapiens; identical to SEQ ID NO: 8195

SEQ ID NO: 8197 - protein, 160 aa, Homo sapiens [sequence omitted]

SEQ ID NO: 8198 - protein, 130 aa, Homo sapiens
MLPFLFFSTLFSSIFTEAQKQYWVCNSSDASISYTYCGRDLKQLYFNLYITVNTMNLPKRKEVICRGSDDDYSFCRALKGETVNTTISFSFKGIKFSKGKYKCVVEAISGSPEEMLFCLEFVILHQPNSN

SEQ ID NO: 8199 - protein, 194 aa, Homo sapiens
MSALWLLLGLLALMDLSESSNWGCYGNIQSLDTPGASCGIGRRHGLNYCGVRASERLAEIDMPYLLKYQPMMQTIGQKYCMDPAVIAGVLSRKSPGDKILVNMGDRTSMVQDPGSQAPTSWISESQVSQTTEVLTTRIKEIQRRFPTWTPDQYLRGGLCAYSGGAGYVRSSQDLSCDFCNDVLARAKYLKRHGF

SEQ ID NO: 8200 - protein, 194 aa, Homo sapiens; identical to SEQ ID NO: 8199

SEQ ID NO: 8201 - protein, 169 aa, Homo sapiens
MLSSVVFWGLIALIGTSRGSYPFSHSMKPHLHPRLYHGCYGDIMTMKTSGATCDANSVMNCGIRGSEMFAEMDLRAIKPYQTLIKEVGQRHCVDPAVIAAIISRESHGGSVLQDGWDHRGLKFGLMQLDKQTYHPVGAWDSKEHLSQATGILTERIKAIQKKFPTWSVA

SEQ ID NO: 8202 - protein, 178 aa, Homo sapiens
MLSSVVFWGLIALIGTSRGSYPFSHSMKPHLHPRLYHGCYGDIMTMKTSGATCDANSVMNCGIRGSEMFAEMDLRAIKPYQTLIKEVGQRHCVDPAVIAAIISRESHGGSVLQDGWDHRGLKFGLMQLDKQTYHPVGAWDSKEHLSQATGILTERIKAIQKKFPTWSVAQHLKGFFLL

SEQ ID NO: 8203 - protein, 178 aa, Homo sapiens; identical to SEQ ID NO: 8202

SEQ ID NO: 8204 - protein, 212 aa, Homo sapiens
MLSSVVFWGLIALIGTSRGSYPFSHSMKPHLHPRLYHGCYGDIMTMKTSGATCDANSVMNCGIRGSEMFAEMDLRAIKPYQTLIKEVGQRHCVDPAVIAAIISRESHGGSVLQDGWDHRGLKFGLMQLDKQTYHPVGAWDSKEHLSQATGILTERIKAIQKKFPTWSVAQHLKGGLSAFKSGIEAIATPSDIDNDFVNDIIARAKFYKRQSF

SEQ ID NO: 8205 - protein, 212 aa, Homo sapiens; identical to SEQ ID NO: 8204

SEQ ID NO: 8206 - protein, 182 aa, Homo sapiens
MLSSVVFWGLIALIGTSRGSYPFSHSMKPHLHPRLYHGCYGDIMTMKTSGATCDANSVMNCGIRGSEMFAEMDLRAIKPYQTLIKEVGQRHCVDPAVIAAIISRESHGGSVLQDGWDHRGLKFGLMQLDKQTYHPVGAWDSKEHLSQATGILTERIKAIQKKFPTWSVAQHLKGRLYSEYFV

SEQ ID NO: 8207 - protein, 82 aa, Homo sapiens
MTPLLTLILVVLMGLPLAQALDCHVCAYNGDNCFNPMRCPAMVAYCMTTRTYYTPTRMKVSKSCVPRCFETVYDGYSKHAST

SEQ ID NO: 8208 - protein, 84 aa, Homo sapiens
MTPLLTLILVVLMGLPLAQALDCHVCAYNGDNCFNPMRCPAMVAYCMTTRTYYTPTRMKVSKSCVPRCFETVYDGYSKHASTTS

SEQ ID NO: 8209 - protein, 116 aa, Homo sapiens
MTPLLTLILVVLMGLPLAQALDCHVCAYNGDNCFNPMRCPAMVAYCMTTRTYYTPTRMKVSKSCVPRCFETVYDGYSKHASTTSCCQYDLCNGTGLATPATLALAPILLATLWGLL

SEQ ID NO: 8210 - protein, 116 aa, Homo sapiens; identical to SEQ ID NO: 8209

SEQ ID NO: 8211 - protein, 116 aa, Homo sapiens; identical to SEQ ID NO: 8209

SEQ ID NO: 8212 - protein, 89 aa, Homo sapiens
MCQKEVMEQSAGIMYRKSCASSAACLIASAGYQSFCSPGKLNSVCISCCNTPLCNGPRPKKRGSSASALRPGLRTTILFLKLALFSAHC

SEQ ID NO: 8213 - protein, 39 aa, Homo sapiens
MWVLGIAATFCGLFLLPGENTQRPAAEARLCAANPVLPV

SEQ ID NO: 8214 - protein, 141 aa, Homo sapiens
MWVLGIAATFCGLFLLPGFALQIQCYQCEEFQLNNDCSSPEFIVNCTVNVQDMCQKEVMEQSAGIMYRKSCASSAACLIASAGYQSFCSPGKLNSVCISCCNTPLCNGPRPKKRGSSASALRPGLRTTILFLKLALFSAHC

SEQ ID NO: 8215 - protein, 125 aa, Homo sapiens
MRGTRLALLALVLAACGELAPALRCYVCPEPTGVSDCVTIATCTTNETMCKTTLYSREIVYPFQGDSTVTKSCASKCKPSDVDGIGQTLPVSCCNTELCNVDGAPALNSLHCGALTLLPLLSLRL

SEQ ID NO: 8216 - protein, 246 aa, Homo sapiens
MGPQHLRLVQLFCLLGAISTLPRAGALLCYEATASRFRAVAFHNWKWLLMRNMVCKLQEGCEETLVFIETGTARGVVGFKGCSSSSSYPAQISYLVSPPGVSIASYSRVCRSYLCNNLTNLEPFVKLKASTPKSITSASCSCPTCVGEHMKDCLPNFVTTNSCPLAASTCYSSTLKFQAGFLNTTFLLMGCAREHNQLLADFHHIGSIKVTEVLNILEKSQIVGAASSRQDPAWGVVLGLLFAFRD

SEQ ID NO: 8217 - protein, 211 aa, Homo sapiens
MGPQHLRLVQLFCLLGAISTLPRMSCGAGCYKTQKGTARGVVGFKGCSSSSSYPAQISYLVSPPGVSIASYSRVCRSYLCNNLTNLEPFVKLKASTPKSITSASCSCPTCVGEHMKDCLPNFVTTNSCPLAASTCYSSTLKFQAGFLNTTFLLMGCAREHNQLLADFHHIGSIKVTEVLNILEKSQIVGAASSRQDPAWGVVLGLLFAFRD

SEQ ID NO: 8218 - protein, 211 aa, Homo sapiens; identical to SEQ ID NO: 8217

SEQ ID NO: 8219 - protein, 53 aa, Homo sapiens
MEPGPALAWLLLLSLLADCLKAAQSRDFTVKDIIYLHPSTTPYPGGFKCFTCE

SEQ ID NO: 8220 - protein, 171 aa, Homo sapiens
MEPGPALAWLLLLSLLADCLKAAQSRDFTVKDIIYLHPSTTPYPGGFKCFTCEKAADNYECNRWAPDIYCPRETRYCYTQHTMEVTGNSISVTKRCVPLEECLSTGCRDSEHEGHKVCTSCCEGNICNLPLPRNETDATFATTSPINQTNGHPRCMSVIVSCLWLWLGLML

SEQ ID NO: 8221 - protein, 171 aa, Homo sapiens; identical to SEQ ID NO: 8220

SEQ ID NO: 8222 - protein, 76 aa, Homo sapiens
MEPGPALAWLLLLSLLADCLKAAQSRDFTVKDIIYLHPSTTPYPGGFKCFTCEKAADNYECNRWAPDIYCPRGTMI

SEQ ID NO: 8223 - protein, 76 aa, Homo sapiens; identical to SEQ ID NO: 8222

SEQ ID NO: 8224 - protein, 50 aa, Homo sapiens
MLCERHCTEEDENHSKPNKGNAEEIFSAEYWKVRFPASRISGNVNEQHEA

SEQ ID NO: 8225 - protein, 74 aa, Homo sapiens
MLLITLSANLFTVPERSLTTTFSFSRCERHCTEEDENHSKPNKGNAEEIFSAEYWKVRFPASRISGNVNEQHEA

SEQ ID NO: 8226 - protein, 207 aa, Homo sapiens
MLLITLSANLFTVPERSLTTTFSFSRYKSSDRPAHKVSMLLLCHALAIAVVQIVIFSESWAFAKNINFYNVRPPLDPTPFPNSFKCFTCENAGDNYNCNRWAEDKWCPQNTQYCLTVHHFTSHGRSTSITKKCASRSECHFVGCHHSRDSEHTECRSCCEGMICNVELPTNHTNAVFAVMHAQRTSGSSAPTLYLPVLAWVFVLPLL

SEQ ID NO: 8227 - protein, 54 aa, Homo sapiens
MLYKSSDRPAHKVSMLLLCHALAIAVVQIVIFSESWAFAKNINFYNVRPPLDHK

SEQ ID NO: 8228 - protein, 183 aa, Homo sapiens
MLYKSSDRPAHKVSMLLLCHALAIAVVQIVIFSESWAFAKNINFYNVRPPLDPTPFPNSFKCFTCENAGDNYNCNRWAEDKWCPQNTQYCLTVHHFTSHGRSTSITKKCASRSECHFVGCHHSRDSEHTECRSCCEGMICNVELPTNHTNAVFAVMHAQRTSGSSAPTLYLPVLAWVFVLPLL

SEQ ID NO: 8229 - protein, 183 aa, Homo sapiens; identical to SEQ ID NO: 8228

SEQ ID NO: 8230 - protein, 183 aa, Homo sapiens
MRYKSSDRPAHKVSMLLLCHALAIAVVQIVIFSESWAFAKNINFYNVRPPLDPTPFPNSFKCFTCENAGDNYNCNRWAEDKWCPQNTQYCLTVHHFTSHGRSTSITKKCASRSECHFVGCHHSRDSEHTECRSCCEGMICNVELPTNHTNAVFAVMHAQRTSGSSAPTLYLPVLAWVFVLPLL

SEQ ID NO: 8231 - protein, 237 aa, Homo sapiens
MKGILVAGITAVLVAAVESLSCVQCNSWEKSCVNSIASECPSHANTSCISSSASSSLETPVRLYQNMFCSAENCSEETHITAFTVHVSAEEHFHFVSQCCQGKECSNTSDALDPPLKNVSSNAECPACYESNGTSCHGKPWKCYEEEQCVFLVAELKNDIESKSLVLKGCSNVSNATCQFLSGENKTLGGVIFRKFECANVNSLTPTSAPTTSHNVGSKASLYLLALASLLLRGLLP

SEQ ID NO: 8232 - protein, 54 aa, Homo sapiens
  SITE 1: note = misc_feature - Xaa can be any naturally occurring amino acid
XPPLKNVSSNAECPACYESNGTSCHGKPWKCYEEEQCVFLVAELKNGTPGDGAD

SEQ ID NO: 8233 - protein, 148 aa, Homo sapiens
MKALIVLGLVLLSVTVQGKVFERCELARTLKRLGMDGYRGISLANWMCLAKWESGYNTRATNYNAGDRSTDYGIFQINSRYWCNDGKTPGAVNACHLSCSALLQDNIADAVACAKRVVRDPQGIRAWVAWRNRCQNRDVRQYVQGCGV

SEQ ID NO: 8234 - protein, 104 aa, Homo sapiens
MKALIVLGLVLLSVTVQGKVFERCELARTLKRLGMDGYRGISLANWMCLAKWESGYNTRATNYNAGDRSTDYGIFQINSRYWCNDGKTPGAVNACHLSCSGKTS

SEQ ID NO: 8235 - protein, 137 aa, Homo sapiens
MKALIVLGLVLLSVTVQGKVFERCELARTLKRLGMDGYRGISLANWMCLAKWESGYNTRATNYNAGDRSTDYGIFQINSRYWCNDGKTPGAVNACHLSCSGWHGEIVVKTEMSVSMFKVVECNSRIFLLQLILSLSH

SEQ ID NO: 8236 - protein, 146 aa, Homo sapiens
MKASVVLSLLGYLVVPSGAYILGRCTVAKKLHDGGLDYFEGYSLENWVCLAYFESKFNPMAIYENTREGYTGFGLFQMRGSDWCGDHGRNRCHMSCSALLNPNLEKTIKCAKTIVKGKEGMGAWPTWSRYCQYSDTLARWLDGCKL

SEQ ID NO: 8237 - protein, 146 aa, Homo sapiens; identical to SEQ ID NO: 8236

SEQ ID NO: 8238 - protein, 148 aa, Homo sapiens
MTKALLIYLVSSFLALNQASLISRCDLAQVLQLEDLDGFEGYSLSDWLCLAFVESKFNISKINENADGSFDYGLFQINSHYWCNDYKSYSENLCHVDCQDLLNPNLLAGIHCAKRIVSGARGMNNWVEWRLHCSGRPLFYWLTGCRLR

SEQ ID NO: 8239 - protein, 148 aa, Homo sapiens; identical to SEQ ID NO: 8238

SEQ ID NO: 8240 - protein, 86 aa, Homo sapiens
  SITE 1: note = misc_feature - Xaa can be any naturally occurring amino acid
XLEDLDGFEGYSLSDWLCLAFVESKFNISKINENADGSFDYGLFQINSHYWCNDYKSYSENLCHVDCQGIHCAKRIVSGARGMNNW

SEQ ID NO: 8241 - protein, 148 aa, Homo sapiens
LLLLLAVAVRESWQTEEKTCDLDNFNPVSEERGKVQDCFYLFEMDSSLACSPEISHLSVGSILLVTFASLVAVYVVGGFLYQRLVVGAKGMEQFPHLAFWQDLGNLVADGCDFVCRSKPRNVPAAYRGVGDDQLGEESEERDDHLLPM

SEQ ID NO: 8242 - protein, 92 aa, Homo sapiens
MFPFYSCWRTGLLLLLLAVAVRESWQTEEKTCDLVGEKGKESEKELALVKRLKPLFNKSFESTVGQGSDTYIYIFRVCREAGNHTSGAGLVQ

SEQ ID NO: 8243 - protein, 109 aa, Homo sapiens
MFPFYSCWRTGLLLLLLAVAVRESWQTEEKTCDLVGEKGKESEKELALVKRLKPLFNKSFESTVGQGSDTYIYIFRVCREAGNHTSGAGLVQINKSNGKETVVGRLNET

SEQ ID NO: 8244 - protein, 133 aa, Homo sapiens
MFPFYSCWRTGLLLLLLAVAVRESWQTEEKTCDLVGEKGKESEKELALVKRLKPLFNKSFESTVGQGSDTYIYIFRVCREAGNHTSGAGLVQINKSNGKETVVGRLNETHIFNGSLHHWLLFMLLGGSYTSDW

SEQ ID NO: 8245 - protein, 191 aa, Homo sapiens
MFPFYSCWRTGLLLLLLAVAVRESWQTEEKTCDLVGEKGKESEKELALVKRLKPLFNKSFESTVGQGSDTYIYIFRVCREAGNHTSGAGLVQINKSNGKETVVGRLNETHIFNGSNWIMLIYKGGDEYDNHCGKEQRRAVVMISCNRHTLADGCDFVCRSKPRNVPAAYRGVGDDQLGEESEERDDHLLPM

SEQ ID NO: 8246 - protein, 277 aa, Homo sapiens
MFPFYSCWRTGLLLLLLAVAVRESWQTEEKTCDLVGEKGKESEKELALVKRLKPLFNKSFESTVGQGSDTYIYIFRVCREAGNHTSGAGLVQINKSNGKETVVGRLNETHIFNGSNWIMLIYKGGDEYDNHCGKEQRRAVVMISCNRHTLADNFNPVSEERGKVQDCFYLFEMDSSLACSPEISHLSVGSILLVTFASLVAVYVVGGFLYQRLVVGAKGMEQFPHLAFWQDLGNLVADGCDFVCRSKPRNVPAAYRGVGDDQLGEESEERDDHLLPM

SEQ ID NO: 8247 - protein, 25 aa, Homo sapiens
MLIYKGGDEYDNHCGKEQRRAVVMI

SEQ ID NO: 8248 - protein, 85 aa, Homo sapiens
VVGGFLYQRLVVGAKGMEQFPHLAFWQDLGNLVAACGFDLFFNLLERERKQKWDIEGSAVLCAGCGMLLHLSLLLAQGSVFLPTF

SEQ ID NO: 8249 - protein, 104 aa, Homo sapiens
  SITE 1: note = misc_feature - Xaa can be any naturally occurring amino acid
XFNKSFESTVGQGSDTYIYIFRVCREAGNHTSGAGLVQINKSNGKETVVGRLNETHIFNGSNWIMLIYKGGDEYDNHCGKEQRRAVVMISCNRHTLAESKHLTT

SEQ ID NO: 8250 - protein, 122 aa, Homo sapiens
  SITE 1: note = misc_feature - Xaa can be any naturally occurring amino acid
XGGDEYDNHCGKEQRRAVVMISCNRHTLADNFNPVSEERGKVQDCFYLFEMDSSLACSPEISHLSVGSILLVTFASLVAVYVVGGFLYQRLVVGAKGMEQFPHLAFWQDLGNLVAVSNRAAG

SEQ ID NO: 8251 - protein, 96 aa, Homo sapiens
  SITE 1: note = misc_feature - Xaa can be any naturally occurring amino acid
XILLVTFASLVAVYVVGGFLYQRLVVGAKGMEQFPHLAFWQDLGNLVAKGNGSRSGTSRALLSSALGVECCCTCPFCWLREVSSCPHFCGERFLIL

SEQ ID NO: 8252 - protein, 157 aa, Homo sapiens
MEDLGENTMVLSTLRSLNNFISQRVEGGSGLDISTSAPGSLQMQYQQSMQLEERAEQIRSKSHLIQVEREKMQMELSHKRARVELERAASTSARNYEREVDRNQELLTRIRQLQEREAGAEEKMQEQLERNRQCQQNLDAASKRLREKEDSLAQAGE

SEQ ID NO: 8253 - protein, 718 aa, Homo sapiens
MEDLGENTMVLSTLRSLNNFISQRVEGGSGLDISTSAPGSLQMQYQQSMQLEERAEQIRSKSHLIQVEREKMQMELSHKRARVELERAASTSARNYEREVDRNQELLTRIRQLQEREAGAEEKMQEQLERNRQCQQNLDAASKRLREKEDSLAQAGETINALKGRISELQWSVMDQEMRVKRLESEKQELQEQLDLQHKKCQEANQKIQELQASQEARADHEQQIKDLEQKLSLQEQDAAIVKNMKSELVRLPRLERELKQLREESAHLREMRETNGLLQEELEGLQRKLGRQEKMQETLVGLELENERLLAKLQSWERLDQTMGLSIRTPEDLSRFVVELQQRELALKDKNSAVTSSARGLEKARQQLQEELRQVSGQLLEERKKRETHEALARRLQKRVLLLTKERDGMRAILGSYDSELTPAEYSPQLTRRMREAEDMVQKVHSHSAEMEAQLSQALEELGGQKQRADMLEMELKMLKSQSSSAEQSFLFSREEADTLRLKVEELEGERSRLEEEKRMLEAQLERRALQGDYDQSRTKVLHMSLNPTSVARQRLREDHSQLQAECERLRGLLRAMERGGTVPADLEAAAASLPSSKEVAELKKQVESAELKNQRLKEVFQTKIQEFRKACYTLTGYQIDITTENQYRLTSLYAEHPGDCLIFKATSPSGSKMQLLETEFSHTVGELIEVHLRRQDSIPAFLSSLTLELFSRQTVA

SEQ ID NO: 8254 - protein, 718 aa, Homo sapiens; identical to SEQ ID NO: 8253

SEQ ID NO: 8255 - protein, 718 aa, Homo sapiens; identical to SEQ ID NO: 8253

SEQ ID NO: 8256 - protein, 144 aa, Homo sapiens
MEDLGENTMVLSTLRSLNNFISQRVEGGSGLDISTSAPGSLQMQYQQSMQREVDRNQELLTRIRQLQEREAGAEEKMQEQLERNRQCQQNLDAASKRLREKEDSLAQAGETINALKGRISELQWSVMDQEMRVKRLESEKQELQ

SEQ ID NO: 8257 - protein, 626 aa, Homo sapiens
MLPARGCVRKRTVWPRLARVLIVTLLTLELSYAPLPCQLSGVPYNTGDPVGRWARPCIWPCPWHTTINALKGRISELQWSVMDQEMRVKRLESEKQELQEQLDLQHKKCQEANQKIQELQASQEARADHEQQIKDLEQKLSLQEQDAAIVKNMKSELVRLPRLERELKQLREESAHLREMRETNGLLQEELEGLQRKLGRQEKMQETLVGLELENERLLAKLQSWERLDQTMGLSIRTPEDLSRFVVELQQRELALKDKNSAVTSSARGLEKARQQLQEELRQVSGQLLEERKKRETHEALARRLQKRVLLLTKERDGMRAILGSYDSELTPAEYSPQLTRRMREAEDMVQKVHSHSAEMEAQLSQALEELGGQKQRADMLEMELKMLKSQSSSAEQSFLFSREEADTLRLKVEELEGERSRLEEEKRMLEAQLERRALQGDYDQSRTKVLHMSLNPTSVARQRLREDHSQLQAECERLRGLLRAMERGGTVPADLEAAAASLPSSKEVAELKKQVESAELKNQRLKEVFQTKIQEFRKACYTLTGYQIDITTENQYRLTSLYAEHPGDCLIFKATSPSGSKMQLLETEFSHTVGELIEVHLRRQDSIPAFLSSLTLELFSRQTVA

SEQ ID NO: 8258 - protein, 205 aa, Homo sapiens
MQEQLERNRQCQQNLDAASKRLREKEDSLAQAGETINALKGRISELQWSVMDQEMRVKRLESEKQELQEQLDLQHKKCQEANQKIQELQASQEARADHEQQIKDLEQKLSLQEQDAAIVKNMKSELVRLPRLERELKQLREESAHLREMRETNGLLQEELEGLQRKLGRQEKMQETLVGLELENERLLAKLQSWERLDQTMGLSI

SEQ ID NO: 8259 - protein, 213 aa, Homo sapiens
MQMELSHKRARVELERAASTSARNYEREVDRNQELLTRIRQLQEREAGAEEKMQEQLERNRQCQQNLDAASKRLREKEDSLAQAGETINALKGRISELQWSVMDQEMRVKRLESEKQELQEQLDLQHKKCQEANQKIQELQASQEARADHEQQIKDLEQKLSLQEQDAAIVKNMKSELVRLPRLERELKQLREESAHLREMRETNGLLQEELE

SEQ ID NO: 8260 - protein, 41 aa, Homo sapiens
MRAILGSYDSELTPAEYSPQLTRRMREAEDMVQKVHSHSAE

SEQ ID NO: 8261 - protein, 80 aa, Homo sapiens
MRAILGSYDSELTPAEYSPQLTRRMREAEDMVQKVHSHSAEMEAQLSQALEELGGQKQRADMLEMELKMLKSQSSSAEQS

SEQ ID NO: 8262 - protein, 266 aa, Homo sapiens
MRELEFAKLECCLAWQLQASRRELEMELKMLKSQSSSAEQSFLFSREEADTLRLKVEELEGERSRLEEEKRMLEAQLERRALQGDYDQSRTKVLHMSLNPTSVARQRLREDHSQLQAECERLRGLLRAMERGGTVPADLEAAAASLPSSKEVAELKKQVESAELKNQRLKEVFQTKIQEFRKACYTLTGYQIDITTENQYRLTSLYAEHPGDCLIFKATSPSGSKMQLLETEFSHTVGELIEVHLRRQDSIPAFLSSLTLELFSRQ

SEQ ID NO: 8263 - protein, 122 aa, Homo sapiens
MSLNPTSVARQRLREDHSQLQAECERLRGLLRAMERGGTVPADLEAAAASLPSSKEVAELKKQVESAELKNQRLKEVFQTKIQEFRKACYTLTGYQIDITTENQYRLTSLYAEHPGDCLIFK

SEQ ID NO: 8264 - protein, 199 aa, Homo sapiens
MVSLRPCLPGLPTQHLEEPCPGDYSARGLEKARQQLQEELRQVSGQLLEERKKRETHEALARRLQKRVLLLTKERDGMRAILGSYDSELTPAEYSPQLTRRMREAEDMVQKVHSHSAEMEAQLSQALEELGGQKQRADMLEMELKMLKSQSSSAEQSFLFSREEADTLRLKVEELEGERSRLEEEKRMLEAQLERRALQ

SEQ ID NO: 8265 - protein, 58 aa, Homo sapiens
MIFLTALPLFWIMISASRGGHWGAWMPSSISAFEGTCVSIPCRFDFPDELRPAVVHGV

SEQ ID NO: 8266 - protein, 158 aa, Homo sapiens
MIFLTALPLFWIMISASRGGHWGAWMPSSISAFEGTCVSIPCRFDFPDELRPAVVHGVWYFNSPYPKNYPPVVFKSRTQVVHESFQGRSRLLGDLGLRNCTLLLSNVSPELGGKYYFRGDLGGYNQYTFSEHSVLDIVNTPNIVVPPEVVAGTEVEVS

SEQ ID NO: 8267 - protein, 582 aa, Homo sapiens
MIFLTALPLFWIMISASRGGHWGAWMPSSISAFEGTCVSIPCRFDFPDELRPAVVHGVWYFNSPYPKNYPPVVFKSRTQVVHESFQGRSRLLGDLGLRNCTLLLSNVSPELGGKYYFRGDLGGYNQYTFSEHSVLDIVNTPNIVVPPEVVAGTEVEVSCMVPDNCPELRPELSWLGHEGLGEPAVLGRLREDEGTWVQVSLLHFVPTREANGHRLGCQASFPNTTLQFEGYASMDVKYPPVIVEMNSSVEAIEGSHVSLLCGADSNPPPLLTWMRDGTVLREAVAESLLLELEEVTPAEDGVYACLAENAYGQDNRTVGLSVMYAPWKPTVNGTMVAVEGETVSILCSTQSNPDPILTIFKEKQILSTVIYESELQLELPAVSPEDDGEYWCVAENQYGQRATAFNLSVEFAPVLLLESHCAAARDTVQCLCVVKSNPEPSVAFELPSRNVTVNESEREFVYSERSGLVLTSILTLRGQAQAPPRVICTARNLYGAKSLELPFQGAHRLMWAKIGPVGAVVAFAILIAIVCYITQTRRKKNVTESPSFSAGDNPPVLFSSDFRISGAPEKYESKEVSTLESH

SEQ ID NO: 8268 - protein, 626 aa, Homo sapiens
MIFLTALPLFWIMISASRGGHWGAWMPSSISAFEGTCVSIPCRFDFPDELRPAVVHGVWYFNSPYPKNYPPVVFKSRTQVVHESFQGRSRLLGDLGLRNCTLLLSNVSPELGGKYYFRGDLGGYNQYTFSEHSVLDIVNTPNIVVPPEVVAGTEVEVSCMVPDNCPELRPELSWLGHEGLGEPAVLGRLREDEGTWVQVSLLHFVPTREANGHRLGCQASFPNTTLQFEGYASMDVKYPPVIVEMNSSVEAIEGSHVSLLCGADSNPPPLLTWMRDGTVLREAVAESLLLELEEVTPAEDGVYACLAENAYGQDNRTVGLSVMYAPWKPTVNGTMVAVEGETVSILCSTQSNPDPILTIFKEKQILSTVIYESELQLELPAVSPEDDGEYWCVAENQYGQRATAFNLSVEFAPVLLLESHCAAARDTVQCLCVVKSNPEPSVAFELPSRNVTVNESEREFVYSERSGLVLTSILTLRGQAQAPPRVICTARNLYGAKSLELPFQGAHRLMWAKIGPVGAVVAFAILIAIVCYITQTRRKKNVTESPSFSAGDNPPVLFSSDFRISGAPEKYESERRLGSERRLLGLRGEPPELDLSYSHSDLGKRPTKDSYTLTEELAEYAEIRVK

SEQ ID NO: 8269 - protein, 131 aa, Homo sapiens
MPSSISAFEGTCVSIPCRFDFPDELRPAVVHGVWYFNSPYPKNYPPVVFKSRTQVVHESFQGRSRLLGDLGLRNCTLLLSNVSPELGGKYYFRGDLGGYNQYTFSEHSVLDIVNTPNIVVPPEVVAGTEVE

SEQ ID NO: 8270 - protein, 601 aa, Homo sapiens
MPSSISAFEGTCVSIPCRFDFPDELRPAVVHGVWYFNSPYPKNYPPVVFKSRTQVVHESFQGRSRLLGDLGLRNCTLLLSNVSPELGGKYYFRGDLGGYNQYTFSEHSVLDIVNTPNIVVPPEVVAGTEVEVSCMVPDNCPELRPELSWLGHEGLGEPAVLGRLREDEGTWVQVSLLHFVPTREANGHRLGCQASFPNTTLQFEGYASMDVKYPPVIVEMNSSVEAIEGSHVSLLCGADSNPPPLLTWMRDGTVLREAVAESLLLELEEVTPAEDGVYACLAENAYGQDNRTVGLSVMYAPWKPTVNGTMVAVEGETVSILCSTQSNPDPILTIFKEKQILSTVIYESELQLELPAVSPEDDGEYWCVAENQYGQRATAFNLSVEFAPVLLLESHCAAARDTVQCLCVVKSNPEPSVAFELPSRNVTVNESEREFVYSERSGLVLTSILTLRGQAQAPPRVICTARNLYGAKSLELPFQGAHRLMWAKIGPVGAVVAFAILIAIVCYITQTRRKKNVTESPSFSAGDNPPVLFSSDFRISGAPEKYESERRLGSERRLLGLRGEPPELDLSYSHSDLGKRPTKDSYTLTEELAEYAEIRVK

SEQ ID NO: 8271 - protein, 134 aa, Homo sapiens
MAARWRFWCVSVTMVVALLIVCDVPSASAQRKKEMVLSEKVSQLMEWTNKRPVIRMNGDKFRRLVKAPPRNYSVIVMFTALQLHRQCVVCKQADEEFQILANSWRYSSAFTNRIFFAMVDFDEGSDVFQMFQVF

SEQ ID NO: 8272 - protein, 335 aa, Homo sapiens
MAARWRFWCVSVTMVVALLIVCDVPSASAQRKKEMVLSEKVSQLMEWTNKRPVIRMNGDKFRRLVKAPPRNYSVIVMFTALQLHRQCVVCKQADEEFQILANSWRYSSAFTNRIFFAMVDFDEGSDVFQMLNMNSAPTFINFPAKGKPKRGDTYELQVRGFSAEQIARWIADRTDVNIRVIRPPNYAGPLMLGLLLAVIGGLVYLRRSNMEFLFNKTGWAFAALCFVLAMTSGQMWNHIRGPPYAHKNPHTGHVNYIHGSSQAQFVAETHIVLLFNGGVTLGMVLLCEAATSDMDIGKRKIMCVAGIGLVVLFFSWMLSIFRSKYHGYPYSFLMS

SEQ ID NO: 8273 - protein, 367 aa, Homo sapiens
MRKGKGPICLFSRPTLRPSRSKVSLIEGRGANMAARWRFWCVSVTMVVALLIVCDVPSASAQRKKEMVLSEKVSQLMEWTNKRPVIRMNGDKFRRLVKAPPRNYSVIVMFTALQLHRQCVVCKQADEEFQILANSWRYSSAFTNRIFFAMVDFDEGSDVFQMLNMNSAPTFINFPAKGKPKRGDTYELQVRGFSAEQIARWIADRTDVNIRVIRPPNYAGPLMLGLLLAVIGGLVYLRRSNMEFLFNKTGWAFAALCFVLAMTSGQMWNHIRGPPYAHKNPHTGHVNYIHGSSQAQFVAETHIVLLFNGGVTLGMVLLCEAATSDMDIGKRKIMCVAGIGLVVLFFSWMLSIFRSKYHGYPYSFLMS

SEQ ID NO: 8274 - protein, 367 aa, Homo sapiens; identical to SEQ ID NO: 8273

SEQ ID NO: 8275 - protein, 234 aa, Homo sapiens
MGPGGRVARLLAPLMWRRAVSSVAGSAVGAEPGLRLLAVQRLPVGAAFCRACQTPNFVRGLHSEPGLEERAEGTVNEGRPESDAADHTGPKFDIDMMVSLLRQENARDICVIQVPPEMRYTDYFVIVSGTSTRHLHAMAFYVVKMYKHLKCKRDPHVKIEGKDTDDWLCVDFGSMVIHLMLPETREIYELEKLWTLRSYDDQLAQIAPETVPEDFILGIEDDTSSVTPVELKCE

SEQ ID NO: 8276 - protein, 686 aa, Homo sapiens
MLLRGVLLALQALQLAGALDLPAGSCAFEESTCGFDSVLASLPWILNEEGHYIYVDTSFGKQGEKAVLLSPDLQAEEWSCLRLVYQITTSSESLSDPSQLNLYMRFEDESFDRLLWSAKEPSDSWLIASLDLQNSSKKFKILIEGVLGQGNTASIALFEIKMTTGYCIECDFEENHLCGFVNRWNPNVNWFVGGGSIRNVHSILPQDHTFKSELGHYMYVDSVYVKHFQEVAQLISPLTTAPMAGCLSFYYQIQQGNDNVFSLYTRDVAGLYEEIWKADRPGNAAWNLAEVEFSAPYPMEVIFEVAFNGPKGGYVALDDISFSPVHCQNQTELLFSAVEASCNFEQDLCNFYQDKEGPGWTRVKVKPNMYRAGDHTTGLGYYLLANTKFTSQPGYIGRLYGPSLPGNLQYCLRFHYAIYGFLKMSDTLAVYIFEENHVVQEKIWSVLESPRGVWMQAEITFKKPMPTKVVFMSLCKSFWDCGLVALDDITIQLGSCSSSEKLPPPPGECTFEQDECTFTQEKRNRSSWHRRRGETPTSYTGPKGDHTTGVGYYMYIEASHMVYGQKARLLSRPLRGVSGKHCLTFFYHMYGGGTGLLSVYLKKEEDSEESLLWRRRGEQSISWLRALIEYSCERQHQIIFEAIRGVSIRSDIAIDDVKFQAGPCGEMEDTTQQSSGYSEDLNEIEY

SEQ ID NO: 8277 - protein, 165 aa, Homo sapiens [sequence omitted]

SEQ ID NO: 8278 - protein, 1010 aa, Homo sapiens
MGAYARASGVCARGCLDSAGPWTMSRALRPPLPPLCFFLLLLAAAGARAGGYETCPTVQPNMLNVHLLPHTHDDVGWLKTVDQYFYGIKNDIQHAGVQYILDSVISALLADPTRRFIYVEIAFFSRWWHQQTNATQEVVRDLVRQGRLEFANGGWVMNDEAATHYGAIVDQMTLGLRFLEDTFGNDGRPRVAWHIDPFGHSREQASLFAQMGFDGFFFGRLDYQDKWVRMQKLEMEQVWRASTSLKPPTADLFTGVLPNGYNPPRNLCWDVLCVDQPLVEDPRSPEYNAKELVDYFLNVATAQGRYYRTNHTVMTMGSDFQYENANMWFKNLDKLIRLVNAQAKGSSVHVLYSTPACYLWELNKANLTWSVKHDDFFPYADGPHQFWTGYFSSRPALKRYERLSYNFLQVCNQLEALVGLAANVGPYGSGDSAPLNEAMAVLQHHDAVSGTSRQHVANDYARQLAAGWGPCEVLLSNALARLRGFKDHFTFCQQLNISICPLSQTAARFQVIVYNPLGRKVNWMVRLPVSEGVFVVKDPNGRTVPSDVVIFPSSDSQAHPPELLFSASLPALGFSTYSVAQVPRWKPQARAPQPIPRRSWSPALTIENEHIRATFDPDTGLLMEIMNMNQQLLLPVRQTFFWYNASIGDNESDQASGAYIFRPNQQKPLPVSRWAQIHLVKTPLVQEVHQNFSAWCSQVVRLYPGQRHLELEWSVGPIPVGDTWGKEVISRFDTPLETKGRFYTDSNGREILERRRDYRPTWKLNQTEPVAGNYYPVNTRIYITDGNMQLTVLTDRSQGGSSLRDGSLELMVHRRLLKDDGRGVSEPLMENGSGAWVRGRHLVLLDTAQAAAAGHRLLAEQEVLAPQVVLAPGGGAAYNLGAPPRTQFSGLRRDLPPSVHLLTLASWGPEMVLLRLEHQFAVGEDSGRNLSAPVTLNLRDLFSTFTITRLQETTLVANQLREAASRLKWTTNTGPTPHQTPYQLDPANITLEPMEIRTFLASVQWKEVDG

SEQ ID NO: 8279 - protein, 1011 aa, Homo sapiens
MGAYARASGVCARGCLDSAGPWTMSRALRPPLPPLCFFLLLLAAAGARAGGYETCPTVQPNMLNVHLLPHTHDDVGWLKTVDQYFYGIKNDIQHAGVQYILDSVISALLADPTRRFIYVEIAFFSRWWHQQTNATQEVVRDLVRQGRLEFANGGWVMNDEAATHYGAIVDQMTLGLRFLEDTFGNDGRPRVAWHIDPFGHSREQASLFAQMGFDGFFFGRLDYQDKWVRMQKLEMEQVWRASTSLKPPTADLFTGVLPNGYNPPRNLCWDVLCVDQPLVEDPRSPEYNAKELVDYFLNVATAQGRYYRTNHTVMTMGSDFQYENANMWFKNLDKLIRLVNAQQAKGSSVHVLYSTPACYLWELNKANLTWSVKHDDFFPYADGPHQFWTGYFSSRPALKRYERLSYNFLQVCNQLEALVGLAANVGPYGSGDSAPLNEAMAVLQHHDAVSGTSRQHVANDYARQLAAGWGPCEVLLSNALARLRGFKDHFTFCQQLNISICPLSQTAARFQVIVYNPLGRKVNWMVRLPVSEGVFVVKDPNGRTVPSDVVIFPSSDSQAHPPELLFSASLPALGFSTYSVAQVPRWKPQARAPQPIPRRSWSPALTIENEHIRATFDPDTGLLMEIMNMNQQLLLPVRQTFFWYNASIGDNESDQASGAYIFRPNQQKPLPVSRWAQIHLVKTPLVQEVHQNFSAWCSQVVRLYPGQRHLELEWSVGPIPVGDTWGKEVISRFDTPLETKGRFYTDSNGREILERRRDYRPTWKLNQTEPVAGNYYPVNTRIYITDGNMQLTVLTDRSQGGSSLRDGSLELMVHRRLLKDDGRGVSEPLMENGSGAWVRGRHLVLLDTAQAAAAGHRLLAEQEVLAPQVVLAPGGGAAYNLGAPPRTQFSGLRRDLPPSVHLLTLASWGPEMVLLRLEHQFAVGEDSGRNLSAPVTLNLRDLFSTFTITRLQETTLVANQLREAASRLKWTTNTGPTPHQTPYQLDPANITLEPMEIRTFLASVQWKEVDG

SEQ ID NO: 8280 - protein, 172 aa, Homo sapiens
MGAYARASGVCARGCLDSAGPWTMSRALRPPLPPLCFFLLLLAAAGARAGGYEVCVFGVPVQTCPTVQPNMLNVHLLPHTHDDVGWLKTVDQYFYGIKNDIQHAGVQYILDSVISALLADPTRRFIYVEIAFFSRWWHQQTNATQEVVRDLVRQGRLEFANGGWVMNDEAAT

SEQ ID NO: 8281 - protein, 140 aa, Homo sapiens
  SITE 1: note = misc_feature - Xaa can be any naturally occurring amino acid
XLAAGWGPCEVLLSNALARLRGFKDHFTFCQQLNISICPLSQTAARFQVIVYNPLGRKVNWMVRLPVSEGVFVVKDPNGRTVPSDLRQPGAPSGAAVLSLTARPGLQHLFSSPGASLEAPGPRTTAHPQKILVPCFNHRK

SEQ ID NO: 8282 - protein, 67 aa, Homo sapiens
  SITE 1: note = misc_feature - Xaa can be any naturally occurring amino acid
XSDVVIFPSSDSQAHPPELLFSASLPALGFSTYSVAQVPRWKPQARAPQPIPRRSWSPALTIENEGC

SEQ ID NO: 8283 - protein, 1009 aa, Homo sapiens
MGQLCWLPLLAPLLLLRPPGVQSAGPIRAFVVPHSHMDVGWVYTVQESMRAYAANVYTSVVEELARGQQRRFIAVEQEFFRLWWDGVASDQQKYQVRQLLEEGRLEFVIGGQVMHDEAVTHLDDQILQLTEGHGFLYETFGIRPQFSWHVDPFGASATTPTLFALAGFNAHLGSRIDYDLKAAMQEARGLQFVWRGSPSLSERQEIFTHIMDQYSYCTPSHIPFSNRSGFYWNGVAVFPKPPQDGVYPNMSEPVTPANINLYAEALVANVKQRAAWFRTPHVLWPWGCDKQFFNASVQFANMDPLLDHINSHAAELGVSVQYATLGDYFRALHALNVTWRVRDHHDFLPYSTEPFQAWTGFYTSRSSLKGLARRASALLYAGESMFTRYLWPAPRGHLDPTWALQQLQQLRWAVSEVQHHDAITGTESPKVRDMYATHLASGMLGMRKLMASIVLDELQPQAPMAASSDAGPAGHFASVYNPLAWTVTTIVTLTVGFPGVRVTDEAGHPVPSQIQNSTETPSAYDLLILTTIPGLSYRHYNIRPTAGAQEGTQEPAATVASTLQFGRRLRRRTSHAGRYLVPVANDCYIVLLDQDTNLMHSIWERQSNRTVRVTQEFLEYHVNGDVKQGPISDNYLFTPGKAAVPAWEAVEMEIVAGQLVTEIRQYFYRNMTAQNYTYAIRSRLTHVPQGHDGELLCHRIEQEYQAGPLELNREAVLRTSTNLNSQQVIYSDNNGYQMQRRPYVSYVNNSIARNYYPMVQSAFMEDGKSRLVLLSERAHGISSQGNGQVEVMLHRRLWNNFDWDLGYNLTLNDTSVVHPVLWLLLGSWSLTTALRQRSALALQHRPVVLFGDLAGTAPKLPGPQQQEAVTLPPNLHLQILSIPGWRYSSNHTEHSQNLRKGHRGEAQADLRRVLLRLYHLYEVGEDPVLSQPVTVNLEAVLQALGSVVAVEERSLTGTWDLSMLHRWSWRTGPGRHRGDTTSPSRPPGGPIITVHPKEIRTFFIHFQQQ

SEQ ID NO: 8284 - protein, 958 aa, Homo sapiens
MGQLCWLPLLAPLLLLRPPGVQSAGPIRAFVVPHSHMDVGWVYTVQESMRAYAANVYTSVVEELARGQQRRFIAVEQEFFRLWWDGVASDQQKYQVRQLLEEGRLEFVIGGQVMHDEAVTHLDDQILQLTEGHGFLYETFGIRPQFSWHVDPFGASATTPTLFALAGFNAHLGSRIDYDLKAAMQEARGLQFVWRGSPSLSERQEIFTHIMDQYSYCTPSHIPFSNRSGFYWNGVAVFPKPPQDGVYPNMSEPVTPANINLYAELGVSVQYATLGDYFRALHALNVTWRVRDHHDFLPYSTEPFQAWTGFYTSRSSLKGLARRASALLYAGESMFTRYLWPAPRGHLDPTWALQQLQQLRWAVSEVQHHDAITGTESPKVRDMYATHLASGMLGMRKLMASIVLDELQPQAPMAASSDAGPAGHFASVYNPLAWTVTTIVTLTVGFPGVRVTDEAGHPVPSQIQNSTETPSAYDLLILTTIPGLSYRHYNIRPTAGAQEGTQEPAATVASTLQFGRRLRRRTSHAGRYLVPVANDCYIVLLDQDTNLMHSIWERQSNRTVRVTQEFLEYHVNGDVKQGPISDNYLFTPGKAAVPAWEAVEMEIVAGQLVTEIRQYFYRNMTAQNYTYAIRSRLTHVPQGHDGELLCHRIEQEYQAGPLELNREAVLRTSTNLNSQQVIYSDNNGYQMQRRPYVSYVNNSIARNYYPMVQSAFMEDGKSRLVLLSERAHGISSQGNGQVEVMLHRRLWNNFDWDLGYNLTLNDTSVVHPVLWLLLGSWSLTTALRQRSALALQHRPVVLFGDLAGTAPKLPGPQQQEAVTLPPNLHLQILSIPGWRYSSNHTEHSQNLRKGHRGEAQADLRRVLLRLYHLYEVGEDPVLSQPVTVNLEAVLQALGSVVAVEERSLTGTWDLSMLHRWSWRTGPGRHRGDTTSPSRPPGGPIITVHPKEIRTFFIHFQQQ

SEQ ID NO: 8285 - protein, 953 aa, Homo sapiens
  SITE 1: note = misc_feature - Xaa can be any naturally occurring amino acid
XQLCWLPLLAPLLLLRPPGVQSAGPIRAFVVPHSHMDVGWVYTVQESMRAYAANVYTSVVEELARGQQRRFIAVEQEFFRLWWDGVASDQQKYQVRQLLEEGRLEFVIGGQVMHDEAVTHLDDQILQLTEGHGFLYETFGIRPQFSWHVDPFGASATTPTLFALAGFNAHLGSRIDYDLKAAMQEARGLQFVWRGSPSLSERQEIFTHIMDQYSYCTPSHIPFSNRSGFYWNGVAVFPKPPQDGVYPNMSEPVTPANINLYAEALVANVKQRAAWFRTPHVLWPWGCDKQFFNASVQFANMDPLLDHINSHAAELGVSVQYATLGDYFRALHALNVTWRVRDHHDFLPYSTEPFQAWTGFYTSRSSLKGLARRASALLYAGESMFTRYLWPAPRGHLDPTWALQQLQQLRWAVSEVQHHDAITGTESPKVRDMYATHLASGMLGMRKLMASIVLDELQPQAPMAASSDAGPAGHFASVYNPLAWTVTTIVTLTVGFPGVRVTDEAGHPVPSQIQNSTETPSAYDLLILTTIPGLSYRHYNIRPTAGAQEGTQEPAATVASTLQFGRRLRRRTSHAGRYLVPVANDCYIVLLDQDTNLMHSIWERQSNRTVRVTQEFLEYHVNGDVKQGPISDNYLFTPGKAAVPAWEAVEMEIVAGQLVTEIRQYFYRNMTAQNYTYAIRSRLTHVPQGHDGELLCHRIEQEYQAGPLELNREAVLRTSTNLNSQQVIYSDNNGYQMQRRPYVSYVNNSIARNYYPMVQSAFMEDGKSRLVLLSERAHGISSQGNGQVEVMLHRRLWNNFDWDLGYNLTLNDTSVVHPVLWLLLGSWSLTTALRQRSALALQHRPVVLFGDLAGTAPKLPGPQQQEAVTLPPNLHLQILSIPGWRYSSNHTEHSQNLRKGHRGEAQADLRRVLLRLYHLYEVGEDPVLSQPVTVNLEVNFPTPIQTISQGSKP

SEQ ID NO: 8286 - protein, 822 aa, Homo sapiens
MRLHLLLLLALCGAGTTAAELSYSLRGNWSICNGNGSLELPGAVPGCVHSALFQQGLIQDSYYRFNDLNYRWVSLDNWTYSKEFKIPFEISKWQKVNLILEGVDTVSKILFNEVTIGETDNMFNRYEQCSFSWDWGPSFPTQGIWKDVRIEAYNICHLNYFTFSPIYDKSAQEWNLEIESTFDVVSSKPVGGQVIVAIPKLQTQQTYSIELQPGKRIVELFVNISKNITVETWWPHGHGNQTGYNMTVLFELDGGLNIEKSAKVYFRTVELIEEPIKGSPGLSFYFKINGFPIFLKGSNWIPADSFQDRVTSELLRLLLQSVVDANMNTLRVWGGGIYEQDEFYELCDELGIMVWQDFMFACALYPTDQGFLDSVTAEVAYQIKRLKSHPSIIIWSGNNENEEALMMNWYHISFTDRPIYIKDYVTLYVKNIRELVLAGDKSRPFITSSPTNGAETVAEAWVSQNPNSNYFGDVHFYDYISDCWNWKVFPKARFASEYGYQSWPSFSTLEKVSSTEDWSFNSKFSLHRQHHEGGNKQMLYQAGLHFKLPQSTDPLRTFKDTIYLTQVMQAQCVKTETEFYRRSRSEIVDQQGHTMGALYWQLNDIWQAPSWASLEYGGKWKMLHYFAQNFFAPLLPVGFENENTFYIYGVSDLHSDYSMTLSVRVHTWSSLEPVCSRVTERFVMKGGEAVCLYEEPVSELLRRCGNCTRESCVVSFYLSADHELLSPTNYHFLSSPKEAVGLCKAQITAIISQQGDIFVFDLETSAVAPFVWLDVGSIPGRFSDNGFLMTEKTRTILFYPWEPTSKNELEQSFHVTSLTDIY

SEQ ID NO: 8287 - protein, 879 aa, Homo sapiens
MRLHLLLLLALCGAGTTAAELSYSLRGNWSICNGNGSLELPGAVPGCVHSALFQQGLIQDSYYRFNDLNYRWVSLDNWTYSKEFKIPFEISKWQKVNLILEGVDTVSKILFNEVTIGETDNMFNRYSFDITNVVRDVNSIELRFQSAVLYAAQQSKAHTRYQVPPDCPPLVQKGECHVNFVRKEQCSFSWDWGPSFPTQGIWKDVRIEAYNICHLNYFTFSPIYDKSAQEWNLEIESTFDVVSSKPVGGQVIVAIPKLQTQQTYSIELQPGKRIVELFVNISKNITVETWWPHGHGNQTGYNMTVLFELDGGLNIEKSAKVYFRTVELIEEPIKGSPGLSFYFKINGFPIFLKGSNWIPADSFQDRVTSELLRLLLQSVVDANMNTLRVWGGGIYEQDEFYELCDELGIMVWQDFMFACALYPTDQGFLDSVTAEVAYQIKRLKSHPSIIIWSGNNENEEALMMNWYHISFTDRPIYIKDYVTLYVKNIRELVLAGDKSRPFITSSPTNGAETVAEAWVSQNPNSNYFGDVHFYDYISDCWNWKVFPKARFASEYGYQSWPSFSTLEKVSSTEDWSFNSKFSLHRQHHEGGNKQMLYQAGLHFKLPQSTDPLRTFKDTIYLTQVMQAQCVKTETEFYRRSRSEIVDQQGHTMGALYWQLNDIWQAPSWASLEYGGKWKMLHYFAQNFFAPLLPVGFENENTFYIYGVSDLHSDYSMTLSVRVHTWSSLEPVCSRVTERFVMKGGEAVCLYEEPVSELLRRCGNCTRESCVVSFYLSADHELLSPTNYHFLSSPKEAVGLCKAQITAIISQQGDIFVFDLETSAVAPFVWLDVGSIPGRFSDNGFLMTEKTRTILFYPWEPTSKNELEQSFHVTSLTDIY

SEQ ID NO: 8288 - protein, 509 aa, Homo sapiens
MRLHLLLLLALCGAGTTAAELSYSLRGNWSICNGNGSLELPGAVPGCVHSALFQQGLIQDSYYRFNDLNYRWVSLDNWTYSKEFKIPFEISKWQKVNLILEGVDTVSKILFNEVTIGETDNMFNRYSFDITNVVRDVNSIELRFQSAVLYAAQQSKAHTRYQVPPDCPPLVQKGECHVNFVRKEQCSFSWDWGPSFPTQGIWKDVRIEAYNICHLNYFTFSPIYDKSAQEWNLEIESTFDVVSSKPVGGQVIVAIPKLQTQQTYSIELQPGKRIVELFVNISKNITVETWWPHGHGNQTGYNMTVLFELDGGLNIEKSAKVYFRTVELIEEPIKGSPGLSFYFKINGFPIFLKGSNWIPADSFQDRVTSELLRLLLQSVVDANMNTLRVWGGGIYEQDEFYELCDELGIMVWQDFMFACALYPTDQGFLDSVTAEVAYQIKRLKSHPSIIIWSGNNENEEALMMNWYHISFTDRPIYIKDYVTLYVKNIRELVLACGKMPDTIDLTNTC

SEQ ID NO: 8289 - protein, 886 aa, Homo sapiens
MRLHLLLLLALCGAGTTAAELSYSLRGNWSICNGNGSLELPGAVPGCVHSALFQQGLIQDSYYRFNDLNYRWVSLDNWTYSKEFKIPFEISKWQKVNLILEGVDTVSKILFNEVTIGETDNMFNRYSFDITNVVRDVNSIELRFQSAVLYAAQQSKAHTRYQVPPDCPPLVQKGECHVNFVRKEQCSFSWDWGPSFPTQGIWKDVRIEAYNICHLNYFTFSPIYDKSAQEWNLEIESTFDVVSSKPVGGQVIVAIPKLQTQQTYSIELQPGKRIVELFVNISKNITVETWWPHGHGNQTGYNMTVLFELDGGLNIEKSAKVYFRTVELIEEPIKGSPGLSFYFKINGFPIFLKGSNWIPADSFQDRVTSELLRLLLQSVVDANMNTLRVWGGGIYEQDEFYELCDELGIMVWQDFMFACALYPTDQGFLDSVTAEVAYQIKRLKSHPSIIIWSGNNENEEALMMNWYHISFTDRPIYIKDYVTLYVKNIRELVLAGDKSRPFITSSPTNGAETVAEAWVSQNPNSNYFGDVHFYDYISDCWNWKVFPKARFASEYGYQSWPSFSTLEKVSSTEDWSFNSKFSLHRQHHEGGNKQMLYQAGLHFKLPQSTDPLRTFKDTIYLTQVMQAQCVKTETEFYRRSRSEIVDQQGHTMGALYWQLNDIWQAPSWASLEYGGKWKMLHYFAQNFFAPLLPVGFENENTFYIYGVSDLHSDYSMTLSVRVHTWSSLEPVCSRVTERFVMKGGEAVCLYEEPVSELLRRCGNCTRESCVVSFYLSADHELLSPTNYHFLSSPKEAVGLCKAQITGASLNPRLCSQTYREEISNPTKITSISMTPASLSALVLEQQKLMLPWQLPGQAGMSRMNLVPVAALGPSLEQLGGHHLSAR

SEQ ID NO: 8290 - protein, 397 aa, Homo sapiens
MRLHLLLLLALCGAGTTAAELSYSLRGNWSICNGNGSLELPGAVPGCVHSALFQQGLIQDSYYRFNDLNYRWVSLDNWTYSKEFKIPFEISKWQKVNLILEGVDTVSKILFNEVTIGETDNMFNRYSFDITNVVRDVNSIELRFQSAVLYAAQQSKAHTRYQVPPDCPPLVQKGECHVNFVRKEQCSFSWDWGPSFPTQGIWKDVRIEAYNICHLNYFTFSPIYDKSAQEWNLEIESTFDVVSSKPVGGQVIVAIPKLQTQQTYSIELQPGKRIVELFVNISKNITVETWWPHGHGNQTGYNMTVLFELDGGLNIEKSAKVYFRTVELIEEPIKGSPGLSFYFKINGFPIFLKGSNWIPADSFQDRVTSEFWGWVGCGPSAQLGQLVTAPFTVCCGC

SEQ ID NO: 8291 - protein, 413 aa, Homo sapiens
MRLHLLLLLALCGAGTTAAELSYSLRGNWSICNGNGSLELPGAVPGCVHSALFQQGLIQDSYYRFNDLNYRWVSLDNWTYSKEFKIPFEISKWQKVNLILEGVDTVSKILFNEVTIGETDNMFNRYSFDITNVVRDVNSIELRFQSAVLYAAQQSKAHTRYQVPPDCPPLVQKGECHVNFVRKEQCSFSWDWGPSFPTQGIWKDVRIEAYNICHLNYFTFSPIYDKSAQEWNLEIESTFDVVSSKPVGGQVIVAIPKLQTQQTYSIELQPGKRIVELFVNISKNITVETWWPHGHGNQTGYNMTVLFELDGGLNIEKSAKVYFRTVELIEEPIKGSPGLSFYFKINGFPIFLKGSNWIPADSFQDRVTSELLRLLLQSVVDANMNTLRVWGGGIYEQDEFYELCDELGIMVCI

SEQ ID NO: 8292 - protein, 879 aa, Homo sapiens; identical to SEQ ID NO: 8287

SEQ ID NO: 8293 - protein, 365 aa, Homo sapiens
MRLHLLLLLALCGAGTTAAELSYSLRGNWSICNGNGSLELPGAVPGCVHSALFQQGLIQDSYYRFNDLNYRWVSLDNWTYSKEFKIPFEISKWQKVNLILEGVDTVSKILFNEVTIGETDNMFNRYSFDITNVVRDVNSIELRFQSAVLYAAQQSKAHTRYQVPPDCPPLVQKGECHVNFVRKEQCSFSWDWGPSFPTQGIWKDVRIEAYNICHLNYFTFSPIYDKSAQEWNLEIESTFDVVSSKPVGGQVIVAIPKLQTQQTYSIELQPGKRIVELFVNISKNITVETWWPHGHGNQTGYNMTVLFELDGGLNIEKSAKSWRLESKIKVSAELCSFRRLWERILPCPFQFLIIAGNPWLVDASL

SEQ ID NO: 8294 - protein, 925 aa, Homo sapiens
MRLHLLLLLALCGAGTTAAELSYSLRGNWSICNGNGSLELPGAVPGCVHSALFQQGLIQDSYYRFNDLNYRWVSLDNWTYSKEFKIPFEISKWQKVNLILEGVDTVSKILFNEVTIGETDNMFNRYSFDITNVVRDVNSIELRFQSAVLYAAQQSKAHTRYQVPPDCPPLVQKGECHVNFVRKEQCSFSWDWGPSFPTQGIWKDVRIEAYNICHLNYFTFSPIYDKSAQEWNLEIESTFDVVSSKPVGGQVIVAIPKLQTQQTYSIELQPGKRIVELFVNISKNITVETWWPHGHGNQTGYNMTVLFELDGGLNIEKSAKVYFRTVELIEEPIKGSPGLSFYFKINGFPIFLKGSNWIPADSFQDRVTSELFHKKMKFFSRHSHGIIGSIFFLFKCSSPLPAGAGLAVVLQPNWANWLRLLLQSVVDANMNTLRVWGGGIYEQDEFYELCDELGIMVWQDFMFACALYPTDQGFLDSVTAEVAYQIKRLKSHPSIIIWSGNNENEEALMMNWYHISFTDRPIYIKDYVTLYVKNIRELVLAGDKSRPFITSSPTNGAETVAEAWVSQNPNSNYFGDVHFYDYISDCWNWKVFPKARFASEYGYQSWPSFSTLEKVSSTEDWSFNSKFSLHRQHHEGGNKQMLYQAGLHFKLPQSTDPLRTFKDTIYLTQVMQAQCVKTETEFYRRSRSEIVDQQGHTMGALYWQLNDIWQAPSWASLEYGGKWKMLHYFAQNFFAPLLPVGFENENTFYIYGVSDLHSDYSMTLSVRVHTWSSLEPVCSRVTERFVMKGGEAVCLYEEPVSELLRRCGNCTRESCVVSFYLSADHELLSPTNYHFLSSPKEAVGLCKAQITAIISQQGDIFVFDLETSAVAPFVWLDVGSIPGRFSDNGFLMTEKTRTILFYPWEPTSKNELEQSFHVTSLTDIY

SEQ ID NO: 8295 - protein, 62 aa, Homo sapiens
MRLHLLLLLALCGAGTTAAELSYSLRGNWSICNGNGSLELPGAVPGCVHSALFQQGLIQKEQ

SEQ ID NO: 8296 - protein, 68 aa, Homo sapiens
MRLHLLLLLALCGAGTTAAELSYSLRGNWSICNGNGSLELPGAVPGCVHSALFQQGLIQSLTLSPRLE

SEQ ID NO: 8297 - protein, 199 aa, Homo sapiens
MSKAEWDTDQWKTENYINESTEAQSKQKEQKSSEDSYYRFNDLNYRWVSLDNWTYSKEFKIPFEISKWQKVNLILEGVDTVSKILFNEVTIGETDNMFNRYSFDITNVVRDVNSIELRFQSAVLYAAQQSKAHTRYQVPPDCPPLVQKGECHVNFVRKEQCSFSWDWGPSFPTQGIWKDVRIEAYNICHLNYFTFSPIY

SEQ ID NO: 8298 - protein, 215 aa, Homo sapiens
SKILFNEVTIGETDNMFNRYSFDITNVVRDVNSIELRFQSAVLYAAQQSKAHTRYQVPPDCPPLVQKGECHVNFVRKEQCSFSWDWGPSFPTQGIWKDVRIEAYNICHLNYFTFSPIYDKSAQEWNLEIESTFDVVSSKPVGGQVIVAIPKLQTQQTYSIELQPGKRIVELFVNISKNITVETWWPHGHGNQTGYNMTVLFELDGGLNIEKSAKL

SEQ ID NO: 8299 - protein, 230 aa, Homo sapiens
  SITE 1: note = misc_feature - Xaa can be any naturally occurring amino acid
XDCPPLVQKGECHVNFVRKEQCSFSWDWGPSFPTQGIWKDVRIEAYNICHLNYFTFSPIYDKSAQEWNLEIESTFDVVSSKPVGGQVIVAIPKLQTQQTYSIELQPGKRIVELFVNISKNITVETWWPHGHGNQTGYNMTVLFELDGGLNIEKSAKVYFRTVELIEEPIKGSPGLSFYFKINGFPIFLKGSNWIPADSFQDRVTSEFWGWVGCGPSAQLGQLVSLPWCLC

SEQ ID NO: 8300 - protein, 263 aa, Homo sapiens
MADDNGEPSDDLVPAILDTAHQYSIQVAFHIQPYKGRDDITVHDNIKYIIDTYGSHGAFYRYKNSMGKSLPLFYIYDSYLTSPEAWAHLLTPNGPHSIRNTPYDGVFIALLVEEGHTHDILAAGFDGMYTYFASNGFSFGSSHQNWKAVKNFCDANNLMFIPSVGPGYIDTSIRPWNNHNTRNRVNGKYYETALQAALTVRPEIVSITSFNEWHEGTQIEKAIPKKTPTRLYLDYLPHQPSLYLELTRRWAEHFIKEKEQWLM

SEQ ID NO: 8301 - protein, 250 aa, Homo sapiens
MARRRRRACIALFLVLLFAFGTLMGLRTLKAPDGLPALGPGLELAPFERRPEGAPAPAARAPAAPAAPPPPPPPPRTADPGGSPGPAPAEAEPAPVQSLRVYSDLHAFYYSWYGSPRREGHYIHWDHVMVPHWDPKISASYPRGRHSPPDDLGSSFYPELGPYSSRDPEVLREHMTQLKEAAIGVLVLSWYPPGMADDNGEPSDDLVPAILDTAHQYSIQVAFHIQPYKGRDDITVHDNIKYIIDTTGKL

SEQ ID NO: 8302 - protein, 457 aa, Homo sapiens
MARRRRRACIALFLVLLFAFGTLMGLRTLKAPDGLPALGPGLELAPFERRPEGAPAPAARAPAAPAAPPPPPPPPRTADPGGSPGPAPAEAEPAPVQSLRVYSDLHAFYYSWYGSPRREGHYIHWDHVMVPHWDPKISASYPRGRHSPPDDLGSSFYPELGPYSSRDPEVLREHMTQLKEAAIGVLVLSWYPPGMADDNGEPSDDLVPAILDTAHQYSIQVAFHIQPYKGRDDITVHDNIKYIIDTYGSHGAFYRYKNSMGKSLPLFYIYDSYLTSPEAWAHLLTPNGPHSIRNTPYDGVFIALLVEEGHTHDILAAGFDGMYTYFASNGFSFGSSHQNWKAVKNFCDANNLMFIPSVGPGYIDTSIRPWNNHNTRNRVNGKYYETALQAALTVRPEIVSITSFNEWHEGTQIEKAIPKKTPTRLYLDYLPHQPSLYLELTRRWAEHFIKEKEQWLM

SEQ ID NO: 8303 - protein, 235 aa, Homo sapiens
MITGSPQMTWCPPFWTPPISTASRYGSHGAFYRYKNSMGKSLPLFYIYDSYLTSPEAWAHLLTPNGPHSIRNTPYDGVFIALLVEEGHTHDILAAGFDGMYTYFASNGFSFGSSHQNWKAVKNFCDANNLMFIPSVGPGYIDTSIRPWNNHNTRNRVNGKYYETALQAALTVRPEIVSITSFNEWHEGTQIEKAIPKKTPTRLYLDYLPHQPSLYLELTRRWAEHFIKEKEQWLM

SEQ ID NO: 8304 - protein, 130 aa, Homo sapiens
VYSDLHAFYYSWYGSPRREGHYIHWDHVMVPHWDPKISASYPRGRHSPPDDLGSSFYPELGPYSSRDPEVLREHMTQLKEAAIGVLVLSWYPPGMADDNGEPSDDLVPAILDTAHQYSIQVWLPWCILPL

SEQ ID NO: 8305 - protein, 185 aa, Homo sapiens
MRRMRRMWATQGLAVALALSVLPGSRALRPGDCEVCISYLGRFYQDLKDRDVTFSPATIENELIKFCREARGKENRLCYYIGATDDAATKIINEVSKPLAHHIPVEKICEKLKKKDSQICELKYDKQIDLSTVDLKKLRVKELKKILDDWGETCKGCAEKSDYIRKINELMPKYAPKAASARTDL

SEQ ID NO: 8306 - protein, 71 aa, Homo sapiens
  SITE 1: note = misc_feature - Xaa can be any naturally occurring amino acid
XATQGLAVALALSVLPGSRALRPGDCEVCISYLGRFYQDLKDRDVTFSPATIENELIKFCREARGKENRLV

SEQ ID NO: 8307 - protein, 397 aa, Homo sapiens
MFFGGEGSLTYTLGIRGNEPVYTSTQEDCINSCCSTKNISGDKACNLMIFDTRKTARQPNCYLFFCPNEEACPLKPAKGLMSYRIITDFPSLTRNLPSQELPQEDSLLHGQFSQAVTPLAHHHTDYSKPTDISWRDTLSQKFGSSDHLEKLFKMDEASAQLLAYKEKGHSQSSQFSSDQEIAHLLPENVSALPATVAVASPHTTSATPKPATLLPTNASVTPSGTSQPQLATTAPPVTTVTSQPPTTLISTVFTRAAATLQAMATTAVLTTTFQAPTDSKGSLETIPFTEISNLTLNTGNVYNPTALSMSNVESSTMNKTASWEGREASPGSSSQGSVPENQYGLPFEKWLLIGSLLFGVLFLVIGLVLLGRILSESLRRKRYSRLDYLINGIYVDI

SEQ ID NO: 8308 - protein, 57 aa, Homo sapiens
MFFGGEGSLTYTLVIICFLTLRLSASQNCLKKSLEDVVIDIQSSLSKGIRGNEPVYT

SEQ ID NO: 8309 - protein, 431 aa, Homo sapiens
MFFGGEGSLTYTLVIICFLTLRLSASQNCLKKSLEDVVIDIQSSLSKGIRGNEPVYTSTQEDCINSCCSTKNISGDKACNLMIFDTRKTARQPNCYLFFCPNEEACPLKPAKGLMSYRIITDFPSLTRNLPSQELPQEDSLLHGQFSQAVTPLAHHHTDYSKPTDISWRDTLSQKFGSSDHLEKLFKMDEASAQLLAYKEKGHSQSSQFSSDQEIAHLLPENVSALPATVAVASPHTTSATPKPATLLPTNASVTPSGTSQPQLATTAPPVTTVTSQPPTTLISTVFTRAAATLQAMATTAVLTTTFQAPTDSKGSLETIPFTEISNLTLNTGNVYNPTALSMSNVESSTMNKTASWEGREASPGSSSQGSVPENQYGLPFEKWLLIGSLLFGVLFLVIGLVLLGRILSESLRRKRYSRLDYLINGIYVDI

SEQ ID NO: 8310 - protein, 350 aa, Homo sapiens
MIFDTRKTARQPNCYLFFCPNEEACPLKPAKGLMSYRIITDFPSLTRNLPSQELPQEDSLLHGQFSQAVTPLAHHHTDYSKPTDISWRDTLSQKFGSSDHLEKLFKMDEASAQLLAYKEKGHSQSSQFSSDQEIAHLLPENVSALPATVAVASPHTTSATPKPATLLPTNASVTPSGTSQPQLATTAPPVTTVTSQPPTTLISTVFTRAAATLQAMATTAVLTTTFQAPTDSKGSLETIPFTEISNLTLNTGNVYNPTALSMSNVESSTMNKTASWEGREASPGSSSQGSVPENQYGLPFEKWLLIGSLLFGVLFLVIGLVLLGRILSESLRRKRYSRLDYLINGIYVDI

SEQ ID NO: 8311 - protein, 832 aa, Homo sapiens
MELTGLEVALVLILQKVENGDLSNKILKITDFGLAREWHRTTKMSAAGTYAWMAPEVIRASMFSKGSDVWSYGVLLWELLTGEVPFRGIDGLAVAYGVAMNKLALPIPSTCPEPFAKLMEDCWNPDPHSRPSFTNILDQLTTIEESGFFEMPKDSFHCLQDNWKHEIQEMFDQLRAKEKELRTWEEELTRAALQQKNQEELLRRREQELAEREIDILERELNIIIHQLCQEKPRVKKRKGKFRKSRLKLKDGNRISLPSDFQHKFTVQASPTMDKRKSLINSRSSPPASPTIIPRLRAIQLTPGESSKTWGRSSVVPKEEGEEEEKRAPKKKGRTWGPGTLGQKELASGDEGLKSLVDGYKQWSSSAPNLVKGPRSSPALPGFTSLMEMALLAASWVVPIDIEEDEDSEGPGSGESRLQHSPSQSYLCIPFPRGEDGDGPSSDGIHEEPTPVNSATSTPQLTPTNSLKRGGAHHRRCEVALLGCGAVLAATGLGFDLLEAGKCQLLPLEEPEPPAREEKKRREGLFQRSSRPRRSTSPPSRKLFKKEEPMLLLGDPSASLTLLSLSSISECNSTRSLLRSDSDEIVVYEMPVSPVEAPPLSPCTHNPLVNVRVERFKRDPNQSLTPTHVTLTTPSQPSSHRRTPSDGALKPETLLASRSPSSNGLSPSPGAGMLKTPSPSRDPGEFPRLPDPNVVFPPTPRRWNTQQDSTLERPKTLEFLPRPRPSANRQRLDPWWFVSPSHARSTSPANSSSTETPSNLDSCFASSSSTVEERPGLPALLPFQAGPLPPTERTLLDLDAEGQSQDSTVPLCRAELNTHRPAPYEIQQEFWS

SEQ ID NO: 8312 - protein, 880 aa, Homo sapiens
MELTGLEVALVLILQKVENGDLSNKILKITDFGLAREWHRTTKMSAAGTYAWMAPEVIRASMFSKGSDVWSYGVLLWELLTGEVPFRGIDGLAVAYGVAMNKLALPIPSTCPEPFAKLMEDCWNPDPHSRPSFTNILDQLTTIEESGFFEMPKDSFHCLQDNWKHEIQEMFDQLRAKEKELRTWEEELTRAALQQKNQEELLRRREQELAEREIDILERELNIIIHQLCQEKPRVKKRKGKFRKSRLKLKDGNRISLPSDFQHKFTVQASPTMDKRKSLINSRSSPPASPTIIPRLRAIQCETVSQISWGQNTQGHLSPALSSHRLVQACSIHNFCHLSSTMCIYMHILTPGESSKTWGRSSVVPKEEGEEEEKRAPKKKGRTWGPGTLGQKELASGDEGLKSLVDGYKQWSSSAPNLVKGPRSSPALPGFTSLMEMALLAASWVVPIDIEEDEDSEGPGSGESRLQHSPSQSYLCIPFPRGEDGDGPSSDGIHEEPTPVNSATSTPQLTPTNSLKRGGAHHRRCEVALLGCGAVLAATGLGFDLLEAGKCQLLPLEEPEPPAREEKKRREGLFQRSSRPRRSTSPPSRKLFKKEEPMLLLGDPSASLTLLSLSSISECNSTRSLLRSDSDEIVVYEMPVSPVEAPPLSPCTHNPLVNVRVERFKRDPNQSLTPTHVTLTTPSQPSSHRRTPSDGALKPETLLASRSPSSNGLSPSPGAGMLKTPSPSRDPGEFPRLPDPNVVFPPTPRRWNTQQDSTLERPKTLEFLPRPRPSANRQRLDPWWFVSPSHARSTSPANSSSTETPSNLDSCFASSSSTVEERPGLPALLPFQAGPLPPTERTLLDLDAEGQSQDSTVPLCRAELNTHRPAPYEIQQEFWS

SEQ ID NO: 8313 - protein, 1081 aa, Homo sapiens
MEPSRALLGCLASAAAAAPPGEDGAGAGAEEEEEEEEEAAAAVGPGELGCDAPLPYWTAVFEYEAAGEDELTLRLGDVVEVLSKDSQVSGDEGWWTGQLNQRVGIFPSNYVTPRSAFSSRCQPGGEDPSCYPPIQLLEIDFAELTLEEIIGIGGFGKVYRAFWIGDEVAVKAARHDPDEDISQTIENVRQEAKLFAMLKHPNIIALRGVCLKEPNLCLVMEFARGGPLNRVLSGKRIPPDILVNWAVQIARGMNYLHDEAIVPIIHRDLKSSNILILQKVENGDLSNKILKITDFGLAREWHRTTKMSAAGTYAWMAPEVIRASMFSKGSDVWSYGVLLWELLTGEVPFRGIDGLAVAYGVAMNKLALPIPSTCPEPFAKLMEDCWNPDPHSRPSFTNILDQLTTIEESGFFEMPKDSFHCLQDNWKHEIQEMFDQLRAKEKELRTWEEELTRAALQQKNQEELLRRREQELAEREIDILERELNIIIHQLCQEKPRVKKRKGKFRKSRLKLKDGNRISLPSDFQHKFTVQASPTMDKRKSLINSRSSPPASPTIIPRLRAIQLTPGESSKTWGRSSVVPKEEGEEEEKRAPKKKGRTWGPGTLGQKELASGDEGLKSLVDGYKQWSSSAPNLVKGPRSSPALPGFTSLMEMEDEDSEGPGSGESRLQHSPSQSYLCIPFPRGEDGDGPSSDGIHEEPTPVNSATSTPQLTPTNSLKRGGAHHRRCEVALLGCGAVLAATGLGFDLLEAGKCQLLPLEEPEPPAREEKKRREGLFQRSSRPRRSTSPPSRKLFKKEEPMLLLGDPSASLTLLSLSSISECNSTRSLLRSDSDEIVVYEMPVSPVEAPPLSPCTHNPLVNVRVERFKRDPNQSLTPTHVTLTTPSQPSSHRRTPSDGALKPETLLASRSPSSNGLSPSPGAGMLKTPSPSRDPGEFPRLPDPNVVFPPTPRRWNTQQDSTLERPKTLEFLPRPRPSANRQRLDPWWFVSPSHARSTSPANSSSTETPSNLDSCFASSSSTVEERPGLPALLPFQAGPLPPTERTLLDLDAEGQSQDSTVPLCRAELNTHRPAPYEIQQEFWS

SEQ ID NO: 8314 - protein, 1118 aa, Homo sapiens
MEPSRALLGCLASAAAAAPPGEDGAGAGAEEEEEEEEEAAAAVGPGELGCDAPLPYWTAVFEYEAAGEDELTLRLGDVVEVLSKDSQVSGDEGWWTGQLNQRVGIFPSNYVTPRSAFSSRCQPGGEDPSCYPPIQLLEIDFAELTLEEIIGIGGFGKVYRAFWIGDEVAVKAARHDPDEDISQTIENVRQEAKLFAMLKHPNIIALRGVCLKEPNLCLVMEFARGGPLNRVLSGKRIPPDILVNWAVQIARGMNYLHDEAIVPIIHRDLKSSNILILQKVENGDLSNKILKITDFGLAREWHRTTKMSAAGTYAWMAPEVIRASMFSKGSDVWSYGVLLWELLTGEVPFRGIDGLAVAYGVAMNKLALPIPSTCPEPFAKLMEDCWNPDPHSRPSFTNILDQLTTIEESGFFEMPKDSFHCLQDNWKHEIQEMFDQLRAKEKELRTWEEELTRAALQQKNQEELLRRREQELAEREIDILERELNIIIHQLCQEKPRVKKRKGKFRKSRLKLKDGNRISLPSDFQHKFTVQASPTMDKRKSLINSRSSPPASPTIIPRLRAIQLTPGESSKTWGRSSVVPKEEGEEEEKRAPKKKGRTWGPGTLGQKELASGDEGSPQRREKANGLSTPSESPHFHLGLKSLVDGYKQWSSSAPNLVKGPRSSPALPGFTSLMEMALLAASWVVPIDIEEDEDSEGPGSGESRLQHSPSQSYLCIPFPRGEDGDGPSSDGIHEEPTPVNSATSTPQLTPTNSLKRGGAHHRRCEVALLGCGAVLAATGLGFDLLEAGKCQLLPLEEPEPPAREEKKRREGLFQRSSRPRRSTSPPSRKLFKKEEPMLLLGDPSASLTLLSLSSISECNSTRSLLRSDSDEIVVYEMPVSPVEAPPLSPCTHNPLVNVRVERFKRDPNQSLTPTHVTLTTPSQPSSHRRTPSDGALKPETLLASRSPSSNGLSPSPGAGMLKTPSPSRDPGEFPRLPDPNVVFPPTPRRWNTQQDSTLERPKTLEFLPRPRPSANRQRLDPWWFVSPSHARSTSPANSSSTETPSNLDSCFASSSSTVEERPGLPALLPFQAGPLPPTERTLLDLDAEGQSQDSTVPLCRAELNTHRPAPYEIQQEFWS

SEQ ID NO: 8315 - protein, 1104 aa, Homo sapiens
MEPSRALLGCLASAAAAAPPGEDGAGAGAEEEEEEEEEAAAAVGPGELGCDAPLPYWTAVFEYEAAGEDELTLRLGDVVEVLSKDSQVSGDEGWWTGQLNQRVGIFPSNYVTPRSAFSSRCQPGGEDPSCYPPIQLLEIDFAELTLEEIIGIGGFGKVYRAFWIGDEVAVKAARHDPDEDISQTIENVRQEAKLFAMLKHPNIIALRGVCLKEPNLCLVMEFARGGPLNRVLSGKRIPPDILVNWAVQIARGMNYLHDEAIVPIIHRDLKSSNILILQKVENGDLSNKILKITDFGLAREWHRTTKMSAAGTYAWMAPEVIRASMFSKGSDVWSYGVLLWELLTGEVPFRGIDGLAVAYGVAMNKLALPIPSTCPEPFAKLMEDCWNPDPHSRPSFTNILDQLTTIEESGFFEMPKDSFHCLQDNWKHEIQEMFDQLRAKEKELRTWEEELTRAALQQKNQEELLRRREQELAEREIDILERELNIIIHQLCQEKPRVKKRKGKFRKSRLKLKDGNRISLPSDFQHKFTVQASPTMDKRKSLINSRSSPPASPTIIPRLRAIQLTPGESSKTWGRSSVVPKEEGEEEEKRAPKKKGRTWGPGTLGQKELASGDEGSPQRREKANGLSTPSESPHFHLGLKSLVDGYKQWSSSAPNLVKGPRSSPALPGFTSLMEMEDEDSEGPGSGESRLQHSPSQSYLCIPFPRGEDGDGPSSDGIHEEPTPVNSATSTPQLTPTNSLKRGGAHHRRCEVALLGCGAVLAATGLGFDLLEAGKCQLLPLEEPEPPAREEKKRREGLFQRSSRPRRSTSPPSRKLFKKEEPMLLLGDPSASLTLLSLSSISECNSTRSLLRSDSDEIVVYEMPVSPVEAPPLSPCTHNPLVNVRVERFKRDPNQSLTPTHVTLTTPSQPSSHRRTPSDGALKPETLLASRSPSSNGLSPSPGAGMLKTPSPSRDPGEFPRLPDPNVVFPPTPRRWNTQQDSTLERPKTLEFLPRPRPSANRQRLDPWWFVSPSHARSTSPANSSSTETPSNLDSCFASSSSTVEERPGLPALLPFQAGPLPPTERTLLDLDAEGQSQDSTVPLCRAELNTHRPAPYEIQQEFWS

SEQ ID NO: 8316 - protein, 837 aa, Homo sapiens
MSAAGTYAWMAPEVIRASMFSKGSDVWSYGVLLWELLTGEVPFRGIDGLAVAYGVAMNKLALPIPSTCPEPFAKLMEDCWNPDPHSRPSFTNILDQLTTIEESGFFEMPKDSFHCLQDNWKHEIQEMFDQLRAKEKELRTWEEELTRAALQQKNQEELLRRREQELAEREIDILERELNIIIHQLCQEKPRVKKRKGKFRKSRLKLKDGNRISLPSDFQHKFTVQASPTMDKRKSLINSRSSPPASPTIIPRLRAIQCETVSQISWGQNTQGHLSPALSSHRLVQACSIHNFCHLSSTMCIYMHILTPGESSKTWGRSSVVPKEEGEEEEKRAPKKKGRTWGPGTLGQKELASGDEGLKSLVDGYKQWSSSAPNLVKGPRSSPALPGFTSLMEMALLAASWVVPIDIEEDEDSEGPGSGESRLQHSPSQSYLCIPFPRGEDGDGPSSDGIHEEPTPVNSATSTPQLTPTNSLKRGGAHHRRCEVALLGCGAVLAATGLGFDLLEAGKCQLLPLEEPEPPAREEKKRREGLFQRSSRPRRSTSPPSRKLFKKEEPMLLLGDPSASLTLLSLSSISECNSTRSLLRSDSDEIVVYEMPVSPVEAPPLSPCTHNPLVNVRVERFKRDPNQSLTPTHVTLTTPSQPSSHRRTPSDGALKPETLLASRSPSSNGLSPSPGAGMLKTPSPSRDPGEFPRLPDPNVVFPPTPRRWNTQQDSTLERPKTLEFLPRPRPSANRQRLDPWWFVSPSHARSTSPANSSSTETPSNLDSCFASSSSTVEERPGLPALLPFQAGPLPPTERTLLDLDAEGQSQDSTVPLCRAELNTHRPAPYEIQQEFWS

SEQ ID NO: 8317 - protein, 55 aa, Homo sapiens
MFGQIQSPGYPDSYPSDSEVTWNITVPDGFRIKLYFMHFNLESSYLCEYDYVKVE

SEQ ID NO: 8318 - protein, 354 aa, Homo sapiens
MFGQIQSPGYPDSYPSDSEVTWNITVPDGFRIKLYFMHFNLESSYLCEYDYVKVETEDQVLATFCGRETTDTEQTPGQEVVLSPGSFMSITFRSDFSNEERFTGFDAHYMAVDVDECKEREDEELSCDHYCHNYIGGYYCSCRFGYILHTDNRTCRVECSDNLFTQRTGVITSPDFPNPYPKSSECLYTIELEEGFMVNLQFEDIFDIEDHPEVPCPYDYIKIKVGPKVLGPFCGEKAPEPISTQSHSVLILFHSDNSGENRGWRLSYRAAGNECPELQPPVHGKIEPSQAKYFFKDQVLVSCDTGYKVLKDNVEMDTFQIECLKDGTWSNKIPTCKKNEIDLESELKSEQVTE

SEQ ID NO: 8319 - protein, 118 aa, Homo sapiens
MPANSRDTQGPQNKDKASRTPHRARAHRWLLLYYALCFSLSKASAHTVELNNMFGQIQSPGYPDSYPSDSEVTWNITVPDGFRIKLYFMHFNLESSYLCEYDYVKVETEDQVLATFCG

SEQ ID NO: 8320 - protein, 205 aa, Homo sapiens [sequence omitted]

SEQ ID NO: 8321 - protein, 380 aa, Homo sapiens
MRWLLLYYALCFSLSKASAHTVELNNMFGQIQSPGYPDSYPSDSEVTWNITVPDGFRIKLYFMHFNLESSYLCEYDYVKVETEDQVLATFCGRETTDTEQTPGQEVVLSPGSFMSITFRSDFSNEERFTGFDAHYMAVDVDECKEREDEELSCDHYCHNYIGGYYCSCRFGYILHTDNRTCRVECSDNLFTQRTGVITSPDFPNPYPKSSECLYTIELEEGFMVNLQFEDIFDIEDHPEVPCPYDYIKIKVGPKVLGPFCGEKAPEPISTQSHSVLILFHSDNSGENRGWRLSYRAAGNECPELQPPVHGKIEPSQAKYFFKDQVLVSCDTGYKVLKDNVEMDTFQIECLKDGTWSNKIPTCKKNEIDLESELKSEQVTE

SEQ ID NO: 8322 - protein, 728 aa, Homo sapiens
MRWLLLYYALCFSLSKASAHTVELNNMFGQIQSPGYPDSYPSDSEVTWNITVPDGFRIKLYFMHFNLESSYLCEYDYVKVETEDQVLATFCGRETTDTEQTPGQEVVLSPGSFMSITFRSDFSNEERFTGFDAHYMAVDVDECKEREDEELSCDHYCHNYIGGYYCSCRFGYILHTDNRTCRVECSDNLFTQRTGVITSPDFPNPYPKSSECLYTIELEEGFMVNLQFEDIFDIEDHPEVPCPYDYIKIKVGPKVLGPFCGEKAPEPISTQSHSVLILFHSDNSGENRGWRLSYRAAGNECPELQPPVHGKIEPSQAKYFFKDQVLVSCDTGYKVLKDNVEMDTFQIECLKDGTWSNKIPTCKIVDCRAPGELEHGLITFSTRNNLTTYKSEIKYSCQEPYYKMLNNNTGIYTCSAQGVWMNKVLGRSLPTCLPECGQPSRSLPSLVKRIIGGRNAEPGLFPWQALIVVEDTSRVPNDKWFGSGALLSASWILTAAHVLRSQRRDTTVIPVSKEHVTVYLGLHDVRDKSGAVNSSAARVVLHPDFNIQNYNHDIALVQLQEPVPLGPHVMPVCLPRLEPEGPAPHMLGLVAGWGISNPNVTVDEIISSGTRTLSDVLQYVKLPVVPHAECKTSYESRSGNYSVTENMFCAGYYEGGKDTCLGDSGGAFVIFDDLSQRWVVQGLVSWGGPEECGSKQVYGVYTKVSNYVDWVWEQMGLPQSVVEPQVER

SEQ ID NO: 8323 - protein, 699 aa, Homo sapiens
MRWLLLYYALCFSLSKASAHTVELNNMFGQIQSPGYPDSYPSDSEVTWNITVPDGFRIKLYFMHFNLESSYLCEYDYVKVETEDQVLATFCGRETTDTEQTPGQEVVLSPGSFMSITFRSDFSNEERFTGFDAHYMAVDVDECKEREDEELSCDHYCHNYIGGYYCSCRFGYILHTDNRTCRVECSDNLFTQRTGVITSPDFPNPYPKSSECLYTIELEEGFMVNLQFEDIFDIEDHPEVPCPYDYIKIKVGPKVLGPFCGEKAPEPISTQSHSVLILFHSDNSGENRGWRLSYRAAGNECPELQPPVHGKIEPSQAKYFFKDQVLVSCDTGYKVLKDNVEMDTFQIECLKDGTWSNKIPTCKIVDCRAPGELEHGLITFSTRNNLTTYKSEIKYSCQEPYYKMLNNNTGIYTCSAQGVWMNKVLGRSLPTCLPVCGLPKFSRKLMARIFNGRPAQKGTTPWIAMLSHLNGQPFCGGSLLGSSWIVTAAHCLHQSLDPEDPTLRDSDLLSPSDFKIILGKHWRLRSDENEQHLGVKHTTLHPQYDPNTFENDVALVELLESPVLNAFVMPICLPEGPQQEGAMVIVSGWGKQFLQRFPETLMEIEIPIVDHSTCQKAYAPLKKKVTRDMICAGEKEGGKDACAGDSGGPMVTLNRERGQWYLVGTVSWGDDCGKKDRYGVYSYIHHNKDWIQRVTGVRN

SEQ ID NO: 8324 - protein, 615 aa, Homo sapiens
MSITFRSDFSNEERFTGFDAHYMAVDVDECKEREDEELSCDHYCHNYIGGYYCSCRFGYILHTDNRTCRVECSDNLFTQRTGVITSPDFPNPYPKSSECLYTIELEEGFMVNLQFEDIFDIEDHPEVPCPYDYIKIKVGPKVLGPFCGEKAPEPISTQSHSVLILFHSDNSGENRGWRLSYRAAGNECPELQPPVHGKIEPSQAKYFFKDQVLVSCDTGYKVLKDNVEMDTFQIECLKDGTWSNKIPTCKIVDCRAPGELEHGLITFSTRNNLTTYKSEIKYSCQEPYYKMLNNNTGIYTCSAQGVWMNKVLGRSLPTCLPECGQPSRSLPSLVKRIIGGRNAEPGLFPWQALIVVEDTSRVPNDKWFGSGALLSASWILTAAHVLRSQRRDTTVIPVSKEHVTVYLGLHDVRDKSGAVNSSAARVVLHPDFNIQNYNHDIALVQLQEPVPLGPHVMPVCLPRLEPEGPAPHMLGLVAGWGISNPNVTVDEIISSGTRTLSDVLQYVKLPVVPHAECKTSYESRSGNYSVTENMFCAGYYEGGKDTCLGDSGGAFVIFDDLSQRWVVQGLVSWGGPEECGSKQVYGVYTKVSNYVDWVWEQMGLPQSVVEPQVER

SEQ ID NO: 8325 - protein, 686 aa, Homo sapiens
MRLLTLLGLLCGSVATPLGPKWPEPVFGRLASPGFPGEYANDQERRWTLTAPPGYRLRLYFTHFDLELSHLCEYDFVKLSSGAKVLATLCGQESTDTERAPGKDTFYSLGSSLDITFRSDYSNEKPFTGFEAFYAAEDIDECQVAPGEAPTCDHHCHNHLGGFYCSCRAGYVLHRNKRTCSALCSGQVFTQRSGELSSPEYPRPYPKLSSCTYSISLEEGFSVILDFVESFDVETHPETLCPYDFLKIQTDREEHGPFCGKTLPHRIETKSNTVTITFVTDESGDHTGWKIHYTSTAQPCPYPMAPPNGHVSPVQAKYILKDSFSIFCETGYELLQGHLPLKSFTAVCQKDGSWDRPMPACSIVDCGPPDDLPSGRVEYITGPGVTTYKAVIQYSCEETFYTMKVNDGKYVCEADGFWTSSKGEKSLPVCEPVCGLSARTTGGRIYGGQKAKPGDFPWQVLILGGTTAAGALLYDNWVLTAAHAVYEQKHDASALDIRMGTLKRLSPHYTQAWSEAVFIHEGYTHDAGFDNDIALIKLNNKVVINSNITPICLPRKEAESFMRTDDIGTASGWGLTQRGFLARNLMYVDIPIVDHQKCTAAYEKPPYPRGSVTANMLCAGLESGGKDSCRGDSGGALVFLDSETERWFVGGIVSWGSMNCGEAGQYGVYTKVINYIPWIENIISDF

SEQ ID NO: 8326 - protein, 185 aa, Homo sapiens
MRLLTLLGLLCGSVATPLGPKWPEPVFGRLASPGFPGEYANDQERRWTLTAPPGYRLRLYFTHFDLELSHLCEYDFVKLSSGAKVLATLCGQESTDTERAPGKDTFYSLGSSLDITFRSDYSNEKPFTGFEAFYAAEDIDECQVAPGEAPTCDHHCHNHLGGFYCSCRAGYVLHRNKRTCSEQSL

SEQ ID NO: 8327 - protein, 496 aa, Homo sapiens
MRVLSGTSLMLCSLLLLLQALCSPGLAPQSRGHLCRTRPTDLVFVVDSSRSVRPVEFEKVKVFLSQVIESLDVGPNATRVGMVNYASTVKQEFSLRAHVSKAALLQAVRRIQPLSTGTMTGLAIQFAITKAFGDAEGGRSRSPDISKVVIVVTDGRPQDSVQDVSARARASGVELFAIGVGSVDKATLRQIASEPQDEHVDYVESYSVIEKLSRKFQEAFCVVSDLCATGDHDCEQVCISSPGSYTCACHEGFTLNSDGKTCNVCSGGGGSSATDLVFLIDGSKSVRPENFELVKKFISQIVDTLDVSDKLAQVGLVQYSSSVRQEFPLGRFHTKKDIKAAVRNMSYMEKGTMTGAALKYLIDNSFTVSSGARPGAQKVGIVFTDGRSQDYINDAAKKAKDLGFKMFAVGVGNAVEDELREIASEPVAEHYFYTADFKTINQIGKKLQKKICVEEDPCACESLVKFQAKVEGLLQALTRKLEAVSKRLAILENTVV

SEQ ID NO: 8328 - protein, 115 aa, Homo sapiens
MEDHNCEQLCVNVPGSFVCQCYSGYALAEDGKRCVAVDYCASENHGCEHECVNADGSYLCQCHEGFALNPDKKTCTKIDYCASSNHGCQHECVNTDDSYSCHCLKGFTLNPDKKT

SEQ ID NO: 8329 - protein, 672 aa, Homo sapiens
MEDHNCEQLCVNVPGSFVCQCYSGYALAEDGKRCVAVDYCASENHGCEHECVNADGSYLCQCHEGFALNPDKKTCTKIDYCASSNHGCQHECVNTDDSYSCHCLKGFTLNPDKKTCRRINYCALNKPGCEHECVNMEESYYCRCHRGYTLDPNGKTCSRVDHCAQQDHGCEQLCLNTEDSFVCQCSEGFLINEDLKTCSRVDYCLLSDHGCEYSCVNMDRSFACQCPEGHVLRSDGKTCAKLDSCALGDHGCEHSCVSSEDSFVCQCFEGYILREDGKTCRRKDVCQAIDHGCEHICVNSDDSYTCECLEGFRLAEDGKRCRRKDVCKSTHHGCEHICVNNGNSYICKCSEGFVLAEDGRRCKKCTEGPIDLVFVIDGSKSLGEENFEVVKQFVTGIIDSLTISPKAARVGLLQYSTQVHTEFTLRNFNSAKDMKKAVAHMKYMGKGSMTGLALKHMFERSFTQGEGARPLSTRVPRAAIVFTDGRAQDDVSEWASKAKANGITMYAVGVGKAIEEELQEIASEPTNKHLFYAEDFSTMDEISEKLKKGICEALEDSDGRQDSPAGELPKTVQQPTESEPVTINIQDLLSCSNFAVQHRYLFEEDNLLRSTQKLSHSTKPSGSPLEEKHDQCKCENLIMFQNLANEEVRKLTQRLEEMTQRMEALENRLRYR

SEQ ID NO: 8330 - protein, 956 aa, Homo sapiens
MEKMLAGCFLLILGQIVLLPAEARERSRGRSISRGRHARTHPQTALLESSCENKRADLVFIIDSSRSVNTHDYAKVKEFIVDILQFLDIGPDVTRVGLLQYGSTVKNEFSLKTFKRKSEVERAVKRMRHLSTGTMTGLAIQYALNIAFSEAEGARPLRENVPRVIMIVTDGRPQDSVAEVAAKARDTGILIFAIGVGQVDFNTLKSIGSEPHEDHVFLVANFSQIETLTSVFQKKLCTAHMCSTLEHNCAHFCINIPGSYVCRCKQGYILNSDQTTCRIQDLCAMEDHNCEQLCVNVPGSFVCQCYSGYALAEDGKRCVAVDYCASENHGCEHECVNADGSYLCQCHEGFALNPDKKTCTKIDYCASSNHGCQHECVNTDDSYSCHCLKGFTLNPDKKTCRRINYCALNKPGCEHECVNMEESYYCRCHRGYTLDPNGKTCSRVDHCAQQDHGCEQLCLNTEDSFVCQCSEGFLINEDLKTCSRVDYCLLSDHGCEYSCVNMDRSFACQCPEGHVLRSDGKTCAKLDSCALGDHGCEHSCVSSEDSFVCQCFEGYILREDGKTCRRKDVCQAIDHGCEHICVNSDDSYTCECLEGFRLAEDGKRCRRKDVCKSTHHGCEHICVNNGNSYICKCSEGFVLAEDGRRCKKCTEGPIDLVFVIDGSKSLGEENFEVVKQFVTGIIDSLTISPKAARVGLLQYSTQVHTEFTLRNFNSAKDMKKAVAHMKYMGKGSMTGLALKHMFERSFTQGEGARPLSTRVPRAAIVFTDGRAQDDVSEWASKAKANGITMYAVGVGKAIEEELQEIASEPTNKHLFYAEDFSTMDEISEKLKKGICEALEDSDGRQDSPAGELPKTVQQPTESEPVTINIQDLLSCSNFAVQHRYLFEEDNLLRSTQKLSHSTKPSGSPLEEKHDQCKCENLIMFQNLANEEVRKLTQRLEEMTQRMEALENRLRYR

SEQ ID NO: 8331 - protein, 915 aa, Homo sapiens
MEKMLAGCFLLILGQIVLLPAEARERSRGRSISRGRHARTHPQTALLESSCENKRADLVFIIDSSRSVNTHDYAKVKEFIVDILQFLDIGPDVTRVGLLQYGSTVKNEFSLKTFKRKSEVERAVKRMRHLSTGTMTGLAIQYALNIAFSEAEGARPLRENVPRVIMIVTDGRPQDSVAEVAAKARDTGILIFAIGVGQVDFNTLKSIGSEPHEDHVFLVANFSQIETLTSVFQKKLCTAHMCSTLEHNCAHFCINIPGSYVCRCKQGYILNSDQTTCRIQDLCAMEDHNCEQLCVNVPGSFVCQCYSGYALAEDGKRCVAVDYCASENHGCEHECVNADGSYLCQCHEGFALNPDKKTCTRINYCALNKPGCEHECVNMEESYYCRCHRGYTLDPNGKTCSRVDHCAQQDHGCEQLCLNTEDSFVCQCSEGFLINEDLKTCSRVDYCLLSDHGCEYSCVNMDRSFACQCPEGHVLRSDGKTCAKLDSCALGDHGCEHSCVSSEDSFVCQCFEGYILREDGKTCRRKDVCQAIDHGCEHICVNSDDSYTCECLEGFRLAEDGKRCRRKDVCKSTHHGCEHICVNNGNSYICKCSEGFVLAEDGRRCKKCTEGPIDLVFVIDGSKSLGEENFEVVKQFVTGIIDSLTISPKAARVGLLQYSTQVHTEFTLRNFNSAKDMKKAVAHMKYMGKGSMTGLALKHMFERSFTQGEGARPLSTRVPRAAIVFTDGRAQDDVSEWASKAKANGITMYAVGVGKAIEEELQEIASEPTNKHLFYAEDFSTMDEISEKLKKGICEALEDSDGRQDSPAGELPKTVQQPTESEPVTINIQDLLSCSNFAVQHRYLFEEDNLLRSTQKLSHSTKPSGSPLEEKHDQCKCENLIMFQNLANEEVRKLTQRLEEMTQRMEALENRLRYR

SEQ ID NO: 8332 - protein, 956 aa, Homo sapiens; identical to SEQ ID NO: 8330

SEQ ID NO: 8333 - protein, 937 aa, Homo sapiens
MEKMLAGCFLLILGQIVLLPAEARERSRGRSISRGRHARTHPQTALLESSCENKRADLVFIIDSSRSVNTHDYAKVKEFIVDILQFLDIGPDVTRVGLLQYGSTVKNEFSLKTFKRKSEVERAVKRMRHLSTGTMTGLAIQYALNIAFSEAEGARPLRENVPRVIMIVTDGRPQDSVAEVAAKARDTGILIFAIGVGQVDFNTLKSIGSEPHEDHVFLVANFSQIETLTSVFQKKLCTAHMCSTLEHNCAHFCINIPGSYVCRCKQGYILNSDQTTCRIQDLCAMEDHNCEQLCVNVPGSFVCQCYSGYALAEDGKRCVAVDYCASENHGCEHECVNADGSYLCQCHEGFALNPDKKTCTKIDYCASSNHGCQHECVNTDDSYSCHCLKGFTLNPDKKTCRRINYCALNKPGCEHECVNMEESYYCRCHRGYTLDPNGKTCSRVDHCAQQDHGCEQLCLNTEDSFVCQCSEGFLINEDLKTCSRVDYCLLSDHGCEYSCVNMDRSFACQCPEGHVLRSDGKTCAKLDSCALGDHGCEHSCVSSEDSFVCQCFEGYILREDGKTCRRKDVCQAIDHGCEHICVNSDDSYTCECLEGFRLAEDGKRCRRKDVCKSTHHGCEHICVNNGNSYICKCSEGFVLAEDGRRCKKCTEGPIDLVFVIDGSKSLGEENFEVVKQFVTGIIDSLTISPKAARVGLLQYSTQVHTEFTLRNFNSAKDMKKAVAHMKYMGKGSMTGLALKHMFERSFTQGEGARPLSTRVPRAAIVFTDGRAQDDVSEWASKAKANGITMYAVGVGKAIEEELQEIASEPTNKHLFYAEDFSTMDEISEKLKKGICEALEDSDGRQDSPAGELPKTVQQPTVQHRYLFEEDNLLRSTQKLSHSTKPSGSPLEEKHDQCKCENLIMFQNLANEEVRKLTQRLEEMTQRMEALENRLRYR

SEQ ID NO: 8334 - protein, 195 aa, Homo sapiens
QCYSGYALAEDGKRCVAVDYCASENHGCEHECVNADGSYLCQCHEGFALNPDKKTCTKIDYCASSNHGCQHECVNTDDSYSCHCLKGFTLNPDKKTCRSLPFFPSGINYCALNKPGCEHECVNMEESYYCRCHRGYTLDPNGKTCSRVDHCAQQDHGCEQLCLNTEDSFVCQCSEGFLINEDLKTCSRVDYCLLS

SEQ ID NO: 8335 - protein, 720 aa, Homo sapiens
  SITE 1: note = misc_feature - Xaa can be any naturally occurring amino acid
XAEVAAKARDTGILIFAIGVGQVDFNTLKSIGSEPHEDHVFLVANFSQIETLTSVFQKKLCTAHMCSTLEHNCAHFCINIPGSYVCRCKQGYILNSDQTTCRTVDYCASENHGCEHECVNADGSYLCQCHEGFALNPDKKTCTKIDYCASSNHGCQHECVNTDDSYSCHCLKGFTLNPDKKTCRRINYCALNKPGCEHECVNMEESYYCRCHRGYTLDPNGKTCSRVDHCAQQDHGCEQLCLNTEDSFVCQCSEGFLINEDLKTCSRVDYCLLSDHGCEYSCVNMDRSFACQCPEGHVLRSDGKTCAKLDSCALGDHGCEHSCVSSEDSFVCQCFEGYILREDGKTCRRKDVCQAIDHGCEHICVNSDDSYTCECLEGFRLAEDGKRCRRKDVCKSTHHGCEHICVNNGNSYICKCSEGFVLAEDGRRCKKCTEGPIDLVFVIDGSKSLGEENFEVVKQFVTGIIDSLTISPKAARVGLLQYSTQVHTEFTLRNFNSAKDMKKAVAHMKYMGKGSMTGLALKHMFERSFTQGEGARPLSTRVPRAAIVFTDGRAQDDVSEWASKAKANGITMYAVGVGKAIEEELQEIASEPTNKHLFYAEDFSTMDEISEKLKKGICEALEDSDGRQDSPAGELPKTVQQPTVQHRYLFEEDNLLRSTQKLSHSTKPSGSPLEEKHDQCKCENLIMFQNLANEEVRKLTQRLEEMTQRMEALENRLRYR

SEQ ID NO: 8336 - protein, 183 aa, Homo sapiens
  SITE 1: note = misc_feature - Xaa can be any naturally occurring amino acid
XDSCALGDHGCEHSCVSSEDSFVCQCFEGYILREDGKTCRRKDVCQAIDHGCEHICVNSDDSYTCECLEGFRLAEDGKRCRKCTEGPIDLVFVIDGSKSLGEENFEVVKQFVTGIIDSLTISPKAARVGLLQYSTQVHTEFTLRNFNSAKDMKKAVAHMKYMGKGSMTGLALKHMFERSFTQG

SEQ ID NO: 8337 - protein, 131 aa, Homo sapiens
  SITE 1: note = misc_feature - Xaa can be any naturally occurring amino acid
XEDSDGRQDSPAGELPKTVQQPTESEPVTINIQDLLSCSNFAVQHRYLFEEDNLLRSTQKLSHSTKPSGSPLEEKHDQCKCENLIMFQNLANEEVRKLTQRYILFLHYASVWNAKNIIKTSHTLCRFYQLK

SEQ ID NO: 8338 - protein, 176 aa, Homo sapiens
  SITE 1: note = misc_feature - Xaa can be any naturally occurring amino acid
XFTQGEGARPLSTRVPRAAIVFTDGRAQDDVSEWASKAKANGITMYAVGVGKAIEEELQEIASEPTNKHLFYAEDFSTMDEISEKLKKGICEALEDSDGRQDSPAGELPKTVQQPTVQHRYLFEEDNLLRSTQKLSHSTKPSGSPLEEKHDQCKCENLIMFQNLANEEQRSSLSAL

SEQ ID NO: 8339 - protein, 181 aa, Homo sapiens
  SITE 1: note = misc_feature - Xaa can be any naturally occurring amino acid
XSIGSEPHEDHVFLVANFSQIETLTSVFQKKLCIQDLCAMEDHNCEQLCVNVPGSFVCQCYSGYALAEDGKRCVAVDYCASENHGCEHECVNADGSYLCQCHEGFALNPDKKTCTKIDYCASSNHGCQHECVNTDDSYSCHCLKGFTLNPDKKTCRRINYCALNKPGCEHECVNMEESYYC

SEQ ID NO: 8340 - protein, 155 aa, Homo sapiens
  SITE 1: note = misc_feature - Xaa can be any naturally occurring amino acid
XVDYCLLSDHGCEYSCVNMDRSFACQCPEGHVLRSDGKTCAKLDSCALGDHGCEHSCVSSEDSFVCQCFEGYILREDGKTCRRKDVCQAIDHGCEHICVNSDDSYTCECLEGFRLAEDGKRCRSKMSANQPTMAANTFVLIMGIPTSANAQRDLF

SEQ ID NO: 8341 - protein, 444 aa, Homo sapiens
MPRPAPARRLPGLLLLLWPLLLLPSAAPDPVARPGFRRLETRGPGGSPGRRPSPAAPDGAPASGTSEPGRARGAGVCKSRPLDLVFIIDSSRSVRPLEFTKVKTFVSRIIDTLDIGPADTRVAVVNYASTVKIEFQLQAYTDKQSLKQAVGRITPLSTGTMSGLAIQTAMDEAFTVEAGAREPSSNIPKVAIIVTDGRPQDQVNEVAARAQASGIELYAVGVDRADMASLKMMASEPLEEHVFYVETYGVIEKLSSRFQETFCALDRCALNTHGCEHICVNDRSGSYHCECYEGYTLNEDRKTCSAQDKCALGTHGCQHICVNDRTGSHHCECYEGYTLNADKKTCSVRDKCALGSHGCQHICVSDGAASYHCDCYPGYTLNEDKKTCSATEEARRLVSTEDACGCEATLAFQDKVSSYLQRLNTKLDDILEKLKINEYGQIHR

SEQ ID NO: 8342 - protein, 486 aa, Homo sapiens
MPRPAPARRLPGLLLLLWPLLLLPSAAPDPVARPGFRRLETRGPGGSPGRRPSPAAPDGAPASGTSEPGRARGAGVCKSRPLDLVFIIDSSRSVRPLEFTKVKTFVSRIIDTLDIGPADTRVAVVNYASTVKIEFQLQAYTDKQSLKQAVGRITPLSTGTMSGLAIQTAMDEAFTVEAGAREPSSNIPKVAIIVTDGRPQDQVNEVAARAQASGIELYAVGVDRADMASLKMMASEPLEEHVFYVETYGVIEKLSSRFQETFCALDPCVLGTHQCQHVCISDGEGKHHCECSQGYTLNADKKTCSALDRCALNTHGCEHICVNDRSGSYHCECYEGYTLNEDRKTCSAQDKCALGTHGCQHICVNDRTGSHHCECYEGYTLNADKKTCSVRDKCALGSHGCQHICVSDGAASYHCDCYPGYTLNEDKKTCSATEEARRLVSTEDACGCEATLAFQDKVSSYLQRLNTKLDDILEKLKINEYGQIHR

SEQ ID NO: 8343 - protein, 581 aa, Homo sapiens
MRGLLCWPVLLLLLQPWETQLQLTGPRCHTGPLDLVFVIDSSRSVRPFEFETMRQFLMGLLRGLNVGPNATRVGVIQYSSQVQSVFPLRAFSRREDMERAIRDLVPLAQGTMTGLAIQYAMNVAFSVAEGARPPEERVPRVAVIVTDGRPQDRVAEVAAQARARGIEIYAVGVQRADVGSLRAMASPPLDEHVFLVESFDLIQEFGLQFQSRLCAIDLCAEGTHGCEHHCVNSPGSYFCHCQVGFVLQQDQRSCRAIDYCSFGNHSCQHECVSTPGGPRCHCREGHDLQPDGRSCQVRDLCNGVDHGCEFQCVSEGLSYRCLCPEGRQLQADGKSCNRCREGHVDLVLLVDGSKSVRPQNFELVKRFVNQIVDFLDVSPEGTRVGLVQFSSRVRTEFPLGRYGTAAEVKQAVLAVEYMERGTMTGLALRHMVEHSFSEAQGARPRALNVPRVGLVFTDGRSQDDISVWAARAKEEGIVMYAVGVGKAVEAELREIASEPAELHVSYAPDFGTMTHLLENLRGSICPEEGISAGTELRSPCECESLVEFQGRTLGALESLTLNLAQLTARLEDLENQLANQK

SEQ ID NO: 8344 - protein, 581 aa, Homo sapiens; identical to SEQ ID NO: 8343

SEQ ID NO: 8345 - protein, 540 aa, Homo sapiens
MRGLLCWPVLLLLLQPWETQLQLTGPRCHTGPLDLVFVIDSSRSVRPFEFETMRQFLMGLLRGLNVGPNATRVGVIQYSSQVQSVFPLRAFSRREDMERAIRDLVPLAQGTMTGLAIQYAMNVAFSVAEGARPPEERVPRVAVIVTDGRPQDRVAEVAAQARARGIEIYAVGVQRADVGSLRAMASPPLDEHVFLVESFDLIQEFGLQFQSRLCAIDYCSFGNHSCQHECVSTPGGPRCHCREGHDLQPDGRSCQVRDLCNGVDHGCEFQCVSEGLSYRCLCPEGRQLQADGKSCNRCREGHVDLVLLVDGSKSVRPQNFELVKRFVNQIVDFLDVSPEGTRVGLVQFSSRVRTEFPLGRYGTAAEVKQAVLAVEYMERGTMTGLALRHMVEHSFSEAQGARPRALNVPRVGLVFTDGRSQDDISVWAARAKEEGIVMYAVGVGKAVEAELREIASEPAELHVSYAPDFGTMTHLLENLRGSICPEEGISAGTELRSPCECESLVEFQGRTLGALESLTLNLAQLTARLEDLENQLANQK

SEQ ID NO: 8346 - protein, 622 aa, Homo sapiens
MRGLLCWPVLLLLLQPWETQLQLTGPRCHTGPLDLVFVIDSSRSVRPFEFETMRQFLMGLLRGLNVGPNATRVGVIQYSSQVQSVFPLRAFSRREDMERAIRDLVPLAQGTMTGLAIQYAMNVAFSVAEGARPPEERVPRVAVIVTDGRPQDRVAEVAAQARARGIEIYAVGVQRADVGSLRAMASPPLDEHVFLVESFDLIQEFGLQFQSRLCGKDQCAEGGHGCQHQCVNAWAMFHCTCNPGYKLAADNKSCLAIDLCAEGTHGCEHHCVNSPGSYFCHCQVGFVLQQDQRSCRAIDYCSFGNHSCQHECVSTPGGPRCHCREGHDLQPDGRSCQVRDLCNGVDHGCEFQCVSEGLSYRCLCPEGRQLQADGKSCNRCREGHVDLVLLVDGSKSVRPQNFELVKRFVNQIVDFLDVSPEGTRVGLVQFSSRVRTEFPLGRYGTAAEVKQAVLAVEYMERGTMTGLALRHMVEHSFSEAQGARPRALNVPRVGLVFTDGRSQDDISVWAARAKEEGIVMYAVGVGKAVEAELREIASEPAELHVSYAPDFGTMTHLLENLRGSICPEEGISAGTELRSPCECESLVEFQGRTLGALESLTLNLAQLTARLEDLENQLANQK

SEQ ID NO: 8347 - protein, 499 aa, Homo sapiens
MRGLLCWPVLLLLLQPWETQLQLTGPRCHTGPLDLVFVIDSSRSVRPFEFETMRQFLMGLLRGLNVGPNATRVGVIQYSSQVQSVFPLRAFSRREDMERAIRDLVPLAQGTMTGLAIQYAMNVAFSVAEGARPPEERVPRVAVIVTDGRPQDRVAEVAAQARARGIEIYAVGVQRADVGSLRAMASPPLDEHVFLVESFDLIQEFGLQFQSRLCVRDLCNGVDHGCEFQCVSEGLSYRCLCPEGRQLQADGKSCNRCREGHVDLVLLVDGSKSVRPQNFELVKRFVNQIVDFLDVSPEGTRVGLVQFSSRVRTEFPLGRYGTAAEVKQAVLAVEYMERGTMTGLALRHMVEHSFSEAQGARPRALNVPRVGLVFTDGRSQDDISVWAARAKEEGIVMYAVGVGKAVEAELREIASEPAELHVSYAPDFGTMTHLLENLRGSICPEEGISAGTELRSPCECESLVEFQGRTLGALESLTLNLAQLTARLEDLENQLANQK

SEQ ID NO: 8348 - protein, 121 aa, Homo sapiens
MDFQRGKNLRYQLLQLVEPFGVISNHLILNKINEAFIEMATTEDAQAAVDYYTTTPALVFGKPVRVHLSQKYKRIKKPEGKPDQKFDQKQELGRVIHLSNLPHSGYSDSAVLKLAEPYGKI

SEQ ID NO: 8349 - protein, 6 aa, Homo sapiens
MGDPFM

SEQ ID NO: 8350 - protein, 25 aa, Homo sapiens
MGDPFMLQQSTNPAPGILGPPPPSF

SEQ ID NO: 8351 - protein, 81 aa, Homo sapiens
MGDPFMLQQSTNPAPGILGPPPPSFHLGGPAVGPRGNLGAGNGNLQGPRHMQKGRVETSRVVHIMDFQRGKNLRYQLLQLV

SEQ ID NO: 8352 - protein, 86 aa, Homo sapiens
MGDPFMLQQSTNPAPGILGPPPPSFHLGGPAVGPRGNLGAGNGNLQGPRHMQKGRVETSRVVHIMDFQRGKNLRYQLLQLVEPFGV

SEQ ID NO: 8353 - protein, 109 aa, Homo sapiens
MGDPFMLQQSTNPAPGILGPPPPSFHLGGPAVGPRGNLGAGNGNLQGPRHMQKGRVETSRVVHIMDFQRGKNLRYQLLQLVEPFGVISNHLILNKINEAFIEMATTEDA

SEQ ID NO: 8354 - protein, 125 aa, Homo sapiens
MGDPFMLQQSTNPAPGILGPPPPSFHLGGPAVGPRGNLGAGNGNLQGPRHMQKGRVETSRVVHIMDFQRGKNLRYQLLQLVEPFGVISNHLILNKINEAFIEMATTEDAQAAVDYYTTTPALVFG

SEQ ID NO: 8355 - protein, 509 aa, Homo sapiens
MGDPFMLQQSTNPAPGILGPPPPSFHLGGPAVGPRGNLGAGNGNLQGPRHMQKGRVETSRVVHIMDFQRGKNLRYQLLQLVEPFGVISNHLILNKINEAFIEMATTEDAQAAVDYYTTTPALVFGKPVRVHLSQKYKRIKKPEGKPDQKFDQKQELGRVIHLSNLPHSGYSDSAVLKLAEPYGKIKNYILMRMKSQAFIEMETREDAMAMVDHCLKKALWFQGRCVKVDLSEKYKKLVLRIPNRGIDLLKKDKSRKRSYSPDGKESPSDKKSKTDGSQKTESSTEGKEQEEKSGEDGEKDTKDDQTEQEPNMLLESEDELLVDEEEAAALLESGSSVGDETDLANLGDVASDGKKEPSDKAVKKDGSASAAAKKKLKKVDKIEELDQENEAALENGIKNEENTEPGAESSENADDPNKDTSENADGQSDENKDDYTIPDEYRIGPYQPNVPVGIDYVIPKTGFYCKLCSLFYTNEEVAKNTHCSSLPHYQKLKKFLNKLAEERRQKKET

SEQ ID NO: 8356 - protein, 509 aa, Homo sapiens; identical to SEQ ID NO: 8355

SEQ ID NO: 8357 - protein, 559 aa, Homo sapiens
MLGAQWRRNQPSRAAEEWSQHINGASHSRRCQLLLEIYPEWNPDNDTGHTMGDPFMLQQSTNPAPGILGPPPPSFHLGGPAVGPRGNLGAGNGNLQGPRHMQKGRVETSRVVHIMDFQRGKNLRYQLLQLVEPFGVISNHLILNKINEAFIEMATTEDAQAAVDYYTTTPALVFGKPVRVHLSQKYKRIKKPEGKPDQKFDQKQELGRVIHLSNLPHSGYSDSAVLKLAEPYGKIKNYILMRMKSQAFIEMETREDAMAMVDHCLKKALWFQGRCVKVDLSEKYKKLVLRIPNRGIDLLKKDKSRKRSYSPDGKESPSDKKSKTDGSQKTESSTEGKEQEEKSGEDGEKDTKDDQTEQEPNMLLESEDELLVDEEEAAALLESGSSVGDETDLANLGDVASDGKKEPSDKAVKKDGSASAAAKKKLKKVDKIEELDQENEAALENGIKNEENTEPGAESSENADDPNKDTSENADGQSDENKDDYTIPDEYRIGPYQPNVPVGIDYVIPKTGFYCKLCSLFYTNEEVAKNTHCSSLPHYQKLKKFLNKLAEERRQKKET

SEQ ID NO: 8358 - protein, 172 aa, Homo sapiens
MLGAQWRRNQPSRAAEVSGPGGKHAAGQGPRVRREILGEEEWSQHINGASHSRRCQLLLEIYPEWNPDNDTGHTMGDPFMLQQSTNPAPGILGPPPPSFHLGGPAVGPRGNLGAGNGNLQGPRHMQKGRVETSRVVHIMDFQRGKNLRYQLLQLVEPFGVISNHLILNKINE

SEQ ID NO: 8359 - protein, 283 aa, Homo sapiens
MSKSFQQSSLSRDSQGHGRDLSAAGIGLLAAATQSLSMLLESEDELLVDEEEAAALLESGSSVGDETDLANLGDVASDGKKEPSDKAVKKDGSASAAAKKKLKKRRFPGSMEGFVTLDEVGDEEDSELQKLRKSGMAFKSGDKNDDGLVEIKVDKIEELDQENEAALENGIKNEENTEPGAESSENADDPNKDTSENADGQSDENKDDYTIPDEYRIGPYQPNVPVGIDYVIPKTGFYCKLCSLFYTNEEVAKNTHCSSLPHYQKLKKFLNKLAEERRQKKET

SEQ ID NO: 8360 - protein, 47 aa, Homo sapiens
MSKSFQQSSLSRDSQGHGRDLSAAGIGLLAAATQSLSMPASLGRMNQ

SEQ ID NO: 8361 - protein, 78 aa, Homo sapiens
MSKSFQQSSLSRDSQGHGRDLSAAGIGLLAAATQSLSMPASLGRMNQGTARLASLMNLGMSSSLNQQGAHSALSSAST

SEQ ID NO: 8362 - protein, 78 aa, Homo sapiens; identical to SEQ ID NO: 8361

SEQ ID NO: 8363 - protein, 87 aa, Homo sapiens
MSKSFQQSSLSRDSQGHGRDLSAAGIGLLAAATQSLSMPASLGRMNQGTARLASLMNLGMSSSLNQQGAHSALSSASTSSHNLQSIF

SEQ ID NO: 8364 - protein, 99 aa, Homo sapiens
MSKSFQQSSLSRDSQGHGRDLSAAGIGLLAAATQSLSMPASLGRMNQGTARLASLMNLGMSSSLNQQGAHSALSSASTSSHNLQSIFNIGSRGPLPLSS

SEQ ID NO: 8365 - protein, 100 aa, Homo sapiens
MSKSFQQSSLSRDSQGHGRDLSAAGIGLLAAATQSLSMPASLGRMNQGTARLASLMNLGMSSSLNQQGAHSALSSASTSSHNLQSIFNIGSRGPLPLSSQ

SEQ ID NO: 8366 - protein, 107 aa, Homo sapiens
MSKSFQQSSLSRDSQGHGRDLSAAGIGLLAAATQSLSMPASLGRMNQGTARLASLMNLGMSSSLNQQGAHSALSSASTSSHNLQSIFNIGSRGPLPLSSQHRGDADQ

SEQ ID NO: 8367 - protein, 847 aa, Homo sapiens
MSKSFQQSSLSRDSQGHGRDLSAAGIGLLAAATQSLSMPASLGRMNQGTARLASLMNLGMSSSLNQQGAHSALSSASTSSHNLQSIFNIGSRGPLPLSSQHRGDADQASNILASFGLSARDLDELSRYPEDKITPENLPQILLQLKRRRTEEGPTLSYGRDGRSATREPPYRVPRDDWEEKRHFRRDSFDDRGPSLNPVLDYDHGSRSQESGYYDRMDYEDDRLRDGERCRDDSFFGETSHNYHKFDSEYERMGRGPGPLQERSLFEKKRGAPPSSNIEDFHGLLPKGYPHLCSICDLPVHSNKEWSQHINGASHSRRCQLLLEIYPEWNPDNDTGHTMGDPFMLQQSTNPAPGILGPPPPSFHLGGPAVGPRGNLGAGNGNLQGPRHMQKGRVETSRVVHIMDFQRGKNLRYQLLQLVEPFGVISNHLILNKINEAFIEMATTEDAQAAVDYYTTTPALVFGKPVRVHLSQKYKRIKKPEGKPDQKFDQKQELGRVIHLSNLPHSGYSDSAVLKLAEPYGKIKNYILMRMKSQAFIEMETREDAMAMVDHCLKKALWFQGRCVKVDLSEKYKKLVLRIPNRGIDLLKKDKSRKRSYSPDGKESPSDKKSKTDGSQKTESSTEGKEQEEKSGEDGEKDTKDDQTEQEPNMLLESEDELLVDEEEAAALLESGSSVGDETDLANLGDVASDGKKEPSDKAVKKDGSASAAAKKKLKKVDKIEELDQENEAALENGIKNEENTEPGAESSENADDPNKDTSENADGQSDENKDDYTIPDEYRIGPYQPNVPVGIDYVIPKTGFYCKLCSLFYTNEEVAKNTHCSSLPHYQKLKKFLNKLAEERRQKKET

SEQ ID NO: 8368 - protein, 895 aa, Homo sapiens
MSKSFQQSSLSRDSQGHGRDLSAAGIGLLAAATQSLSMPASLGRMNQGTARLASLMNLGMSSSLNQQGAHSALSSASTSSHNLQSIFNIGSRGPLPLSSQHRGDADQASNILASFGLSARDLDELSRYPEDKITPENLPQILLQLKRRRTEEGPTLSYGRDGRSATREPPYRVPRDDWEEKRHFRRDSFDDRGPSLNPVLDYDHGSRSQESGYYDRMDYEDDRLRDGERCRDDSFFGETSHNYHKFDSEYERMGRGPGPLQERSLFEKKRGAPPSSNIEDFHGLLPKGYPHLCSICDLPVHSNKEWSQHINGASHSRRCQLLLEIYPEWNPDNDTGHTMGDPFMLQQSTNPAPGILGPPPPSFHLGGPAVGPRGNLGAGNGNLQGPRHMQKGRVETSRVVHIMDFQRGKNLRYQLLQLVEPFGVISNHLILNKINEAFIEMATTEDAQAAVDYYTTTPALVFGKPVRVHLSQKYKRIKKPEGKPDQKFDQKQELGRVIHLSNLPHSGYSDSAVLKLAEPYGKIKNYILMRMKSQAFIEMETREDAMAMVDHCLKKALWFQGRCVKVDLSEKYKKLVLRIPNRGIDLLKKDKSRKRSYSPDGKESPSDKKSKTDGSQKTESSTEGKEQEEKSGEDGEKDTKDDQTEQEPNMLLESEDELLVDEEEAAALLESGSSVGDETDLANLGDVASDGKKEPSDKAVKKDGSASAAAKKKLKKRRFPGSMEGFVTLDEVGDEEDSELQKLRKSGMAFKSGDKNDDGLVEIKVDKIEELDQENEAALENGIKNEENTEPGAESSENADDPNKDTSENADGQSDENKDDYTIPDEYRIGPYQPNVPVGIDYVIPKTGFYCKLCSLFYTNEEVAKNTHCSSLPHYQKLKKFLNKLAEERRQKKET

SEQ ID NO: 8369 - protein, 847 aa, Homo sapiens; identical to SEQ ID NO: 8367

SEQ ID NO: 8370 - protein, 895 aa, Homo sapiens; identical to SEQ ID NO: 8368

SEQ ID NO: 8371 - protein, 847 aa, Homo sapiens; identical to SEQ ID NO: 8367

SEQ ID NO: 8372 - protein, 794 aa, Homo sapiens
MSKSFQQSSLSRDSQGHGRDLSAAGIGLLAAATQSLSMPASLGRMNQGTARLASLMNLGMSSSLNQQGAHSALSSASTSSHNLQSIFNIGSRGPLPLSSQHRGDADQASNILASFGLSARDLDELSRYPEDKITPENLPQILLQLKRRRTEEGPTLSYGRDGRSATREPPYRVPRDDWEEKRHFRRDSFDDRGPSLNPVLDYDHGSRSQESGYYDRMDYEDDRLRDGERCRDDSFFGETSHNYHKFDSEYERMGRGPGPLQERSLFEKKRGAPPSSNIEDFHGLLPKGYPHLCSICDLPVHSNKEWSQHINGASHSRRCQLLLEIYPEWNPDNDTGHTMGDPFMLQQSTNPAPGILGPPPPSFHLGGPAVGPRGNLGAGNGNLQGPRHMQKGRVETSRVVHIMDFQRGKNLRYQLLQLVEPFGVISNHLILNKINEAFIEMATTEDAQAAVDYYTTTPALVFGKPVRVHLSQKYKRIKKPEGKPDQKFDQKQELGRVIHLSNLPHSGYSDSAVLKLAEPYGKIKNYILMRMKSQAFIEMETREDAMAMVDHCLKKALWFQGRCVKVDLSEKYKKLVLRIPNRGIDLLKKDKSRKRSYSPDGKESPSDKKSKTDGSQKTESSTEGKEQEEKSGEDGEKDTKDDQTEQEPNMLLESEDELLVDEEEAAALLESGSSVGDETDLANLGDVASDGKKEPSDKAVKKDGSASAAAKKKLKKVDKIEELDQENEAALENGIKNEENTEPGAESSENADDPNKDTSENADGQSDENKDDYTIPDEYRIGPYQPNVPVEISE

SEQ ID NO: 8373 - protein, 433 aa, Homo sapiens
MSKSFQQSSLSRDSQGHGRDLSAAGIGLLAAATQSLSMPASLGRMNQGTARLASLMNLGMSSSLNQQGAHSALSSASTSSHNLQSIFNIGSRGPLPLSSQHRGDADQASNILASFGLSARDLDELSRYPEDKITPENLPQILLQLKRRRTEEGPTLSYGRDGRSATREPPYRVPRDDWEEKRHFRRDSFDDRGPSLNPVLDYDHGSRSQESGYYDRMDYEDDRLRDGERCRDDSFFGETSHNYHKFDSEYERMGRGPGPLQERSLFEKKRGAPPSSNIEDFHGLLPKGYPHLCSICDLPVHSNKEWSQHINGASHSRRCQLLLEIYPEWNPDNDTGHTMGDPFMLQQSTNPAPGILGPPPPSFHLGGPAVGPRGNLGAGNGNLQGPRHMQKGRVETSRVVHIMDFQRGKNLRYQLLQLVEPFGVISNHLILNK

SEQ ID NO: 8374 - protein, 847 aa, Homo sapiens; identical to SEQ ID NO: 8367

SEQ ID NO: 8375 - protein, 334 aa, Homo sapiens
  SITE 1: note = misc_feature - Xaa can be any naturally occurring amino acid
XERCRDDSFFGETSHNYHKFDSEYERMGRGPGPLQERSLFEKKRGAPPSSNIEDFHGLLPKGYPHLCSICDLPVHSNKEWSQHINGASHSRRCQLLLEMGDPFMLQQSTNPAPGILGPPPPSFHLGGPAVGPRGNLGAGNGNLQGPRHMQKGRVETSRVVHIMDFQRGKNLRYQLLQLVEPFGVISNHLILNKINEAFIEMATTEDAQAAVDYYTTTPALVFGKPVRVHLSQKYKRIKKPEGKPDQKFDQKQELGRVIHLSNLPHSGYSDSAVLKLAEPYGKIKNYILMRMKSQAFIEMETREDAMAMVDHCLKKALWFQGRCVKVDLSEKYKK

SEQ ID NO: 8376 - protein, 235 aa, Homo sapiens
AIQISQQTPYWHCRLLFQLAQLHTLEKDLVSACDLLGVGAEYARVVGSEYTRALFLLSKGMLLLMERKLQEVHPLLTLCGQIVENWQGNPIQKESLRVFFLVLQVTHYLDAGQVKSVKPCLKQLQQCIQTISTLHDDEILPSNPADLFHWLPKEHMCVLVYLVTVMHSMQAGYLEKAQKYTDKALMQLEKLKSKSVLDCSPILSSFQVILLEHIIMCRLVTGHKATALQEISQVC

SEQ ID NO: 8377 - protein, 183 aa, Homo sapiens
KIRLCVHCLQAVFPFKPPQRIEARTHLQLGSVLYHHTKNSEQARSHLEKANSVDAAKPLLRKAIQISQQTPYWHCRLLFQLAQLHTLEKDLVSACDLLGVGAEYARVVGSEYTRALFLLSKGMLLLMERKLQEVHPLLTLCGQIVENWQGNPIQKESLRVFFLVLQVTHYLDAGQVKSVKPCL

SEQ ID NO: 8378 - protein, 613 aa, Homo sapiens
MAAQAAAAAQAAAAQAAQAEAADSWYLALLGFAEHFRTSSPPKIRLCVHCLQAVFPFKPPQRIEARTHLQLGSVLYHHTKNSEQARSHLEKAWLISQQIPQFEDVKFEAASLLSELYCQENSVDAAKPLLRKAIQISQQTPYWHCRLLFQLAQLHTLEKDLVSACDLLGVGAEYARVVGSEYTRALFLLSKGMLLLMERKLQEVHPLLTLCGQIVENWQGNPIQKESLRVFFLVLQVTHYLDAGQVKSVKPCLKQLQQCIQTISTLHDDEILPSNPADLFHWLPKEHMCVLVYLVTVMHSMQAGYLEKAQKYTDKALMQLEKLKMLDCSPILSSFQVILLEHIIMCRLVTGHKATALQEISQVCQLCQQSPRLFSNHAAQLHTLLGLYCVSVNCMDNAEAQFTTALRLTNHQELWAFIVTNLASVYIREGNRHQEVLYSLLERINPDHSFPVSSHCLRAAAFYVRGLFSFFQGRYNEAKRFLRETLKMSNAEDLNRLTACSLVLLGHIFYVLGNHRESNNMVVPAMQLASKIPDMSVQLWSSALLRDLNKACGNAMDAHEAAQMHQNFSQQLLQDHIEACSLPEHNLITWTDGPPPVQFQAQNGPNTSLASLL

SEQ ID NO: 8379 - protein, 202 aa, Homo sapiens
AGAGGGAAAVAAGGVVTTTASGKRIRKNHACEMCGKAFRDVYHLNRHKLSHSDEKPYQCPVCQQRFKRKDRMSYHVRSHDGAVHKPYNCSHCGKSFSRPDHLNSHVRQVHSTERPFKCEKCEAAFATKDRLRAHTVRHEEKVPCHVCGKMLSSAYISDHMKVHSQGPHHVCELCNKGTCRGLPGGPGAEGGRLARRLATDTG

SEQ ID NO: 8380 - protein, 454 aa, Homo sapiens
MDPSNWSSFIFQGHAQNPLQVGAELQSRFFASQGCAQSPFQAAPAPPPTPQAPAAEPLQVDLLPVLAAAQESAAAAAAAAAAAAAVAAAPPAPAAASTVDTAALKQPPAPPPPPPPVSAPAAEAAPPASAATIAAAAATAVVAPTSTVAVAPVASALEKKTKSKGPYICALCAKEFKNGYNLRRHEAIHTGAKAGRVPSGAMKMPTMVPLSLLSVPQLSGAGGGGGEAGAGGGAAAVAAGGVVTTTASGKRIRKNHACEMCGKAFRDVYHLNRHKLSHSDEKPYQCPVCQQRFKRKDRMSYHVRSHDGAVHKPYNCSHCGKSFSRPDHLNSHVRQVHSTERPFKCEKCEAAFATKDRLRAHTVRHEEKVPCHVCGKMLSSAYISDHMKVHSQGPHHVCELCNKGTGEVCPMAAAAAAAAAAAAAAVAAPPTAVGSLSGAEGVPVSSQPLPSQPW

SEQ ID NO: 8381 - protein, 184 aa, Homo sapiens
MFPVFPCTLLAPPFPVLGLDSRGVGGLMNSFPPPQGHAQNPLQVGAELQSRFFASQGCAQSPFQAAPAPPPTPQAPAAEPLQVDLLPVLAAAQDGGSGSSGSSSSPSHSCGLPLGGGGGACELSATSLPTLVSSKLVAGERGEWSRVPWYKLLSPLFSHQLLFPYQPRSLQKERRKKCFLRGIR

SEQ ID NO: 8382 - protein, 186 aa, Homo sapiens
MFPVFPCTLLAPPFPVLGLDSRGVGGLMNSFPPPQGHAQNPLQVGAELQSRFFASQGCAQSPFQAAPAPPPTPQAPAAEPLQVDLLPVLAAAQDGSGGSGSSGSSSSPSHSCGLPLGGGGGACELSATSLPTLVSSKLVAGERGEWSRVPWYKLLSPLFSHQLLFPYQPRSLQKERRKKCFLRGIR

SEQ ID NO: 8383 - protein, 493 aa, Homo sapiens
MFPVFPCTLLAPPFPVLGLDSRGVGGLMNSFPPPQGHAQNPLQVGAELQSRFFASQGCAQSPFQAAPAPPPTPQAPAAEPLQVDLLPVLAAAQESAAAAAAAAAAAAAVAAAPPAPAAASTVDTAALKQPPAPPPPPPPVSAPAAEAAPPASAATIAAAAATAVVAPTSTVAVAPVASALEKKTKSKGPYICALCAKEFKNGYNLRRHEAIHTGAKAGRVPSGAMKMPTMVPLSLLSVPQLSGAGGGGGEAGAGGGAAAVAAGGVVTTTASGKRIRKNHACEMCGKAFRDVYHLNRHKLSHSDEKPYQCPVCQQRFKRKDRMSYHVRSHDGAVHKPYNCSHCGKSFSRPDHLNSHVRQVHSTERPFKCEKCEAAFATKDRLRAHTVRHEEKVPCHVCGKMLSSAYISDHMKVHSQGPHHVCELCNKGFTTAAYLRIHAVKDHGLQAPRADRILCKLCSVHCKTPAQLAGHMQTHLGGAAPPVPGDAPQPQPTC

SEQ ID NO: 8384 - protein, 477 aa, Homo sapiens
MFPVFPCTLLAPPFPVLGLDSRGVGGLMNSFPPPQGHAQNPLQVGAELQSRFFASQGCAQSPFQAAPAPPPTPQAPAAEPLQVDLLPVLAAAQESAAAAAAAAAAAAAVAAAPPAPAAASTVDTAALKQPPAPPPPPPPVSAPAAEAAPPASAATIAAAAATAVVAPTSTVAVAPVASALEKKTKSKGPYICALCAKEFKNGYNLRRHEAIHTGAKAGRVPSGAMKMPTMVPLSLLSVPQLSGAGGGGGEAGAGGGAAAVAAGGVVTTTASGKRIRKNHACEMCGKAFRDVYHLNRHKLSHSDEKPYQCPVCQQRFKRKDRMSYHVRSHDGAVHKPYNCSHCGKSFSRPDHLNSHVRQVHSTERPFKCEKCEAAFATKDRLRAHTVRHEEKVPCHVCGKMLSSAYISDHMKVHSQGPHHVCELCNKGTGEVCPMAAAAAAAAAAAAAAVAAPPTAVGSLSGAEGVPVSSQPLPSQPW

SEQ ID NO: 8385 - protein, 84 aa, Homo sapiens
MFPVFPCTLLAPPFPVLGLDSRGVGGLMNSFPPPQGHAQNPLQVGAELQSRFFASQGCAQSPFQAGSPQQSRQTSALNRTALQM

SEQ ID NO: 8386 - protein, 172 aa, Homo sapiens
MFPVFPCTLLAPPFPVLGLDSRGVGGLMNSFPPPQGHAQNPLQVGAELQSRFFASQGCAQSPFQKCEAAFATKDRLRAHTVRHEEKVPCHVCGKMLSSAYISDHMKVHSQGPHHVCELCNKGTGEVCPMAAAAAAAAAAAAAAVAAPPTAVGSLSGAEGVPVSSQPLPSQPW

SEQ ID NO: 8387 - protein, 252 aa, Homo sapiens [sequence omitted]

SEQ ID NO: 8388 - protein, 79 aa, Homo sapiens
MLSSAYISDHMKVHSQGPHHVCELCNKGFTTAAYLRIHAVKDHGLQAPRADRILCKLCSVHCKTPAQLAGHMQTHLGGA

SEQ ID NO: 8389 - protein, 94 aa, Homo sapiens
MLSSAYISDHMKVHSQGPHHVCELCNKGFTTAAYLRIHAVKDHGLQAPRADRILCKLCSVHCKTPAQLAGHMQTHLGGAAPPVPGDAPQPQPTC

SEQ ID NO: 8390 - protein, 53 aa, Homo sapiens
MLSSAYISDHMKVHSQGPHHVCELCNKGTCRGLPGGPGAEGGRLARRLATDTG

SEQ ID NO: 8391 - protein, 78 aa, Homo sapiens
MLSSAYISDHMKVHSQGPHHVCELCNKGTGEVCPMAAAAAAAAAAAAAAVAAPPTAVGSLSGAEGVPVSSQPLPSQPW

SEQ ID NO: 8392 - protein, 152 aa, Homo sapiens
SFSRCARGLGRPLGRGEGGTRRRPDHLNSHVRQVHSTERPFKCEKCEAAFATKDRLRAHTVRHEEKVPCHVCGKMLSSAYISDHMKVHSQGPHHVCELCNKGTGEVCPMAAAAAAAAAAAAAAVAAPPTAVGSLSGAEGVPVSSQPLPSQPW

SEQ ID NO: 8393 - protein, 196 aa, Homo sapiens
  SITE 1: note = misc_feature - Xaa can be any naturally occurring amino acid
XGAVHKPYNCSHCGKSFSRPDHLNSHVRQVHSTERPFKCEKCEAAFATKDRLRAHTVRHEEKVPCHVCGKMLSSAYISDHMKVHSQGPHHVCELCNKGTGEVCPMAAAAAAAAAAAAAAVAAPPTAVGSLSGAEGVPVSSQPLPSQPCSSPGLVFSSLFPTTEEVVALAMSSCSCVPCMYPTLHPFLLRGPHYNKF

SEQ ID NO: 8394 - protein, 177 aa, Homo sapiens [sequence omitted]

SEQ ID NO: 8395 - protein, 504 aa, Homo sapiens
GMGAGPACPLPPLAGGEAFPFPSPEQGLALSGAGFPGMLGALPLPLSLGQPPPSPLLNHSLFGVLTGGGGQPPPEPLLPPPGGPGPPLAPGEPEGPSLLVASLLPPPPSDLLPPPSAPPSNLLASFLPLLALGPTAGDGEGSAEGAGGPSGEPFSGLGDLSPLLFPPLSAPPTLIALNSALLAATLDPPSGTPPQPCVLSAPQPGPPTSSVTTATTDPGASSLGKAPSNSGRPPQLLSPLLGASLLGDLSSLTSSPGALPSLLQPPGPLLSGQLGLQLLPGGGAPPPLSEASSPLACLLQSLQIPPEQPEAPCLPPESPASALEPEPARPPLSALAPPHGSPDPPVPELLTGRGSGKRGRRGGGGLRGINGEARPARGRKPGSRREPGRLALKWGTRGGFNGQMERSPRRTHHWQHNGELAEGGAEPKDPPPPGPHSEDLKVPPGVVRKSRRGRRRKYNPTRNSNSSRQDITLEPSPTARAAVPLPPRARPGRPAKNKRRKLAP

SEQ ID NO: 8396 - protein, 47 aa, Homo sapiens
MNGGNESSGADRAGGPVATSVPIGWQRCVREGAVLYIRRICNLSTVL

SEQ ID NO: 8397 - protein, 45 aa, Homo sapiens
MNGGNESSGADRAGGPVATSVPIGWQRCVREGAVLYISPSGTELS

SEQ ID NO: 8398 - protein, 53 aa, Homo sapiens
MNGGNESSGADRAGGPVATSVPIGWQRCVREGAVLYISPSGTELSSLEQTRSY

SEQ ID NO: 8399 - protein, 53 aa, Homo sapiens; identical to SEQ ID NO: 8398

SEQ ID NO: 8400 - protein, 73 aa, Homo sapiens
MNGGNESSGADRAGGPVATSVPIGWQRCVREGAVLYISPSGTELSSLEQTRSYLLSDGTCKCGLECPLNVPKV

SEQ ID NO: 8401 - protein, 148 aa, Homo sapiens
MNGGNESSGADRAGGPVATSVPIGWQRCVREGAVLYISPSGTELSSLEQTRSYLLSDGTCKCGLECPLNVPKVFNFDPLAPVTPGGAGVGPASEEDMTKLCNHRRKAVAMATLYRSMETTCSHSSPGEGASPQMFHTVSPGPPSARPP

SEQ ID NO: 8402 - protein, 1003 aa, Homo sapiens
MNGGNESSGADRAGGPVATSVPIGWQRCVREGAVLYISPSGTELSSLEQTRSYLLSDGTCKCGLECPLNVPKVFNFDPLAPVTPGGAGVGPASEEDMTKLCNHRRKAVAMATLYRSMETTCSHSSPGEGASPQMFHTVSPGPPSARPPCRVPPTTPLNGGPGSLPPEPPSVSQAFPTLAGPGGLFPPRLADPVPSGGSSSPRFLPRGNAPSPAPPPPPAISLNAPSYNWGAALRSSLVPSDLGSPPAPHASSSPPSDPPLFHCSDALTPPPLPPSNNLPAHPGPASQPPVSSATMHLPLVLGPLGGAPTVEGPGAPPFLASSLLSAAAKAQHPPLPPPSTLQGRRPRAQAPSASHSSSLRPSQRRPRRPPTVFRLLEGRGPQTPRRSRPRAPAPVPQPFSLPEPSQPILPSVLSLLGLPTPGPSHSDGSFNLLGSDAHLPPPPTLSSGSPPQPRHPIQPSLPGTTSGSLSSVPGAPAPPAASKAPVVPSPVLQSPSEGLGMGAGPACPLPPLAGGEAFPFPSPEQGLALSGAGFPGMLGALPLPLSLGQPPPSPLLNHSLFGVLTGGGGQPPPEPLLPPPGGPGPPLAPGEPEGPSLLVASLLPPPPSDLLPPPSAPPSNLLASFLPLLALGPTAGDGEGSAEGAGGPSGEPFSGLGDLSPLLFPPLSAPPTLIALNSALLAATLDPPSGTPPQPCVLSAPQPGPPTSSVTTATTDPGASSLGKAPSNSGRPPQLLSPLLGASLLGDLSSLTSSPGALPSLLQPPGPLLSGQLGLQLLPGGGAPPPLSEASSPLACLLQSLQIPPEQPEAPCLPPESPASALEPEPARPPLSALAPPHGSPDPPVPELLTGRGSGKRGRRGGGGLRGINGEARPARGRKPGSRREPGRLALKWGTRGGFNGQMERSPRRTHHWQHNGELAEGGAEPKDPPPPGPHSEDLKVPPGVVRKSRRGRRRKYNPTRNSNSSRQDITLEPSPTARAAVPLPPRARPGRPAKNKRRKLAP

SEQ ID NO: 8403 - protein, 66 aa, Homo sapiens
MTKLCNHRRKAVAMATLYRSMETTCSHSSPGEGASPQMFHTVSPGPPSARPPCRVPPTTPLNGGPG

SEQ ID NO: 8404 - protein, 27 aa, Homo sapiens
  SITE 1: note = misc_feature - Xaa can be any naturally occurring amino acid
XARAAVPLPPRARPGRPAKNKRRKLAP

SEQ ID NO: 8405 - protein, 190 aa, Homo sapiens
  SITE 1: note = misc_feature - Xaa can be any naturally occurring amino acid
XLLSGQLGLQLLPGGGAPPPLSEASSPLACLLQSLQQIPPEQPEAPCLPPESPASALEPEPARPPLSALAPPHGSPDPPVPELLTGRGSGKRGRRGGGGLRGINGEARPARGRKPGSRREPGRLALKWGTRGGFNGQMERSPRRTHHWQHNGELAEGGAEPKDPPPPGPHSEDLKVPPGVVRKSRRGRRR

SEQ ID NO: 8406 - protein, 248 aa, Homo sapiens
MSLFPSLPLLLLSMVAASYSETVTCEDAQKTCPAVIACSSPGINGFPGKDGRDGTKGEKGEPGQGLRGLQGPPGKLGPPGNPGPSGSPGPKGQKGDPGKSPDGDSSLAASERKALQTEMARIKKWLTFSLGKQVGNKFFLTNGEIMTFEKVKALCVKFQASVATPRNAAENGAIQNLIKEEAFLGITDEKTEGQFVDLTGNRLTYTNWNEGEPNNAGSDEDCVLLLKNGQWNDVPCSTSHLAVCEFPI

SEQ ID NO: 8407 - protein, 90 aa, Homo sapiens
MAMLAQQMQLANAMMPGAPLQPVPMFSVAPSLATNASAAAFNPYLGPVSPSLVPAEILPTAPMLVTGNPGVPVPAAAAAAAQKLMRTDRL

SEQ ID NO: 8408 - protein, 155 aa, Homo sapiens
MAMLAQQMQLANAMMPGAPLQPVPMFSVAPSLATNASAAAFNPYLGPVSPSLVPAEILPTAPMLVTGNPGVPVPAAAAAAAQKLMRTDRLEVCREYQRGNCNRGENDCRFAHPADSTMIDTNDNTVTVCMDYIKGRCSREKCKYFHPPAHLQAKI

SEQ ID NO: 8409 - protein, 388 aa, Homo sapiens
MAVSVTPIRDTKWLTLEVCREFQRGTCSRPDTECKFAHPSKSCQVENGRVIACFDSLKGRCSRENCKYLHPPPHLKTQLEINGRNNLIQQKNMAMLAQQMQLANAMMPGAPLQPVPMFSVAPSLATNASAAAFNPYLGPVSPSLVPAEILPTAPMLVTGNPGVPVPAAAAAAAQKLMRTDRLEVCREYQRGNCNRGENDCRFAHPADSTMIDTNDNTVTVCMDYIKGRCSREKCKYFHPPAHLQAKIKAAQYQVNQAAAAQAAATAAAMTQSAVKSLKRPLEATFDLGIPQAVLPPLPKRPALEKTNGATAVFNTGIFQYQQALANMQLQQHTAFLPPVPMVHGATPATVSAATTSATSVPFAATATANQIPIISAEHLTSHKYVTQM

SEQ ID NO: 8410 - protein, 400 aa, Homo sapiens
MAVSVTPIRDTKWLTLEVCREFQRGTCSRPDTECKFAHPSKSCQVENGRVIACFDSLKGRCSRENCKYLHPPPHLKTQLEINGRNNLIQQKNMAMLAQQMQLANAMMPGAPLQPVPMFSVAPSLATNASAAAFNPYLGPVSPSLVPAEILPTAPMLVTGNPGVPVPAAAAAAAQKLMRTDRLEVCREYQRGNCNRGENDCRFAHPADSTMIDTNDNTVTVCMDYIKGRCSREKCKYFHPPAHLQAKIKAAQYQVNQAAAAQAAATAAAMTQSAVKSLKRPLEATFDLGIPQAVLPPLPKRPALEKTNGATAVFNTGIFQYQQALANMQLQQHTAFLPPGSILCMTPATSVVPMVHGATPATVSAATTSATSVPFAATATANQIPIISAEHLTSHKYVTQM

SEQ ID NO: 8411 - protein, 370 aa, Homo sapiens
MAVSVTPIRDTKWLTLEVCREFQRGTCSRPDTECKFAHPSKSCQVENGRVIACFDSLKGRCSRENCKYLHPPPHLKTQLEINGRNNLIQQKNMAMLAQQMQLANAMMPGAPLQPVPMFSVAPSLATNASAAAFNPYLGPVSPSLVPAEILPTAPMLVTGNPGVPVPAAAAAAAQKLMRTDRLEVCREYQRGNCNRGENDCRFAHPADSTMIDTNDNTVTVCMDYIKGRCSREKCKYFHPPAHLQAKIKAAQYQVNQAAAAQAAATAAAMGIPQAVLPPLPKRPALEKTNGATAVFNTGIFQYQQALANMQLQQHTAFLPPVPMVHGATPATVSAATTSATSVPFAATATANQIPIISAEHLTSHKYVTQM

SEQ ID NO: 8412 - protein, 382 aa, Homo sapiens
MAVSVTPIRDTKWLTLEVCREFQRGTCSRPDTECKFAHPSKSCQVENGRVIACFDSLKGRCSRENCKYLHPPPHLKTQLEINGRNNLIQQKNMAMLAQQMQLANAMMPGAPLQPVPMFSVAPSLATNASAAAFNPYLGPVSPSLVPAEILPTAPMLVTGNPGVPVPAAAAAAAQKLMRTDRLEVCREYQRGNCNRGENDCRFAHPADSTMIDTNDNTVTVCMDYIKGRCSREKCKYFHPPAHLQAKIKAAQYQVNQAAAAQAAATAAAMGIPQAVLPPLPKRPALEKTNGATAVFNTGIFQYQQALANMQLQQHTAFLPPGSILCMTPATSVVPMVHGATPATVSAATTSATSVPFAATATANQIPIISAEHLTSHKYVTQM

SEQ ID NO: 8413 - protein, 340 aa, Homo sapiens
MAVSVTPIRDTKWLTLEVCREFQRGTCSRPDTECKFAHPSKSCQVENGRVIACFDSLKGRCSRENCKYLHPPPHLKTQLEINGRNNLIQQKNMAMLAQQMQLANAMMPGAPLQPVPMFSVAPSLATNASAAAFNPYLGPVSPSLVPAEILPTAPMLVTGNPGVPVPAAAAAAAQKLMRTDRLEVCREYQRGNCNRGENDCRFAHPADSTMIDTNDNTVTVCMDYIKGRCSREKCKYFHPPAHLQAKIKAAQYQVNQAAAAQAAATAAAMFPWCTVLRQPLCPQQQHLPQVFPSLQQPQPTSPILDASTLLGATSCPAAAGKMIPIISAEHLTSHKYVTQM

SEQ ID NO: 8414 - protein, 342 aa, Homo sapiens
MAVSVTPIRDTKWLTLEVCREFQRGTCSRPDTECKFAHPSKSCQVENGRVIACFDSLKGRCSRENCKYLHPPPHLKTQLEINGRNNLIQQKNMAMLAQQMQLANAMMPGAPLQPVPMFSVAPSLATNASAAAFNPYLGPVSPSLVPAEILPTAPMLVTGNPGVPVPAAAAAAAQKLMRTDRLEVCREYQRGNCNRGENDCRFAHPADSTMIDTNDNTVTVCMDYIKGRCSREKCKYFHPPAHLQAKIKAAQYQVNQAAAAQAAATAAAMGIPQAVLPPLPKRPALEKTNGATAVFNTGIFQYQQALANMQLQQHTAFLPPGSILCMTPATSVDTHNICRTSD

SEQ ID NO: 8415 - protein, 340 aa, Homo sapiens; identical to SEQ ID NO: 8413

SEQ ID NO: 8416 - protein, 342 aa, Homo sapiens; identical to SEQ ID NO: 8414

SEQ ID NO: 8417 - protein, 388 aa, Homo sapiens; identical to SEQ ID NO: 8409

SEQ ID NO: 8418 - protein, 348 aa, Homo sapiens
MAVSVTPIRDTKWLTLEVCREFQRGTCSRPDTECKFAHPSKSCQVENGRVIACFDSLKGRCSRENCKYLHPPPHLKTQLEINGRNNLIQQKNMAMLAQQMQLANAMMPGAPLQPVPMFSVAPSLATNASAAAFNPYLGPVSPSLVPAEILPTAPMLVTGNPGVPVPAAAAAAAQKLMRTDRLEVCREYQRGNCNRGENDCRFAHPADSTMIDTNDNTVTVCMDYIKGRCSREKCKYFHPPAHLQAKIKAAQYQVNQAAAAQAAATAAAMTQSAVKSLKRPLEATFDLGIPQAVLPPLPKRPALEKTNGATAVFNTGIFQYQQALANMQLQQHTAFLPPDTHNICRTSD

SEQ ID NO: 8419 - protein, 314 aa, Homo sapiens
MAVSVTPIRDTKWLTLEVCREFQRGTCSRPDTECKFAHPSKSCQVENGRVIACFDSLKGRCSRENCKYLHPPPHLKTQLEINGRNNLIQQKNMAMLAQQMQLANAMMPGAPLQPVVCREYQRGNCNRGENDCRFAHPADSTMIDTNDNTVTVCMDYIKGRCSREKCKYFHPPAHLQAKIKAAQYQVNQAAAAQAAATAAAMGIPQAVLPPLPKRPALEKTNGATAVFNTGIFQYQQALANMQLQQHTAFLPPGSILCMTPATSVVPMVHGATPATVSAATTSATSVPFAATATANQIPIISAEHLTSHKYVTQM

SEQ ID NO: 8420 - protein, 314 aa, Homo sapiens; identical to SEQ ID NO: 8419

SEQ ID NO: 8421 - protein, 302 aa, Homo sapiens
MAVSVTPIRDTKWLTLEVCREFQRGTCSRPDTECKFAHPSKSCQVENGRVIACFDSLKGRCSRENCKYLHPPPHLKTQLEINGRNNLIQQKNMAMLAQQMQLANAMMPGAPLQPVVCREYQRGNCNRGENDCRFAHPADSTMIDTNDNTVTVCMDYIKGRCSREKCKYFHPPAHLQAKIKAAQYQVNQAAAAQAAATAAAMGIPQAVLPPLPKRPALEKTNGATAVFNTGIFQYQQALANMQLQQHTAFLPPVPMVHGATPATVSAATTSATSVPFAATATANQIPIISAEHLTSHKYVTQM

SEQ ID NO: 8422 - protein, 343 aa, Homo sapiens
MGRCSRENCKYLHPPPHLKTQLEINGRNNLIQQKNMAMLAQQMQLANAMMPGAPLQPVPMFSVAPSLATNASAAAFNPYLGPVSPSLVPAEILPTAPMLVTGNPGVPVPAAAAAAAQKLMRTDRLEVCREYQRGNCNRGENDCRFAHPADSTMIDTNDNTVTVCMDYIKGRCSREKCKYFHPPAHLQAKIKAAQYQVNQAAAAQAAATAAAMTQSAVKSLKRPLEATFDLGIPQAVLPPLPKRPALEKTNGATAVFNTGIFQYQQALANMQLQQHTAFLPPGSILCMTPATSVVPMVHGATPATVSAATTSATSVPFAATATANQIPIISAEHLTSHKYVTQM

SEQ ID NO: 8423 - protein, 58 aa, Homo sapiens
MLGRCSRENCKYLHPPPHLKTQLEINGRNNLIQQKNMAMLAQQMQLANAMMPGAPLQP

SEQ ID NO: 8424 - protein, 210 aa, Homo sapiens
QQMQLANAMMPGAPLQPVPMFSVAPSLATNASAAAFNPYLGPVSPSLVPAEILPTAPMLVTGNPGVPVPAAAAAAAQKLMRTDRLEVCREYQRGNCNRGENDCRFAHPADSTMIDTNDNTVTVCMDYIKGRCSREKCKYFHPPAHLQAKIKAAQYQVNQAAAAQAAATAAAMALANMQLQQHTAFLPPGSILCMTPATSVDTHNICRTSD

SEQ ID NO: 8425 - protein, 329 aa, Homo sapiens
  SITE 1: note = misc_feature - Xaa can be any naturally occurring amino acid
XVSVTPIRDTKWLTLEVCREFQRGTCSRPDTECKFAHPSKSCQVENGRVIACFDSLKGRCSRENCKYLHPPPHLKTQLEINGRNNLIQQKNMAMLAQQMQLANAMMPGAPLQPVPMFSVAPSLATNASAAAFNPYLGPVSPSLVPAEILPTAPMLVTGNPGVPVPAAAAAAAQKLMRTDRLEVCREYQRGNCNRGENDCRFAHPADSTMIDTNDNTVTVCMDYIKGRCSREKCKYFHPPAHLQAKIKAAQYQVNQAAAAQAAATAAAMGIPQAVLPPLPKRPALEKTNGATAVFNTGIFQYQQALANMQLQQHTAFLPPDTHNICRTSD

SEQ ID NO: 8426 - protein, 56 aa, Homo sapiens
MAAASAVSVLLVAAERNRWHRLPSLLLPPRLSIQDAVFSQKTWNLLNFVSKKELFL

SEQ ID NO: 8427 - protein, 598 aa, Homo sapiens
MAAASAVSVLLVAAERNRWHRLPSLLLPPRTWVWRQRTMKYTTATDEAYSIGPAPSQQSYLSMEKIIQVAKTSAAQAIHPGCGFLSENMEFAELCKQEGIIFIGPPPSAIRDMGIKSTSKSIMAAAGVPVVEGYHGEDQSDQCLKEHARRIGYPVMIKAVRGGGGKGMRIVRSEQEFQEQLESARREAKKSFNDDAMLIEKFVDTPRHVEVQVFGDHHGNAVYLFERDCSVQRRHQKIIEEAPAPGIKSEVRKKLGEAAVRAAKAVNYVGAGTVEFIMDSKHNFCFMEMNTRLQVEHPVTEMITGTDLVEWQLRIAAGEKIPLSQEEITLQGHAFEARIYAEDPSNNFMPVAGPLVHLSTPRADPSTRIETGVRQGDEVSVHYDPMIAKLVVWAADRQAALTKLRYSLRQYNIVGLHTNIDFLLNLSGHPEFEAGNVHTDFIPQHHKQLLLSRKAAAKESLCQAALGLILKEKAMTDTFTLQAHDQFSPFSSSSGRRLNISYTRNMTLKDGKNNVAIAVTYNHDGSYSMQIEDKTFQVLGNLYSEGDCTYLKCSVNGVASKAKLIILENTIYLFSKEGSIEIDIPVPKYLSSVSSQET

SEQ ID NO: 8428 - protein, 47 aa, Homo sapiens
MAAASAVSVLLVAAERNRWHRLPSLLLPPRTWVWRQRTMKYTTATGR

SEQ ID NO: 8429 - protein, 47 aa, Homo sapiens; identical to SEQ ID NO: 8428

SEQ ID NO: 8430 - protein, 725 aa, Homo sapiens
MAAASAVSVLLVAAERNRWHRLPSLLLPPRTWVWRQRTMKYTTATGRNITKVLIANRGEIACRVMRTAKKLGVQTVAVYSEADRNSMHVDMADEAYSIGPAPSQQSYLSMEKIIQVAKTSAAQAIHPGCGFLSENMEFAELCKQEGIIFIGPPPSAIRDMGIKSTSKSIMAAAGVPVVEGYHGEDQSDQCLKEHARRIGYPVMIKAVRGGGGKGMRIVRSEQEFQEQLESARREAKKSFNDDAMLIEKFVDTPRHVEVQVFGDHHGNAVYLFERDCSVQRRHQKIIEEAPAPGIKSEVRKKLGEAAVRAAKAVNYVGAGTVEFIMDSKHNFCFMEMNTRLQVEHPVTEMITGTDLVEWQLRIAAGEKIPLSQEEITLQGHAFEARIYAEDPSNNFMPVAGPLVHLSTPRADPSTRIETGVRQGDEVSVHYDPMIAKLVVWAADRQAALTKLRYSLRQYNIVGLHTNIDFLLNLSGHPEFEAGNVHTDFIPQHHKQLLLSRKAAAKESLCQAALGLILKEKAMTDTFTLQAHDQFSPFSSSSGRRLNISYTRNMTLKDGKNNVAIAVTYNHDGSYSMQIEDKTFQVLGNLYSEGDCTYLKCSVNGVASKAKLIILENTIYLFSKEGSIEIDIPVPKYLSSVSSQETQGGPLAPMTGTIEKVFVKAGDKVKAGDSLMVMIAMKMEHTIKSPKDGTVKKVFYREGAQANRHTPLVEFEEEESDKRESE

SEQ ID NO: 8431 - protein, 112 aa, Homo sapiens
MAAASAVSVLLVAAERNRWHRLPSLLLPPRTWVWRQRTMKYTTATGRNITKVLIANRGEIACRVMRTAKKLGVQTVAVYSEADRNSMHVDMQDDLDFTEKIKLRFLPQNLLT

SEQ ID NO: 8432 - protein, 61 aa, Homo sapiens
MAAASAVSVLLVAAERNRWHRLPSLLLPPRTWVWRQRTMKYTTATGYPSRMRFSLRKHGIC

SEQ ID NO: 8433 - protein, 61 aa, Homo sapiens; identical to SEQ ID NO: 8432

SEQ ID NO: 8434 - protein, 616 aa, Homo sapiens
MEKIIQVAKTSAAQAIHPGCGFLSENMEFAELCKQEGIIFIGPPPSAIRDMGIKSTSKSIMAAAGVPVVEGYHGEDQSDQCLKEHARRIGYPVMIKAVRGGGGKGMRIVRSEQEFQEQLESARREAKKSFNDDAMLIEKFVDTPRHVEVQVFGDHHGNAVYLFERDCSVQRRHQKIIEEAPAPGIKSEVRKKLGEAAVRAAKAVNYVGAGTVEFIMDSKHNFCFMEMNTRLQVEHPVTEMITGTDLVEWQLRIAAGEKIPLSQEEITLQGHAFEARIYAEDPSNNFMPVAGPLVHLSTPRADPSTRIETGVRQGDEVSVHYDPMIAKLVVWAADRQAALTKLRYSLRQYNIVGLHTNIDFLLNLSGHPEFEAGNVHTDFIPQHHKQLLLSRKAAAKESLCQAALGLILKEKAMTDTFTLQAHDQFSPFSSSSGRRLNISYTRNMTLKDGKNNVAIAVTYNHDGSYSMQIEDKTFQVLGNLYSEGDCTYLKCSVNGVASKAKLIILENTIYLFSKEGSIEIDIPVPKYLSSVSSQETQGGPLAPMTGTIEKVFVKAGDKVKAGDSLMVMIAMKMEHTIKSPKDGTVKKVFYREGAQANRHTPLVEFEEEESDKRESE

SEQ ID NO: 8435 - protein, 575 aa, Homo sapiens
MEKIIQVAKTSAAQHIQSIMAAAGVPVVEGYHGEDQSDQCLKEHARRIGYPVMIKAVRGGGGKGMRIVRSEQEFQEQLESARREAKKSFNDDAMLIEKFVDTPRHVEVQVFGDHHGNAVYLFERDCSVQRRHQKIIEEAPAPGIKSEVRKKLGEAAVRAAKAVNYVGAGTVEFIMDSKHNFCFMEMNTRLQVEHPVTEMITGTDLVEWQLRIAAGEKIPLSQEEITLQGHAFEARIYAEDPSNNFMPVAGPLVHLSTPRADPSTRIETGVRQGDEVSVHYDPMIAKLVVWAADRQAALTKLRYSLRQYNIVGLHTNIDFLLNLSGHPEFEAGNVHTDFIPQHHKQLLLSRKAAAKESLCQAALGLILKEKAMTDTFTLQAHDQFSPFSSSSGRRLNISYTRNMTLKDGKNNVAIAVTYNHDGSYSMQIEDKTFQVLGNLYSEGDCTYLKCSVNGVASKAKLIILENTIYLFSKEGSIEIDIPVPKYLSSVSSQETQGGPLAPMTGTIEKVFVKAGDKVKAGDSLMVMIAMKMEHTIKSPKDGTVKKVFYREGAQANRHTPLVEFEEEESDKRESE

SEQ ID NO: 8436 - protein, 434 aa, Homo sapiens
MKYTTATGRNITKVLIANRGEIACRVMRTAKKLGVQTVAVYSEADRNSMHVDMADEAYSIGPAPSQQSYLSMEKIIQVAKTSAAQAIHPGCGFLSENMEFAELCKQEGIIFIGPPPSAIRDMGIKSTSKSIMAAAGVPVVEGYHGEDQSDQCLKEHARRIGYPVMIKAVRGGGGKGMRIVRSEQEFQEQLESARREAKKSFNDDAMLIEKFVDTPRHVEVQVFGDHHGNAVYLFERDCSVQRRHQKIIEEAPAPGIKSEVRKKLGEAAVRAAKAVNYVGAGTVEFIMDSKHNFCFMEMNTRLQVEHPVTEMITGTDLVEWQLRIAAGEKIPLSQEEITLQGHAFEARIYAEDPSNNFMPVAGPLVHLSTPRADPSTRIETGVRQGDEVSVHYDPMIAKLVVWAADRQAALTKLRYSLRQYNINSLHFRLAVEED

SEQ ID NO: 8437 - protein, 434 aa, Homo sapiens; identical to SEQ ID NO: 8436

SEQ ID NO: 8438 - protein, 119 aa, Homo sapiens
MVLPLPWLSRYHFLRLLLPSWSLAPQGSHGCCSQNPKASMEEQTSSRGNGKMTSPPRGPGTHRTAELARAEELLEQQLELYQALLEGQEGAWEAQALVLKIQKLKEQMRRHQESLGGGA

SEQ ID NO: 8439 - protein, 78 aa, Homo sapiens
LGRLNHVAIAVPDLEKAAAFYKNILGAQVDNINAAVMDLKKKKIRSLSEEVKIGAHGKPVIFLHPKDCGGVLVELEQA

SEQ ID NO: 8440 - protein, 176 aa, Homo sapiens
MARVLKAAAANAVGLFSRLQAPIPTVRASSTSQPLDQVTGSVWNLGRLNHVAIAVPDLEKAAAFYKNILGAQVSEAVPLPEHGVSVVFVNLGNTKMELLHPLGRDSPIAGFLQKNKAGGMHHICIEVDNINAAVMDLKKKKIRSLSEEVKIGAHGKPVIFLHPKDCGGVLVELEQA

SEQ ID NO: 8441 - protein, 31 aa, Homo sapiens
MELLHPLGRDSPIAGFLQKNKAGGMHHICIE

SEQ ID NO: 8442 - protein, 31 aa, Homo sapiens; identical to SEQ ID NO: 8441

SEQ ID NO: 8443 - protein, 1067 aa, Homo sapiens
MAEKGASRGTLRRLWSLPRRRRGTAGRSRPDEIMHQDIVPLCAADIQDQLKKRFAYLSGGRGQDGSPVITFPDYPAFSEIPDKEFQNVMTYLTSIPSLQDAGIGFILVIDRRRDKWTSVKASVLRIAASFPANLQLVLVLRPTGFFQRTLSDIAFKFNRDDFKMKVPVIMLSSVPDLHGYIDKSQLTEDLGGTLDYCHSRWLCQRTAIESFALMVKQTAQMLQSFGTELAETELPNDVQSTSSVLCAHTEKKDKAKEDLRLALKEGHSVLESLRELQAEGSEPSVNQDQLDNQATVQRLLAQLNETEAAFDEFWAKHQQKLEQCLQLRHFEQGFREVKAILDAASQKIATFTDIGNSLAHVEHLLRDLASFEEKSGVAVERARALSLDGEQLIGNKHYAVDSIRPKCQELRHLCDQFSAEIARRRGLLSKSLELHRRLETSMKWCDEGIYLLASQPVDKCQSQDGAEAALQEIEKFLETGAENKIQELNAIYKEYESILNQDLMEHVRKVFQKQASMEEVFHRRQASLKKLAARQTRPVQPVAPRPEALAKSPCPSPGIRRGSENSSSEGGALRRGPYRRAKSEMSESRQGRGSAGEEEESLAILRRHVMSELLDTERAYVEELLCVLEGYAAEMDNPLMAHLLSTGLHNKKDVLFGNMEEIYHFHNRIFLRELENYTDCPELVGRCFLERMEDFQIYEKYCQNKPRSESLWRQCSDCPFFQECQRKLDHKLSLDSYLLKPVQRITKYQLLLKEMLKYSRNCEGAEDLQEALSSILGILKAVNDSMHLIAITGYDGNLGDLGKLLMQGSFSVWTDHKRGHTKVKELARFKPMQRHLFLHEKAVLFCKKREENGEGYEKAPSYSYKQSLNMAAVGITENVKGDAKKFEIWYNAREEVYIVQAPTPEIKAAWVNEIRKVLTSQLQACREASQHRALEQSQSLPLPAPTSTSPSRGNSRNIKKLEERKTDPLSLEGYVSSAPLTKPPEKGKGWSKTSHSLEAPEDDGGWSSAEEQINSSDAEEDGGLGPKKLVPGKYTVVADHEKGGPDALRVRSGDVVELVQEGDEGLW

SEQ ID NO: 8444 - protein, 66 aa, Homo sapiens
MFDCWRFILCKRPGSNSYSSPQRPNEAKKEETDHQIDVSDVIRLVQDTPEATAMATAPRRSQSPGL

SEQ ID NO: 8445 - protein, 1137 aa, Homo sapiens
MFDCWRFILCKRPGSNSYSSPQRPNEAKKEETDHQIDVSDVIRLVQDTPEATAMATDEIMHQDIVPLCAADIQDQLKKRFAYLSGGRGQDGSPVITFPDYPAFSEIPDKEFQNVMTYLTSIPSLQDAGIGFILVIDRRRDKWTSVKASVLRIAASFPANLQLVLVLRPTGFFQRTLSDIAFKFNRDDFKMKVPVIMLSSVPDLHGYIDKSQLTEDLGGTLDYCHSRWLCQRTAIESFALMVKQTAQMLQSFGTELAETELPNDVQSTSSVLCAHTEKKDKAKEDLRLALKEGHSVLESLRELQAEGSEPSVNQDQLDNQATVQRLLAQLNETEAAFDEFWAKHQQKLEQCLQLRHFEQGFREVKAILDAASQKIATFTDIGNSLAHVEHLLRDLASFEEKSGVAVERARALSLDGEQLIGNKHYAVDSIRPKCQELRHLCDQFSAEIARRRGLLSKSLELHRRLETSMKWCDEGIYLLASQPVDKCQSQDGAEAALQEIEKFLETGAENKIQELNAIYKEYESILNQDLMEHVRKVFQKQASMEEVFHRRQASLKKLAARQTRPVQPVAPRPEALAKSPCPSPGIRRGSENSSSEGGALRRGPYRRAKSEMSESRQGRGSAGEEEESLAILRRHVMSELLDTERAYVEELLCVLEGYAAEMDNPLMAHLLSTGLHNKKDVLFGNMEEIYHFHNRIFLRELENYTDCPELVGRCFLERMEDFQIYEKYCQNKPRSESLWRQCSDCPFFQECQRKLDHKLSLDSYLLKPVQRITKYQLLLKEMLKYSRNCEGAEDLQEALSSILGILKAVNDSMHLIAITGYDGNLGDLGKLLMQGSFSVWTDHKRGHTKVKELARFKPMQRHLFLHEKAVLFCKKREENGEGYEKAPSYSYKQSLNMAAVGITENVKGDAKKFEIWYNAREEVYIVQAPTPEIKAAWVNEIRKVLTSQLQACREASQHRALEQSQSLPLPAPTSTSPSRGNSRNIKKLEERKTDPLSLEGYVSSAPLTKPPEKGKGWSKTSHSLEAPEDDGGWSSAEEQINSSDAEEDGGLGPKKLVPGKYTVVADHEKGGPDALRVRSGDVVELVQEGDEGLWYVRDPTTGKEGWVPASSLSVRLGPSGSAQCLSSSGKAHVPRAHP

SEQ ID NO: 8446 - protein, 64 aa, Homo sapiens
MFDCWRFILCKRPGSNSYSSPQRPNEAKKEETDHQIDVSDVIRLVQDTPEATAMATEVSASRPQ

SEQ ID NO: 8447 - protein, 97 aa, Homo sapiens
MGDGKAVRISVAEMKSYYLYSEWCSWLLSVAEDEIMHQDIVPLCAADIQDQLKKRFAYLSGGRGQDGSPVITFPDYPAFSEIPDKEFQNVMTYLTSI

SEQ ID NO: 8448 - protein, 136 aa, Homo sapiens
MHQDIVPLCAADIQDQLKKRFAYLSGGRGQDGSPVITFPDYPAFSEIPDKEFQNVMTYLTSIPSLQDAGIGFILVIDRRRDKWTSVKASVLRIAASFPANLQLVLVLRPTGFFQRTLSDIAFKFNRDDFKMKVPVI

SEQ ID NO: 8449 - protein, 1096 aa, Homo sapiens
MPLRGGAGPSPASHGPTHGPSDPRTCLPGRGAGGMRPHGRGALGCCGLCSFYTCHGAAGDEIMHQDIVPLCAADIQDQLKKRFAYLSGGRGQDGSPVITFPDYPAFSEIPDKEFQNVMTYLTSIPSLQDAGIGFILVIDRRRDKWTSVKASVLRIAASFPANLQLVLVLRPTGFFQRTLSDIAFKFNRDDFKMKVPVIMLSSVPDLHGYIDKSQLTEDLGGTLDYCHSRWLCQRTAIESFALMVKQTAQMLQSFGTELAETELPNDVQSTSSVLCAHTEKKDKAKEDLRLALKEGHSVLESLRELQAEGSEPSVNQDQLDNQATVQRLLAQLNETEAAFDEFWAKHQQKLEQCLQLRHFEQGFREVKAILDAASQKIATFTDIGNSLAHVEHLLRDLASFEEKSGVAVERARALSLDGEQLIGNKHYAVDSIRPKCQELRHLCDQFSAEIARRRGLLSKSLELHRRLETSMKWCDEGIYLLASQPVDKCQSQDGAEAALQEIEKFLETGAENKIQELNAIYKEYESILNQDLMEHVRKVFQKQASMEEVFHRRQASLKKLAARQTRPVQPVAPRPEALAKSPCPSPGIRRGSENSSSEGGALRRGPYRRAKSEMSESRQGRGSAGEEEESLAILRRHVMSELLDTERAYVEELLCVLEGYAAEMDNPLMAHLLSTGLHNKKDVLFGNMEEIYHFHNRIFLRELENYTDCPELVGRCFLERMEDFQIYEKYCQNKPRSESLWRQCSDCPFFQECQRKLDHKLSLDSYLLKPVQRITKYQLLLKEMLKYSRNCEGAEDLQEALSSILGILKAVNDSMHLIAITGYDGNLGDLGKLLMQGSFSVWTDHKRGHTKVKELARFKPMQRHLFLHEKAVLFCKKREENGEGYEKAPSYSYKQSLNMAAVGITENVKGDAKKFEIWYNAREEVYIVQAPTPEIKAAWVNEIRKVLTSQLQACREASQHRALEQSQSLPLPAPTSTSPSRGNSRNIKKLEERKTDPLSLEGYVSSAPLTKPPEKGKGWSKTSHSLEAPEDDGGWSSAEEQINSSDAEEDGGLGPKKLVPGKYTVVADHEKGGPDALRVRSGDVVELVQEGDEGLW

SEQ ID NO: 8450 - protein, 1125 aa, Homo sapiens
MRFWLRTEEMALEEMVQRLNAVSKHTDEIMHQDIVPLCAADIQDQLKKRFAYLSGGRGQDGSPVITFPDYPAFSEIPDKEFQNVMTYLTSIPSLQDAGIGFILVIDRRRDKWTSVKASVLRIAASFPANLQLVLVLRPTGFFQRTLSDIAFKFNRDDFKMKVPVIMLSSVPDLHGYIDKSQLTEDLGGTLDYCHSRWLCQRTAIESFALMVKQTAQMLQSFGTELAETELPNDVQSTSSVLCAHTEKKDKAKEDLRLALKEGHSVLESLRELQAEGSEPSVNQDQLDNQATVQRLLAQLNETEAAFDEFWAKHQQKLEQCLQLRHFEQGFREVKAILDAASQKIATFTDIGNSLAHVEHLLRDLASFEEKSGVAVERARALSLDGEQLIGNKHYAVDSIRPKCQELRHLCDQFSAEIARRRGLLSKSLELHRRLETSMKWCDEGIYLLASQPVDKCQSQDGAEAALQEIEKFLETGAENKIQELNAIYKEYESILNQDLMEHVRKVFQKQASMEEVFHRRQASLKKLAARQTRPVQPVAPRPEALAKSPCPSPGIRRGSENSSSEGGALRRGPYRRAKSEMSESRQGRGSAGEEEESLAILRRHVMSELLDTERAYVEELLCVLEGYAAEMDNPLMAHLLSTGLHNKKDVLFGNMEEIYHFHNRIFLRELENYTDCPELVGRCFLERMEDFQIYEKYCQNKPRSESLWRQCSDCPFFQECQRKLDHKLSLDSYLLKPVQRITKYQLLLKEMLKYSRNCEGAEDLQEALSSILGILKAVNDSMHLIAITGYDGNLGDLGKLLMQGSFSVWTDHKRGHTKVKELARFKPMQRHLFLHEKAVLFCKKREENGEGYEKAPSYSYKQSLNMAAVGITENVKGDAKKFEIWYNAREEVYIVQAPTPEIKAAWVNEIRKVLTSQLQACREASQHRALEQSQSLPLPAPTSTSPSRGNSRNIKKLEERKTDPLSLEGYVSSAPLTKPPEKGKGWSKTSHSLEAPEDDGGWSSAEEQINSSDAEEDGGLGPKKLVPGKYTVVADHEKGGPDALRVRSGDVVELVQEGDEGLWYVRDPTTGKEGWVPASSLSVRLGPSGSAQCLSSSESSPGSAVLSNSSSCSEGGQAPFSDLQG

SEQ ID NO: 8451 - protein, 136 aa, Homo sapiens
MTVRRLSLLCRDLWALWLLLKAGADEIMHQDIVPLCAADIQDQLKKRFAYLSGGRGQDGSPVITFPDYPAFSEIPDKEFQNVMTYLTSIPSGGQESSIRPVSCRLTWEGCRGGLSSDVLVPASRKMLRMSASHQTV

SEQ ID NO: 8452 - protein, 1123 aa, Homo sapiens
MTVRRLSLLCRDLWALWLLLKAGADEIMHQDIVPLCAADIQDQLKKRFAYLSGGRGQDGSPVITFPDYPAFSEIPDKEFQNVMTYLTSIPSLQDAGIGFILVIDRRRDKWTSVKASVLRIAASFPANLQLVLVLRPTGFFQRTLSDIAFKFNRDDFKMKVPVIMLSSVPDLHGYIDKSQLTEDLGGTLDYCHSRWLCQRTAIESFALMVKQTAQMLQSFGTELAETELPNDVQSTSSVLCAHTEKKDKAKEDLRLALKEGHSVLESLRELQAEGSEPSVNQDQLDNQATVQRLLAQLNETEAAFDEFWAKHQQKLEQCLQLRHFEQGFREVKAILDAASQKIATFTDIGNSLAHVEHLLRDLASFEEKSGVAVERARALSLDGEQLIGNKHYAVDSIRPKCQELRHLCDQFSAEIARRRGLLSKSLELHRRLETSMKWCDEGIYLLASQPVDKCQSQDGAEAALQEIEKFLETGAENKIQELNAIYKEYESILNQDLMEHVRKVFQKQASMEEVFHRRQASLKKLAARQTRPVQPVAPRPEALAKSPCPSPGIRRGSENSSSEGGALRRGPYRRAKSEMSESRQGRGSAGEEEESLAILRRHVMSELLDTERAYVEELLCVLEGYAAEMDNPLMAHLLSTGLHNKKDVLFGNMEEIYHFHNRIFLRELENYTDCPELVGRCFLERMEDFQIYEKYCQNKPRSESLWRQCSDCPFFQECQRKLDHKLSLDSYLLKPVQRITKYQLLLKEMLKYSRNCEGAEDLQEALSSILGILKAVNDSMHLIAITGYDGNLGDLGKLLMQGSFSVWTDHKRGHTKVKELARFKPMQRHLFLHEKAVLFCKKREENGEGYEKAPSYSYKQSLNMAAVGITENVKGDAKKFEIWYNAREEVYIVQAPTPEIKAAWVNEIRKVLTSQLQACREASQHRALEQSQSLPLPAPTSTSPSRGNSRNIKKLEERKTDPLSLEGYVSSAPLTKPPEKGKGWSKTSHSLEAPEDDGGWSSAEEQINSSDAEEDGGLGPKKLVPGKYTVVADHEKGGPDALRVRSGDVVELVQEGDEGLWYVRDPTTGKEGWVPASSLSVRLGPSGSAQCLSSSESSPGSAVLSNSSSCSEGGQAPFSDLQG

SEQ ID NO: 8453 - protein, 984 aa, Homo sapiens
MTVRRLSLLCRDLWALWLLLKAGADEIMHQDIVPLCAADIQDQLKKRFAYLSGGRGQDGSPVITFPDYPAFSEIPDKEFQNVMTYLTSIPSLQDAGIGFILVIDRRRDKWTSVKASVLRIAASFPANLQLVLVLRPTGFFQRTLSDIAFKFNRDDFKMKVPVIMLSSVPDLHGYIDKSQLTEDLGGTLDYCHSRWLCQRTAIESFALMVKQTAQMLQSFGTELAETELPNDVQSTSSVLCAHTEKKDKAKEDLRLALKEGHSVLESLRELQAEGSEPSVNQDQLDNQATVQRLLAQLNETEAAFDEFWAKHQQKLEQCLQLRHFEQGFREVKAILDAASQKIATFTDIGNSLAHVEHLLRDLASFEEKSGVAVERARALSLDGEQLIGNKHYAVDSIRPKCQELRHLCDQFSAEIARRRGLLSKSLELHRRLETSMKWCDEGIYLLASQPVDKCQSQDGAEAALQEIEKFLETGAENKIQELNAIYKEYESILNQDLMEHVRKVFQKQASMEEVFHRRQASLKKLAARQTRPVQPVAPRPEALAKSPCPSPGIRRGSENSSSEGGALRRGPYRRAKSEMSESRQGRGSAGEEEESLAILRRHVMSELLDTERAYVEELLCVLEGYAAEMDNPLMAHLLSTGLHNKKDVLFGNMEEIYHFHNRIFLRELENYTDCPELVGRCFLERMEDFQIYEKYCQNKPRSESLWRQCSDCPFFQECQRKLDHKLSLDSYLLKPVQRITKYQLLLKEMLKYSRNCEGAEDLQEALSSILGILKAVNDSMHLIAITGYDGNLGDLGKLLMQGSFSVWTDHKRGHTKVKELARFKPMQRHLFLHEKAVLFCKKREENGEGYEKAPSYSYKQSLNMAAVGITENVKGDAKKFEIWYNAREEVYIVQAPTPEIKAAWVNEIRKVLTSQLQACREASQHRALEQSQSLPLPAPTSTSPSRGNSRNIKKLEERKTDPLSLEGYVSSAPLTKPPEKGKEP

SEQ ID NO: 8454 - protein, 86 aa, Homo sapiens
MWLSQRVLPPLPFPADAWEPSEVLGIFSQHRSHATTSESLTWTSTGTSDARTGVILQDAGIGFILVIDRRRDKWTSVKASVLRIAN

SEQ ID NO: 8455 - protein, 93 aa, Homo sapiens
SPVITFPDYPAFSEIPDKEFQNVMTYLTSIPSILFMESAASEHWGQVAEALPFLPPGSARTAVTTSPRGPLPAPSQNVFPRSFSVTAVEFNSY

SEQ ID NO: 8456 - protein, 213 aa, Homo sapiens
TSTGTSDARTGVILQDAGIGFILVIDRRRDKWTSVKASVLRIAASFPANLQLVLVLRPTGFFQRTLSDIAFKFNRDDFKMKVPVIMLSSVPDLHGYIDKSQLTEDLGGTLDYCHSRWLCQRTAIESFALMVKQTAQMLQSFGTELAETELPNDVQSTSSVLCAHTEKKDKAKVHGGCSGWKLWGAPVSQKLRGAPVGSCGGSFVPAGVCVSST

SEQ ID NO: 8457 - protein, 336 aa, Homo sapiens
  SITE 1: note = misc_feature - Xaa can be any naturally occurring amino acid
XENGEGYEKAPSYSYKQSLNMAAVGITENVKGDAKKFEIWYNAREEVYIVQAPTPEIKAAWVNEIRKVLTSQLQACREASQHRALEQSQSLPLPAPTSTSPSRGNSRNIKKLEERKTDPLSLEGYVSSAPLTKPPEKGKDDTVTSSASESSALSRKRFTLQGFANLKGQKASPTSPDKKAKRHEVKSDPTPFGVRGWSKTSHSLEAPEDDGGWSSAEEQINSSDAEEDGGLGPKKLVPGKYTVVADHEKGGPDALRVRSGDVVELVQEGDEGLWYVRDPTTGKEGWVPASSLSVRLGPSGSAQCLSSSESSPGSAVLSNSSSCSEGGQAPFSDLQG

SEQ ID NO: 8458 - protein, 296 aa, Homo sapiens
  SITE 1: note = misc_feature - Xaa can be any naturally occurring amino acid
XHLFLHEKAVLFCKKREENGEGYEKAPSYSYKQSLNMAAVGITENVKGDAKKFEIWYNAREEVYIVQAPTPEIKAAWVNEIRKVLTSQLQACREASQHRALEQSQSLPLPAPTSTSPSRGNSRNIKKLEERKTDPLSLEGYVSSAPLTKPPEKGKGWSKTSHSLEAPEDDGGWSSAEEQINSSDAEEDGGLGPKKLVPGKYTVVADHEKGGPDALRVRSGDVVELVQEGDEGLWYVRDPTTGKEGWVPASSLSVRLGPSGSAQCLSSSESSPGSAVLSNSSSCSEGGQAPFSDLQG

SEQ ID NO: 8459 - protein, 189 aa, Homo sapiens
  SITE 1: note = misc_feature - Xaa can be any naturally occurring amino acid
XKKLEERKTDPLSLEGYVSSAPLTKPPEKGKASPTSPDKKAKRHEVKSDPTPFGVRGWSKTSHSLEAPEDDGGWSSAEEQINSSDAEEDGGLGPKKLVPGKYTVVADHEKGGPDALRVRSGDVVELVQEGDEGLWYVRDPTTGKEGWVPASSLSVRLGPSGSAQCLSSSESSPGSAVLSNSSSCSEGGQ

SEQ ID NO: 8460 - protein, 317 aa, Homo sapiens
  SITE 1: note = misc_feature - Xaa can be any naturally occurring amino acid
XLGILKAVNDSMHLIAITGYDGNLGDLGKLLMQGSFSVWTDHKRGHTKVKELARFKPMQRHLFLHEKAVLFCKKREENGEGYEKAPSYSYKQSLNMAAVGITENVKGDAKKFEIWYNAREEVYIVQAPTPEIKAAWVNEIRKVLTSQLQACREASQHRALEQSQSLPLPAPTSTSPSRGNSRNIKKLEERKTDPLSLEGYVSSAPLTKPPEKGKDDTVTSSASESSALSRKRFTLQGFANLKASPTSPDKKAKRHEVKSDPTPFGVRGWSKTSHSLEAPEDDGGWSSAEEQINSSDAEEDGGLGPKKLVPGKYTVVA

SEQ ID NO: 8461 - protein, 151 aa, Homo sapiens
  SITE 1: note = misc_feature - Xaa can be any naturally occurring amino acid
XQAPTPEIKAAWVNEIRKVLTSQLQACREASQHRALEQSQSLPLPAPTSTSPSRGNSRNIKKLEERKTDPLSLEGYVSSAPLTKPPEKGKDDTVTSSASESSALSRKRFTLQGFANLKGQKGWSKTSHSLEAPEDDGGWSSAEEQINSSDA

SEQ ID NO: 8462 - protein, 87 aa, Homo sapiens
  SITE 1: note = misc_feature - Xaa can be any naturally occurring amino acid
XSAPLTKPPEKGKGWSKTSHSLEAPEDDGGWSSAEEQINSSDAEEDGGLGPKKLVPTQPPVEPTRGCTFLRGDSPHPPTLYVIECCH

SEQ ID NO: 8463 - protein, 69 aa, Homo sapiens
  SITE 1: note = misc_feature - Xaa can be any naturally occurring amino acid
XSEIPDKEFQNVMTYLTSIPSLQDAGIGFILVIDRRRDKWTSVKASVLRIALRARCTESEPLHPGGSGI

SEQ ID NO: 8464 - protein, 793 aa, Homo sapiens
  SITE 1: note = misc_feature - Xaa can be any naturally occurring amino acid
XSQKIATFTDIGNSLAHVEHLLRDLASFEEKSGVAVERARALSLDGEQLIGNKHYAVDSIRPKCQELRHLCDQFSAEIARRRGLLSKSLELHRRLETSMKWCDEGIYLLASQPVDKCQSQDGAEAALQEIEKFLETGAENKIQELNAIYKEYESILNQDLMEHVRKVFQKQASMEEVFHRRQASLKKLAARQTRPVQPVAPRPEALAKSPCPSPGIRRGSENSSSEGGALRRGPYRRAKSEMSESRQGRGSAGEEEESLAILRRHVMSELLDTERAYVEELLCVLEGYAAEMDNPLMAHLLSTGLHNKKDVLFGNMEEIYHFHNRIFLRELENYTDCPELVGRCFLERMEDFQIYEKYCQNKPRSESLWRQCSDCPFFQECQRKLDHKLSLDSYLLKPVQRITKYQLLLKEMLKYSRNCEGAEDLQEALSSILGILKAVNDSMHLIAITGYDGNLGDLGKLLMQGSFSVWTDHKRGHTKVKELARFKPMQRHLFLHEKAVLFCKKREENGEGYEKAPSYSYKQSLNMAAVGITENVKGDAKKFEIWYNAREEVYIVQAPTPEIKAAWVNEIRKVLTSQLQACREASQHRALEQSQSLPLPAPTSTSPSRGNSRNIKKLEERKTDPLSLEGYVSSAPLTKPPEKGKASPTSPDKKAKRHEVKSDPTPFGVRGWSKTSHSLEAPEDDGGWSSAEEQINSSDAEEDGGLGPKKLVPGKYTVVADHEKGGPDALRVRSGDVVELVQEGDEGLWYVRDPTTGKEGWVPASSLSVRLGPSGSAQCLSSSGKAHVPRAHP

SEQ ID NO: 8465 - protein, 94 aa, Homo sapiens
MEHLEGVINKPEAEMSPQELQLHYFKMHDYDGNNLLDGLELSTAITHVHKEEGSEQAPLMSEDELINIIDGVLRDDDKNNDGYIDYAEFAKSLQ

SEQ ID NO: 8466 - protein, 94 aa, Homo sapiens; identical to SEQ ID NO: 8465

SEQ ID NO: 8467 - protein, 94 aa, Homo sapiens; identical to SEQ ID NO: 8465

SEQ ID NO: 8468 - protein, 127 aa, Homo sapiens
MLSVCSCRTSSGMRSQWPSARQRSSSLSTFRHIMEHLEGVINKPEAEMSPQELQLHYFKMHDYDGNNLLDGLELSTAITHVHKEEGSEQAPLMSEDELINIIDGVLRDDDKNNDGYIDYAEFAKSLQ

SEQ ID NO: 8469 - protein, 61 aa, Homo sapiens
MTMRSLLRTPFLCGLLWAFCAPGARAEEPAASFSQPGSMGLDKNTVHDQEHIMEHLEGVIN

SEQ ID NO: 8470 - protein, 146 aa, Homo sapiens
MTMRSLLRTPFLCGLLWAFCAPGARAEEPAASFSQPGSMGLDKNTVHDQEHIMEHLEGVINKPEAEMSPQELQLHYFKMHDYDGNNLLDGLELSTAITHVHKEEGSEQAPLMSEDELINIIDGVLRDDDKNNDGYIDYAEFAKSLQ

SEQ ID NO: 8471 - protein, 146 aa, Homo sapiens; identical to SEQ ID NO: 8470

SEQ ID NO: 8472 - protein, 146 aa, Homo sapiens; identical to SEQ ID NO: 8470

SEQ ID NO: 8473 - protein, 146 aa, Homo sapiens; identical to SEQ ID NO: 8470

SEQ ID NO: 8474 - protein, 146 aa, Homo sapiens; identical to SEQ ID NO: 8470

SEQ ID NO: 8475 - protein, 146 aa, Homo sapiens; identical to SEQ ID NO: 8470

SEQ ID NO: 8476 - protein, 90 aa, Homo sapiens
SQPGSMGLDKNTVHDQEHIMEHLEGVINKPEAEMSPQELQLHYFKMHDYDGNNLLDGLELSTAITHVHKEANLCTELTLRRTGTFPIKEE

SEQ ID NO: 8477 - protein, 156 aa, Homo sapiens
GPVGPQRVAEAGGGQLGSTAQGKCDKDNTEKDITQATNSHFTHGEMQDQSIWGNPSDGELIRTQPQRLPQLQTSAQVPSGEEIGKIKNGHTGLSNGNGIHHGAKHGSADNRKLSAPVSQKMHRKIQSSLSVNSDISKKSKVNAVFSQKTGSSPEVC

SEQ ID NO: 8478 - protein, 135 aa, Homo sapiens
MQDQSIWGNPSDGELIRTQPQRLPQLQTSAQVPSGEEIGKIKNGHTGLSNGNGIHHGAKHGSADNRKLSAPVSQKMHRKIQSSLSVNSDISKKSKVNAVFSQKTGSSPEDCCVHCILACLFCEFLTLCNIVLGQA

SEQ ID NO: 8479 - protein, 246 aa, Homo sapiens
MSGAGEALAPGPVGPQRVAEAGGGQLGSTAQGKCDKDNTEKDITQATNSHFTHGEMQDQSIWGNPSDGELIRTQPQRLPQLQTSAQVPSGEEIGKIKNGHTGLSNGNGIHHGAKHGSADNRKLSAPVSQKMHRKIQSSLSVNSDISKKSKVNAVFSQKTGSSPEDCCVHCILACLFCEFLTLCNIVLGQASCGICTSEACCCCCGDEMGDDCNCPCDMDCGIMDACCESSDCLEICMECCGICFPS

SEQ ID NO: 8480 - protein, 43 aa, Homo sapiens
MSGAGEALAPGPVGPQRVAEAGGGQLGSTAQGLFSRSRTAAAL

SEQ ID NO: 8481 - protein, 43 aa, Homo sapiens; identical to SEQ ID NO: 8480

SEQ ID NO: 8482 - protein, 156 aa, Homo sapiens
PQRVAEAGGGQLGSTAQGKCDKDNTEKDITQATNSHFTHGEMQDQSIWGNPSDGELIRTQPQRLPQLQTSAQVPSGEEIGKIKNGHTGLSNGNGIHHGAKHGSADNRKLSAPVSQKMHRKIQSSLSVNSDISKKSKVNAVFSQKTGSSPEDKQEFW

SEQ ID NO: 8483 - protein, 355 aa, Homo sapiens
VRGVRAATAAAVAATAASGLSRREAGGRAGAAAAVVRPPGRKCGRCRRLANFPGRKRRRRRRKGLGATTGGCGEAVSSLHPAPHSPSSVRPAGRRARRQRRGAGSAERPMSGAGEALAPGPVGPQRVAEAGGGQLGSTAQGKCDKDNTEKDITQATNSHFTHGEMQDQSIWGNPSDGELIRTQPQRLPQLQTSAQVPSGEEIGKIKNGHTGLSNGNGIHHGAKHGSADNRKLSAPVSQKMHRKIQSSLSVNSDISKKSKVNAVFSQKTGSSPEDCCVHCILACLFCEFLTLCNIVLGQASCGICTSEACCCCCGDEMGDDCNCPCDMDCGIMDACCESSDCLEICMECCGICFPS

SEQ ID NO: 8484 - protein, 355 aa, Homo sapiens; identical to SEQ ID NO: 8483

SEQ ID NO: 8485 - protein, 973 aa, Homo sapiens
MEVTCLLLLALIPFHCRGQGVYAPAQAQIVHAGQACVVKEDNISERVYTIREGDTLMLQCLVTGHPRPQVRWTKTAGSASDKFQETSVFNETLRIERIARTQGGRYYCKAENGVGVPAIKSIRVDVQYLDEPMLTVHQTVSDVRGNFYQEKTVFLRCTVNSNPPARFIWKRGSDTLSHSQDNGVDIYEPLYTQGETKVLKLKNLRPQDYASYTCQVSVRNVCGIPDKAITFRLTNTTAPPALKLSVNETLVVNPGENVTVQCLLTGGDPLPQLQWSHGPGPLPLGALAQGGTLSIPSVQARDSGYYNCTATNNVGNPAKKTVNLLVRSMKNATFQITPDVIKESENIQLGQDLKLSCHVDAVPQEKVTYQWFKNGKPARMSKRLLVTRNDPELPAVTSSLELIDLHFSDYGTYLCMASFPGAPVPDLSVEVNISSETVPPTISVPKGRAVVTVREGSPAELQCEVRGKPRPPVLWSRVDKEAALLPSGLPLEETPDGKLRLERVSRDMSGTYRCQTARYNGFNVRPREAQVQLNVQFPPEVEPSSQDVRQALGRPVLLRCSLLRGSPQRIASAVWRFKGQLLPPPPVVPAAAEAPDHAELRLDAVTRDSSGSYECSVSNDVGSAACLFQVSAKAYSPEFYFDTPNPTRSHKLSKNYSYVLQWTQREPDAVDPVLNYRLSIRQLNQHNAVVKAIPVRRVEKGQLLEYILTDLRVPHSYEVRLTPYTTFGAGDMASRIIHYTEPINSPNLSDNTCHFEDEKICGYTQDLTDNFDWTRQNALTQNPKRSPNTGPPTDISGTPEGYYMFIETSRPRELGDRARLVSPLYNASAKFYCVSFFYHMYGKHIGSLNLLVRSRNKGALDTHAWSLSGNKGNVWQQAHVPISPSGPFQIIFEGVRGPGYLGDIAIDDVTLKKGECPRKQTDPNKGARREGGGGAESGGSCAWRGFLSVEGGCLGLNRGSECLSDGNHVALTV

SEQ ID NO: 8486 - protein, 955 aa, Homo sapiens
MEVTCLLLLALIPFHCRGQGVYAPAQAQIVHAGQACVVKEDNISERVYTIREGDTLMLQCLVTGHPRPQVRWTKTAGSASDKFQETSVFNETLRIERIARTQGGRYYCKAENGVGVPAIKSIRVDVQYLDEPMLTVHQTVSDVRGNFYQEKTVFLRCTVNSNPPARFIWKRGSDTLSHSQDNGVDIYEPLYTQGETKVLKLKNLRPQDYASYTCQVSVRNVCGIPDKAITFRLTNTTAPPALKLSVNETLVVNPGENVTVQCLLTGGDPLPQLQWSHGPGPLPLGALAQGGTLSIPSVQARDSGYYNCTATNNVGNPAKKTVNLLVRSMKNATFQITPDVIKESENIQLGQDLKLSCHVDAVPQEKVTYQWFKNGKPARMSKRLLVTRNDPELPAVTSSLELIDLHFSDYGTYLCMASFPGAPVPDLSVEVNISSETVPPTISVPKGRAVVTVREGSPAELQCEVRGKPRPPVLWSRVDKEAALLPSGLPLEETPDGKLRLERVSRDMSGTYRCQTARYNGFNVRPREAQVQLNVQFPPEVEPSSQDVRQALGRPVLLRCSLLRGSPQRIASAVWRFKGQLLPPPPVVPAAAEAPDHAELRLDAVTRDSSGSYECSVSNDVGSAACLFQVSAKAYSPEFYFDTPNPTRSHKLSKNYSYVLQWTQREPDAVDPVLNYRLSIRQLNQHNAVVKAIPVRRVEKGQLLEYILTDLRVPHSYEVRLTPYTTFGAGDMASRIIHYTEPINSPNLSDNTCHFEDEKICGYTQDLTDNFDWTRQNALTQNPKRSPNTGPPTDISGTPEGYYMFIETSRPRELGDRARLVSPLYNASAKFYCVSFFYHMYGKHIGSLNLLVRSRNKGALDTHAWSLSGNKGNVWQQAHVPISPSGPFQIIFEGVRGPGYLGDIAIDDVTLKKGECPRKQTDPNKVVVMPGSGAPCQSSPQLWGPMAIFLLALQR

SEQ ID NO: 8487 - protein, 77 aa, Homo sapiens
MLQCLVTGHPRPQVRWTKTAGSASDKFQETSVFNETLRIERIARTQGGRYYCKAENGVGVPAIKSIRVDVQYLDEPM

SEQ ID NO: 8488 - protein, 129 aa, Homo sapiens
MLQCLVTGHPRPQVRWTKTAGSASDKFQETSVFNETLRIERIARTQGGRYYCKAENGVGVPAIKSIRVDVQYLDEPMLTVHQTVSDVRGNFYQEKTVFLRCTVNSNPPARFIWKRGSDTLSHSQDNGVD

SEQ ID NO: 8489 - protein, 87 aa, Homo sapiens
  SITE 1: note = misc_feature - Xaa can be any naturally occurring amino acid
XHKLSKNYSYVLQWTQREPDAVDPVLNYRLSIRQLNQHNAVVKAIPVRRVEKGQLLEYILTDLRVPHSYETTPATLRMRRSVAIPRT

SEQ ID NO: 8490 - protein, 160 aa, Homo sapiens
  SITE 1: note = misc_feature - Xaa can be any naturally occurring amino acid
XNQHNAVVKAIPVRRVEKGQLLEYILTDLRVPHSYEVRLTPYTTFGAGDMASRIIHYTEHNTCHFEDEKICGYTQDLTDNFDWTRQNALTQNPKRSPNTGPPTDISGTPEGYYMFIETSRPRELGDRARLVSPLYNASAKFYCVSFFYHMYGKHIGSLNL

SEQ ID NO: 8491 - protein, 87 aa, Homo sapiens
MQHRGFLLLTLLALLALTSAVAKKKADCKYKFENWGACDGGTGTKVRQGTLKKARYNAQCQETIRVTKPCTPKTKAKAKAKKGKGKD

SEQ ID NO: 8492 - protein, 49 aa, Homo sapiens
MQHRGFLLLTLLALLALTSAVAKKKDKVKKGGPGSECAEWAWGPCTPSS

SEQ ID NO: 8493 - protein, 131 aa, Homo sapiens
MQHRGFLLLTLLALLALTSAVAKKKDKVKKGGPGSECAEWAWGPCTPSSKDCGVGFREGTCGAQTQRIRCRVPCNWKKEFGADCKYKFENWGACDGGTGTKVRQGTLKKARYNAQCQETIRVTKPCTPKTK

SEQ ID NO: 8494 - protein, 143 aa, Homo sapiens
MQHRGFLLLTLLALLALTSAVAKKKDKVKKGGPGSECAEWAWGPCTPSSKDCGVGFREGTCGAQTQRIRCRVPCNWKKEFGADCKYKFENWGACDGGTGTKVRQGTLKKARYNAQCQETIRVTKPCTPKTKAKAKAKKGKGKD

SEQ ID NO: 8495 - protein, 143 aa, Homo sapiens; identical to SEQ ID NO: 8494

SEQ ID NO: 8496 - protein, 143 aa, Homo sapiens; identical to SEQ ID NO: 8494

SEQ ID NO: 8497 - protein, 143 aa, Homo sapiens; identical to SEQ ID NO: 8494

SEQ ID NO: 8498 - protein, 143 aa, Homo sapiens; identical to SEQ ID NO: 8494

SEQ ID NO: 8499 - protein, 156 aa, Homo sapiens
MQHRGFLLLTLLALLALTSAVAKKKDKVKKGGPGSECAEWAWGPCTPSSKDCGVGFREGTCGAQTQRIRCRVPCNWKKEFGADCKYKFENWGACDGGTGTKVRQGTLKKARYNAQCQETIRVTKPCTPKTKAKAKGQRKEKGVGLSRGAAPPPPRL

SEQ ID NO: 8500 - protein, 152 aa, Homo sapiens
MQHRGFLLLTLLALLALTSAVAKKKEEGALQCSVPGDHPRHQALHPQDQSKGQSQEREGKGLDAKPGCQGAPGVTWGLAHALPLPGPRCDPPVPSVCSLALINHALPCPSHSPAPPLSAQSGEGQGILGSLSLPQSNVSPRARFCSSPQFHY

SEQ ID NO: 8501 - protein, 123 aa, Homo sapiens
MGVTCVSQMPVAEGKSVQQTVELLTRKLEMLGAEKQGTFCVDCETYHTAASTLGSQGQTGKLMYVMHNSEYPLSCFALFENGPCLIADTNFDVLMVKLKGFFQSAKASKIETRGTRWSMAPVW

SEQ ID NO: 8502 - protein, 212 aa, Homo sapiens
MGVTCVSQMPVAEGKSVQQTVELLTRKLEMLGAEKQGTFCVDCETYHTAASTLGSQGQTGKLMYVMHNSEYPLSCFALFENGPCLIADTNFDVLMVKLKGFFQSAKASKIETRGTRYQYCDFLVKVGTVTMGPSARGISVEVEYGPCVVASDCWSLLLEFLQSFLGSHTPGAPAVFGNRHDAVYGPADTMVQYMELFNKIRKQQQVPVAGIR

SEQ ID NO: 8503 - protein, 145 aa, Homo sapiens
MGVTCVSQMPVAEGKSVQQTVELLTRKLEMLGAEKQGTFCVDCETYHTAASTLGSQGQTGKLMYVMHNSEYPLSCFALFENGPCLIADTNFDVLMVKLKGFFQSAKASKIETRGTRYQYCDFLVKVGTVTMGPSARGISVEVRPW

SEQ ID NO: 8504 - protein, 61 aa, Homo sapiens [sequence omitted]

SEQ ID NO: 8505 - protein, 140 aa, Homo sapiens
MPVAEGKSVQQTVELLTRKLEMLGAEKQGTFCVDCETYHTAASTLGSQGQTGKLMYVMHNSEYPLSCFALFENGPCLIADTNFDVLMVKLKGFFQSAKASKIETRGTRYQYCDFLVKVGTVTMGPSARGISVEVEYGPCV

SEQ ID NO: 8506 - protein, 1140 aa, Homo sapiens
MVISLNSCLSFICLLLCHWIGTASPLNLEDPNVCSHWESYSVTVQESYPHPFDQIYYTSCTDILNWFKCTRHRVSYRTAYRHGEKTMYRRKSQCCPGFYESGEMCVPHCADKCVHGRCIAPNTCQCEPGWGGTNCSSACDGDHWGPHCTSRCQCKNGALCNPITGACHCAAGFRGWRCEDRCEQGTYGNDCHQRCQCQNGATCDHVTGECRCPPGYTGAFCEDLCPPGKHGPQCEQRCPCQNGGVCHHVTGECSCPSGWMGTVCGQPCPEGRFGKNCSQECQCHNGGTCDAATGQCHCSPGYTGERCQDECPVGTYGVLCAETCQCVNGGKCYHVSGACLCEAGFAGERCEARLCPEGLYGIKCDKRCPCHLENTHSCHPMSGECACKPGWSGLYCNETCSPGFYGEACQQICSCQNGADCDSVTGKCTCAPGFKGIDCSTPCPLGTYGINCSSRCGCKNDAVCSPVDGSCTCKAGWHGVDCSIRCPSGTWGFGCNLTCQCLNGGACNTLDGTCTCAPGWRGEKCELPCQDGTYGLNCAERCDCSHADGCHPTTGHCRCLPGWSGVHCDSVCAEGRWGPNCSLPCYCKNGASCSPDDGICECAPGFRGTTCQRICSPGFYGHRCSQTCPQCVHSSGPCHHITGLCDCLPGFTGALCNEVCPSGRFGKNCAGICTCTNNGTCNPIDRSCQCYPGWIGSDCSQPCPPAHWGPNCIHTCNCHNGAFCSAYDGECKCTPGWTGLYCTQRCPLGFYGKDCALICQCQNGADCDHISGQCTCRTGFMGRHCEQKCPSGTYGYGCRQICDCLNNSTCDHITGTCYCSPGWKGARCDQAGVIIVGNLNSLSRTSTALPADSYQIGAIAGIIILVLVVLFLLALFIIYRHKQKGKESSMPAVTYTPAMRVVNADYTISGTLPHSNGGNANSHYFTNPSYHTLTQCATSPHVNNRDRMTVTKSKNNQLFVNLKNVNPGKRGPVGDCTGTLPADWKHGGYLNELGAFGLDRSYMGKSLKDLGKNSEYNSSNCSLSSSENPYATIKDPPVLIPKSSECGYVEMKSPARRDSPYAEINNSTSANRNVYEVEPTVSVVQGVFSNNGRLSQDPYDLPKNSHIPCHYDLLPVRDSSSSPKQEDSGGSSSNSSSSSE

SEQ ID NO: 8507 - protein, 567 aa, Homo sapiens
MVISLNSCLSFICLLLCHWIGTASPLNLEDPNVCSHWESYSVTVQESYPHPFDQIYYTSCTDILNWFKCTRHRVSYRTAYRHGEKTMYRRKSQCCPGFYESGEMCVPHCADKCVHGRCIAPNTCQCEPGWGGTNCSSACDGDHWGPHCTSRCQCKNGALCNPITGACHCAAGFRGWRCEDRCEQGTYGNDCHQRCQCQNGATCDHVTGECRCPPGYTGAFCEDLCPPGKHGPQCEQRCPCQNGGVCHHVTGECSCPSGWMGTVCGQPCPEGRFGKNCSQECQCHNGGTCDAATGQCHCSPGYTGERCQDECPVGTYGVLCAETCQCVNGGKCYHVSGACLCEAGFAGERCEARLCPEGLYGIKCDKRCPCHLENTHSCHPMSGECACKPGWSGLYCNETCSPGFYGEACQQICSCQNGADCDSVTGKCTCAPGFKGIDCSTPCPLGTYGINCSSRCGCKNDAVCSPVDGSCTCKAGWHGVDCSIRCPSGTWGFGCNLTCQCLNGGACNTLDGTCTCAPGWRGEKCELPCQDGTYGLNCAERCDCSHADGCHPTTGHCRCLPGWSGLF

SEQ ID NO: 8508 - protein, 1140 aa, Homo sapiens; identical to SEQ ID NO: 8506

SEQ ID NO: 8509 - protein, 567 aa, Homo sapiens; identical to SEQ ID NO: 8507

SEQ ID NO: 8510 - protein, 1229 aa, Homo sapiens
MGASRDRGLAALWCLGLLGGLARVAGTHYRYLWRGCYPCHLGQAGYPVSAGDQRPDVDECRTHNGGCQHRCVNTPGSYLCECKPGFRLHTDSRTCLAINSCALGNGGCQHHCVQLTITRHRCQCRPGFQLQEDGRHCVRRSPCANRNGSCMHRCQVVRGLARCECHVGYQLAADGKACEDVDECAAGLAQCAHGCLNTQGSFKCVCHAGYELGADGRQCYRIEMEIVNSCEANNGGCSHGCSHTSAGPLCTCPRGYELDTDQRTCIDVDDCADSPCCQQVCTNNPGGYECGCYAGYRLSADGCGCEDVDECASSRGGCEHHCTNLAGSFQCSCEAGYRLHEDRRGCSPLEEPMVDLDGELPFVRPLPHIAVLQDELPQLFQDDDVGADEEEAELRGEHTLTEKFVCLDDSFGHDCSLTCDDCRNGGTCLLGLDGCDCPEGWTGLICNETCPPDTFGKNCSFSCSCQNGGTCDSVTGACRCPPGVSGTNCEDGCPKGYYGKHCRKKCNCANRGRCHRLYGACLCDPGLYGRFCHLTCPPWAFGPGCSEECQCVQPHTQSCDKRDGSCSCKAGFRGERCQAECELGYFGPGCWQACTCPVGVACDSVSGECGKRCPAGFQGEDCGQECPVGTFGVNCSSSCSCGGAPCHGVTGQCRCPPGRTGEDCEADCPEGRWGLGCQEICPACQHAARCDPETGACLCLPGFVGSRCQDVCPAGWYGPSCQTRCSCANDGHCHPATGHCSCAPGWTGFSCQRACDTGHWGPDCSHPCNCSAGHGSCDAISGLCLCEAGYVGPRCEQQCPQGHFGPGCEQRCQCQHGAACDHVSGACTCPAGWRGTFCEHACPAGFFGLDCRSACNCTAGAACDAVNGSCLCPAGRRGPRCAEKCLPRDVRAGCRHSGGCLNGGLCDPHTGRCLCPAGWTGDKCQSPCLRGWFGEACAQRCSCPPGAACHHVTGACRCPPGFTGSGCEQGCPPGRYGPGCEQLCGCLNGGSCDAATGACRCPTGFLGTDCNLTCPQGRFGPNCTHVCGCGQGAACDPVTGTCLCPPGRAGVRCERGCPQNRFGVGCEHTCSCRNGGLCHASNGSCSCGLGWTGRHCELACPPGRYGAACHLECSCHNNSTCEPATGTCRCGPGFYGQACEHRRSGATCNLDCRRGQFGPSCTLHCDCGGGADCDPVSGQCHCVDGYMGPTCREGGPLRLPENPSLAQGSAGTLPASSRPTSRSGGPARH

SEQ ID NO: 8511 - protein, 1541 aa, Homo sapiens
MSFLEEARAAGRAVVLALVLLLLPAVPVGASVPPRPLLPLQPGMPHVCAEQELTLVGRRQPCVQALSHTVPVWKAGCGWQAWCVGHERRTVYYMGYRQVYTTEARTVLRCCRGWMQQPDEEGCLSAECSASLCFHGGRCVPGSAQPCHCPPGFQGPRCQYDVDECRTHNGGCQHRCVNTPGSYLCECKPGFRLHTDSRTCLAINSCALGNGGCQHHCVQLTITRHRCQCRPGFQLQEDGRHCVRRSPCANRNGSCMHRCQVVRGLARCECHVGYQLAADGKACEDVDECAAGLAQCAHGCLNTQGSFKCVCHAGYELGADGRQCYRIEMEIVNSCEANNGGCSHGCSHTSAGPLCTCPRGYELDTDQRTCIDVDDCADSPCCQQVCTNNPGGYECGCYAGYRLSADGCGCEDVDECASSRGGCEHHCTNLAGSFQCSCEAGYRLHEDRRGCSPLEEPMVDLDGELPFVRPLPHIAVLQDELPQLFQDDDVGADEEEAELRGEHTLTEKFVCLDDSFGHDCSLTCDDCRNGGTCLLGLDGCDCPEGWTGLICNETCPPDTFGKNCSFSCSCQNGGTCDSVTGACRCPPGVSGTNCEDGCPKGYYGKHCRKKCNCANRGRCHRLYGACLCDPGLYGRFCHLTCPPWAFGPGCSEECQCVQPHTQSCDKRDGSCSCKAGFRGERCQAECELGYFGPGCWQACTCPVGVACDSVSGECGKRCPAGFQGEDCGQECPVGTFGVNCSSSCSCGGAPCHGVTGQCRCPPGRTGEDCEADCPEGRWGLGCQEICPACQHAARCDPETGACLCLPGFVGSRCQDVCPAGWYGPSCQTRCSCANDGHCHPATGHCSCAPGWTGFSCQRACDTGHWGPDCSHPCNCSAGHGSCDAISGLCLCEAGYVGPRCEQQCPQGHFGPGCEQRCQCQHGAACDHVSGACTCPAGWRGTFCEHACPAGFFGLDCRSACNCTAGAACDAVNGSCLCPAGRRGPRCAETCPAHTYGHNCSQACACFNGASCDPVHGQCHCAPGWMGPSCLQACPAGLYGDNCRHSCLCQNGGTCDPVSGHCACPEGWAGLACEKECLPRDVRAGCRHSGGCLNGGLCDPHTGRCLCPAGWTGDKCQSPCLRGWFGEACAQRCSCPPGAACHHVTGACRCPPGFTGSGCEQACPPGSFGEDCAQMCQCPGENPACHPATGTCSCAAGYHGPSCQQRCPPGRYGPGCEQLCGCLNGGSCDAATGACRCPTGFLGTDCNLTCPQGRFGPNCTHVCGCGQGAACDPVTGTCLCPPGRAGVRCERGCPQNRFGVGCEHTCSCRNGGLCHASNGSCSCGLGWTGRHCELACPPGRYGAACHLECSCHNNSTCEPATGTCRCGPGFYGQACEHPCPPGFHGAGCQGLCWCQHGAPCDPISGRCLCPAGFHGHFCERGCEPGSFGEGCHQRCDCDGGAPCDPVTGLCLCPPGRSGATCNLDCRRGQFGPSCTLHCDCGGGADCDPVSGQCHCVDGYMGPTCREGGPLRLPENPSLAQGSAGTLPASSRPTSRSGGPARH

SEQ ID NO: 8512 - protein, 1323 aa, Homo sapiens
MSFLEEARAAGRAVVLALVLLLLPAVPVGASVPPRPLLPLQPGMPHVCAEQELTLVGRRQPCVQALSHTVPVWKAGCGWQAWCVGHERRTVYYMGYRQVYTTEARTVLRCCRGWMQQPDEEGCLSDVGECANANGGCAGRCRDTVGGFYCRWPPPSHQLQGDGETCQDVDECRTHNGGCQHRCVNTPGSYLCECKPGFRLHTDSRTCLAINSCALGNGGCQHHCVQLTITRHRCQCRPGFQLQEDGRHCVRRSPCANRNGSCMHRCQVVRGLARCECHVGYQLAADGKACEDVDECAAGLAQCAHGCLNTQGSFKCVCHAGYELGADGRQCYRIEMEIVNSCEANNGGCSHGCSHTSAGPLCTCPRGYELDTDQRTCIDVDDCADSPCCQQVCTNNPGGYECGCYAGYRLSADGCGCEDVDECASSRGGCEHHCTNLAGSFQCSCEAGYRLHEDRRGCSPLEEPMVDLDGELPFVRPLPHIAVLQDELPQLFQDDDVGADEEEAELRGEHTLTEKFVCLDDSFGHDCSLTCDDCRNGGTCLLGLDGCDCPEGWTGLICNETCPPDTFGKNCSFSCSCQNGGTCDSVTGACRCPPGVSGTNCEDGCPKGYYGKHCRKKCNCANRGRCHRLYGACLCDPGLYGRFCHLTCPPWAFGPGCSEECQCVQPHTQSCDKRDGSCSCKAGFRGERCQAECELGYFGPGCWQACTCPVGVACDSVSGECGKRCPAGFQGEDCGQECPVGTFGVNCSSSCSCGGAPCHGVTGQCRCPPGRTGEDCEADCPEGRWGLGCQEICPACQHAARCDPETGACLCLPGFVGSRCQDVCPAGWYGPSCQTRCSCANDGHCHPATGHCSCAPGWTGFSCQRACDTGHWGPDCSHPCNCSAGHGSCDAISGLCLCEAGYVGPRCEQQCPQGHFGPGCEQRCQCQHGAACDHVSGACTCPAGWRGTFCEHACPAGFFGLDCRSACNCTAGAACDAVNGSCLCPAGRRGPRCAETCPAHTYGHNCSQACACFNGASCDPVHGQCHCAPGWMGPSCLQACPAGLYGDNCRHSCLCQNGGTCDPVSGHCACPEGWAGLACEKECLPRDVRAGCRHSGGCLNGGLCDPHTGRCLCPAGWTGDKCQSPCAKGTFGPHCEGRCACRWGGPCHLATGACLCPPGWRGAPGVRMPACGAGLERPVPSAAAARLALPATTSLGPAAVPLASLAPAASRPAHPAALGRTVRRCASVPVRTRPATLPPGPAHVLLATTAPAASNDVRPGGMGQAVNSCVGVSTGAPVMRPRGPAAAPLGSSGRTATSPVRRAASAPTAPTCVGVGRGRPATL

SEQ ID NO: 8513 - protein, 248 aa, Homo sapiens
  SITE 1: note = misc_feature - Xaa can be any naturally occurring amino acid
XDAATGACRCPTGFLGTDCNLTCPQGRFGPNCTHVCGCGQGAACDPVTGTCLCPPGRAGVRCERGCPQNRFGVGCEHTCSCRNGGLCHASNGSCSCGLGWTGRHCELACPPGRYGAACHLECSCHNNSTCEPATGTCRCGPGFYGQACEHPCPPGFHGAGCQGLCWCQHGAPCDPISGRCLCPAGFHGHFCERDCRRGQFGPSCTLHCDCGGGADCDPVSGQCHCVDGYMGPTCREGGPLRLPENPSL

SEQ ID NO: 8514 - protein, 1274 aa, Homo sapiens
MAVRQAATAGTPGPRREEEAALLFERAHYRHDPRWLLPVTPRLCLACALELLPDPGVSLVRKKHMLSCFQDALVRHTSLVTQLVSQDQRVCIHFISVLFGLLCSMEDGSVTDLCIEVLIQITTQLKLEQTIRCLLDECHKELCNMPSMRGSLATLTLLGKLVDAIPALADELVMEHGNLMEHLLRGLVYPSEGIQASVCYLYGKLYSSPVAAEMLSGHFREKLFPLFLSILDGAQTKELQINCLGLLRQLLKYDLFVSMIMNQDGLGESAKNIEGSSGNTSLPLVLKKLLLSRDETLQVASAHCITAVLVHSPAKHASAFIHADIPEFLFEHLSSSSEVLVWSSCNCLTLLVEEPLFFSKCHTVYGIEAVVRSLQGSLKMNNIELHKQGLLLFAEILTRQPEEIKLFTSSAMCRDAGRALQEAVSSPVLEVAAEALKATSAFLRKDHQSTPPVQYGELQALLEAMLNRCAEFSQTLLSRRPLGHASSRDSEKAILQRGKFLLSTLEGFRSACRLAIEFQSEPSAQENPFTAPSAKKEDTLEAFSEFLLSACDSLCIPMVMRHLEQTTHPALMEVFLSILHNLFVIVPHMKEKFSKKLASSSFIRLTLELKARFCSGLSHSALNQVCSNFLYYMCLNLLSAPEKTGPPSKEELSAVSELLQHGLPQISSRSPESLAFLSDRQYMEGAARQRQYCILLLFYLAYIHEDRFVSEAELFEAVQSFLLSLQDQGERPPLVVFKASIYLLAICQDKDNTLRETMVSAIRKFLEGIPDLQLVYTHHPLLLRFFLLYPELMSRYGHRVLELWFFWEESSYEELDDVTSAGQPALPASLVVLFQLLRSIPSILLILLDLIYSSPVDTAHKVLISLRTFLRRNEDIQVGGLIRGHFLLILQRLLVEHGASPSGASGNLPLLLSLLSLMQLRNVSEQELDSVAMKLLHQVSKLCGKCSPTDVDILQPSFNFLYWSLHQTTPSSQKRAAAVLLSSTGLMELLEKMLALTLAKADSPRTALLCSAWLLTASFSAQQHKGSLQVHQTLSVEMDQVLKALSFPKKKAALLSAAILCFLRTALRQSFSSALVALVPSGAQPLPATKDTVLAPLRMSQVRSLVIGLQNLLVQKDPLLSQACVGCLEALLDYLDARSPDIALHVASQPWNRFLLFTLLDAGENSFLRPEILRLMTLFMRYRSSSVLSHEEVGDVLQGVALADLSTLSNTTLQALHGFFQQLQSMGHLADHSMAQTLQASLEGLPPSTSSGQPPLQDMLCLGGVAVSLSHIRN

SEQ ID NO: 8515 - protein, 238 aa, Homo sapiens
MLALTLAKADSPRTALLCSAWLLTASFSAQQHKGSLQVHQTLSVEMDQVLKALSFPKKKAALLSAAILCFLRTALRQSFSSALVALVPSGAQPLPATKDTVLAPLRMSQVRSLVIGLQNLLVQKDPLLSQACVGCLEALLDYLDARSPDIALHVASQPWNRFLLFTLLDAGENSFLRPEILRLMTLLQSMGHLADHSMAQTLQASLEGLPPSTSSGQPPLQDMLCLGGVAVSLSHIRN

SEQ ID NO: 8516 - protein, 506 aa, Homo sapiens
MNQDGLGESAKNIEGSSGNTSLPLVLKKLLLSRDETLQVASAHCITAVLVHSPAKHASAFIHADIPEFLFEHLSSSSEVLVWSSCNCLTLLVEEPLFFSKCHTVYGIEAVVRSLQGSLKMNNIELHKQGLLLFAEILTRQPEEIKLFTSSAMCRDAGRALQEAVSSPVLEVAAEALKATSAFLRKDHQSTPPVQYGELQALLEAMLNRCAEFSQTLLSRRPLGHASSRDSEKAILQRGKFLLSTLEGFRSACRLAIEFQSEPSAQENPFTAPSAKKEDTLEAFSEFLLSACDSLCIPMVMRHLEQTTHPALMEVFLSILHNLFVIVPHMKEKFSKKLASSSFIRLTLELKARFCSGLSHSALNQVCSNFLYYMCLNLLSAPEKTGPPSKEELSAVSELLQHGLPQISSRSPESLAFLSDRQYMEGAARQRQYCILLLFYLAYIHEDRFVSEAELFEAVQSFLLSLQDQGERPPLVVFKASIYLLAICQDKDNTLREQLHCSLISIS

SEQ ID NO: 8517 - protein, 63 aa, Homo sapiens
  SITE 1: note = misc_feature - Xaa can be any naturally occurring amino acid
XRSSSVLSHEELQSMGHLADHSMAQTLQASLEGLPPSTSSGQPPLQDMLCLGGVAVSLSHIRN

SEQ ID NO: 8518 - protein, 385 aa, Homo sapiens
MDVQKWYLRTSKLALALAIIRSKPADKSSREYTEHLAMLLSEEQSKWRSKVEILEAEVMQLRQKLLVSRLCSGSFKSGYVSSQLEAQEPKSSESTLTSMEDSGCDLSNEQRTESSDLSQHFVESCTPTHFPPLPLVKRPCAILQNPLSSHMQFLQYLLELKNLTESGNLKRDLTHFEKDSSTVSDSVFQLLDGLITFYRNPKLPFSRFWTEAVGTLASLISDYNLSSHILKKCSKKLEEFEKTLLHAILGNNHINQFQVQHYVSQSLVTLGNCSLLRKSIISLLLSEVNGFADDLGAINQEQASYDVSRYENIFYLFWVLEQLLQKETEEGNTSSIGHDDQEIKKFLQKHDETIFQLSDAFPLFTFYLWRVGILLSSAQIETLRK

SEQ ID NO: 8519 - protein, 325 aa, Homo sapiens
MAQGLRLQGSRRKGRHPLFPLLALIFEKCELATCTPREPGVAGGDVCSSESFNEDIAVFAKQIRAEKPLFSSNPELDNLMIQAIQVLRFHLLELEKVHELCDNFCHRYISCLKGKMPIDLVIDDREGGSKSDSEDITRSANLTDQPSWNRDHDDTASTRSGGTPGPSSGGHTSHSGDNSSEQGDGLDNSVASPSTGDDDDPDKDKKRHKKRGIFPKVATNIMRAWLFQHLTHPYPSEEQKKQLAQDTGLTILQVNNWFINARRRIVQPMIDQSNRAVSQGTPYNPDGQPMGGFVMDGQQHMGIRAPGPMSGMGMNMGMEGQWHYM

SEQ ID NO: 8520 - protein, 390 aa, Homo sapiens
MAQRYDDLPHYGGMDGVGIPSTMYGDPHAARSMQPVHHLNHGPPLHSHQYPHTAHTNAMAPSMGSSVNDALKRDKDAIYGHPLFPLLALIFEKCELATCTPREPGVAGGDVCSSESFNEDIAVFAKQIRAEKPLFSSNPELDNLMIQAIQVLRFHLLELEKVHELCDNFCHRYISCLKGKMPIDLVIDDREGGSKSDSEDITRSANLTDQPSWNRDHDDTASTRSGGTPGPSSGGHTSHSGDNSSEQGDGLDNSVASPSTGDDDDPDKDKKRHKKRGIFPKVATNIMRAWLFQHLTHPYPSEEQKKQLAQDTGLTILQVNNWFINARRRIVQPMIDQSNRAVSQGTPYNPDGQPMGGFVMDGQQHMGIRAPGPMSGMGMNMGMEGQWHYM

SEQ ID NO: 8521 - protein, 370 aa, Homo sapiens
MAQRYDDLPHYGGMDGVGIPSTMYGDPHAARSMQPVHHLNHGPPLHSHQYPHTAHTNAMAPSMGSSVNDALKRDKDAIYGHPLFPLLALIFEKCELATCTPREPGVAGGDVCSSESFNEDIAVFAKQIRAEKPLFSSNPELDNLMIQAIQVLRFHLLELEKVHELCDNFCHRYISCLKGKMPIDLVIDDREGGSKSDSEDITRSANLTDQPSWNRDHDDTASTRSGGTPGPSSGGHTSHSGDNSSEQGDGLDNSVASPSTGDDDDPDKDKKRHKKRGIFPKVATNIMRAWLFQHLTHPYPSEEQKKQLAQDTGLTILQVNNWFINARRRIVQPMIDQSNRAGKSPIVTVFKSRKRKPSSSHSPGGPLPGK

SEQ ID NO: 8522 - protein, 378 aa, Homo sapiens
MAQRYDDLPHYGGMDGVGIPSTMYGDPHAARSMQPVHHLNHGPPLHSHQYPHTAHTNAMAPSMGSSVNDALKRDKDAIYGHPLFPLLALIFEKCELATCTPREPGVAGGDVCSSESFNEDIAVFAKQIRAEKPLFSSNPELDNLMIQAIQVLRFHLLELEKVHELCDNFCHRYISCLKGKMPIDLVIDDREGGSKSDSEDITRSANLTDQPSWNRDHDDTASTRSGGTPGPSSGGHTSHSGDNSSEQGDGLDNSVASPSTGDDDDPDKDKKRHKKRGIFPKVATNIMRAWLFQHLTHPYPSEEQKKQLAQDTGLTILQVNNWFINARRRIVQPMIDQSNRAVSQGTPYNPDGQPMGGFVMDGQQHMGIRAPGKTLFLW

SEQ ID NO: 8523 - protein, 463 aa, Homo sapiens
MQYDDLPHYGGMDGVGIPSTMYGDPHAARSMQPVHHLNHGPPLHSHQYPHTAHTNAMAPSMGSSVNDALKRDKDAIYGHPLFPLLALIFEKCELATCTPREPGVAGGDVCSSESFNEDIAVFAKQIRAEKPLFSSNPELDNLMIQAIQVLRFHLLELEKVHELCDNFCHRYISCLKGKMPIDLVIDDREGGSKSDSEDITRSANLTDQPSWNRDHDDTASTRSGGTPGPSSGGHTSHSGDNSSEQGDGLDNSVASPSTGDDDDPDKDKKRHKKRGIFPKVATNIMRAWLFQHLTHPYPSEEQKKQLAQDTGLTILQVNNWFINARRRIVQPMIDQSNRAVSQGTPYNPDGQPMGGFVMDGQQHMGIRAPGLQSMPGEYVARGGPMGVSMGQPSYTQPQMPPHPAQLRHGPPMHTYIPGHPHHPTVMMHGGPPHPGMPMSASSPTVLNTGDPTMSGQVMDIHAQ

SEQ ID NO: 8524 - protein, 121 aa, Homo sapiens
  SITE 1: note = misc_feature - Xaa can be any naturally occurring amino acid
XLCFESPEISRPVFPCLQMIQAIQVLRFHLLELEKVHELCDNFCHRYISCLKGKMPIDLVIDDREGGSKSDSEDITRSANLTDQPSWNRDHDDTASTRSGGTPGPSSGGHTSHSGDNSSEQ

SEQ ID NO: 8525 - protein, 126 aa, Homo sapiens
FPKVATNIMRAWLFQHLSAGAGRHVIAPSLRLPWSPSWGAQRRSEAPVLPDVCLGLGSPSPGPRWARPWGSDCGRPGRQSDSCWWLQHPYPSEEQKKQLAQDTGLTILQVNNWFINARRRIVQPMI

SEQ ID NO: 8526 - protein, 404 aa, Homo sapiens
MARRYDELPHYPGIVDGPAALASFPETVPAVPGPYGPHRPPQPLPPGLDSDGLKREKDEIYGHPLFPLLALVFEKCELATCSPRDGAGAGLGTPPGGDVCSSDSFNEDIAAFAKQVRSERPLFSSNPELDNLMIQAIQVLRFHLLELEKGKMPIDLVIEDRDGGCREDFEDYPASCPSLPDQNNMWIRDHEDSGSVHLGTPGPSSGGLASQSGDNSSDQGDGLDTSVASPSSGGEDEDLDQERRRNKKRGIFPKVATNIMRAWLFQHLSRRSEAPVLPDVCLGLGSPSPGPRWARPWGSDCGRPGRQSDSCWWLQHPYPSEEQKKQLAQDTGLTILQVNNWFINARRRIVQPMIDQSNRTGQGAAFSPEGQPIGGYTETQPHVAVRPPGSVGMSLNLEGEWHYL

SEQ ID NO: 8527 - protein, 358 aa, Homo sapiens
MARRYDELPHYPGIVDGPAALASFPETVPAVPGPYGPHRPPQPLPPGLDSDGLKREKDEIYGHPLFPLLALVFEKCELATCSPRDGAGAGLGTPPGGDVCSSDSFNEDIAAFAKQVRSERPLFSSNPELDNLMIQAIQVLRFHLLELEKGKMPIDLVIEDRDGGCREDFEDYPASCPSLPDQNNMWIRDHEDSGSVHLGTPGPSSGGLASQSGDNSSDQGDGLDTSVASPSSGGEDEDLDQERRRNKKRGIFPKVATNIMRAWLFQHLSHPYPSEEQKKQLAQDTGLTILQVNNWFINARRRIVQPMIDQSNRTGQGAAFSPEGQPIGGYTETQPHVAVRPPGSVGMSLNLEGEWHYL

SEQ ID NO: 8528 - protein, 375 aa, Homo sapiens
MARRYDELPHYPGIVDGPAALASFPETVPAVPGPYGPHRPPQPLPPGLDSDGLKREKDEIYGHPLFPLLALVFEKCELATCSPRDGAGAGLGTPPGGDVCSSDSFNEDIAAFAKQVRSERPLFSSNPELDNLMIQAIQVLRFHLLELEKVHDLCDNFCHRYITCLKGKMPIDLVIEDRDGGCREDFEDYPASCPSLPDQNNMWIRDHEDSGSVHLGTPGPSSGGLASQSGDNSSDQGDGLDTSVASPSSGGEDEDLDQERRRNKKRGIFPKVATNIMRAWLFQHLSHPYPSEEQKKQLAQDTGLTILQVNNWFINARRRIVQPMIDQSNRTGQGAAFSPEGQPIGGYTETQPHVAVRPPGSVGMSLNLEGEWHYL

SEQ ID NO: 8529 - protein, 421 aa, Homo sapiens
MARRYDELPHYPGIVDGPAALASFPETVPAVPGPYGPHRPPQPLPPGLDSDGLKREKDEIYGHPLFPLLALVFEKCELATCSPRDGAGAGLGTPPGGDVCSSDSFNEDIAAFAKQVRSERPLFSSNPELDNLMIQAIQVLRFHLLELEKVHDLCDNFCHRYITCLKGKMPIDLVIEDRDGGCREDFEDYPASCPSLPDQNNMWIRDHEDSGSVHLGTPGPSSGGLASQSGDNSSDQGDGLDTSVASPSSGGEDEDLDQERRRNKKRGIFPKVATNIMRAWLFQHLSRRSEAPVLPDVCLGLGSPSPGPRWARPWGSDCGRPGRQSDSCWWLQHPYPSEEQKKQLAQDTGLTILQVNNWFINARRRIVQPMIDQSNRTGQGAAFSPEGQPIGGYTETQPHVAVRPPGSVGMSLNLEGEWHYL

SEQ ID NO: 8530 - protein, 421 aa, Homo sapiens; identical to SEQ ID NO: 8529

SEQ ID NO: 8531 - protein, 221 aa, Homo sapiens [sequence omitted]

SEQ ID NO: 8532 - protein, 463 aa, Homo sapiens
MCTLCTTMRGSYRRCPWISLSVCLSLCLCHCLLTPLSPSLFPPSQTLPSLPLGPPAHMSGISAWTGSSLPTEAAPGDLEGFKLGGSDTWGPQYDELPHYPGIVDGPAALASFPETVPAVPGPYGPHRPPQPLPPGLDSDGLKREKDEIYGHPLFPLLALVFEKCELATCSPRDGAGAGLGTPPGGDVCSSDSFNEDIAAFAKQVRSERPLFSSNPELDNLMIQAIQVLRFHLLELEKVHDLCDNFCHRYITCLKGKMPIDLVIEDRDGGCREDFEDYPASCPSLPDQNNMWIRDHEDSGSVHLGTPGPSSGGLASQSGDNSSDQGDGLDTSVASPSSGGEDEDLDQERRRNKKRGIFPKVATNIMRAWLFQHLSHPYPSEEQKKQLAQDTGLTILQVNNWFINARRRIVQPMIDQSNRTGQGAAFSPEGQPIGGYTETQPHVAVRPPGSVGMSLNLEGEWHYL

SEQ ID NO: 8533 - protein, 250 aa, Homo sapiens
PPPSLSTPALPPWVAPPSTPVPPQVHDLCDNFCHRYITCLKGKMPIDLVIEDRDGGCREDFEDYPASCPSLPDQNNMWIRDHEDSGSVHLGTPGPSSGGLASQSGDNSSDQGDGLDTSVASPSSGGEDEDLDQERRRNKKRGIFPKVATNIMRAWLFQHLSHPYPSEEQKKQLAQDTGLTILQVNNWFINARRRIVQPMIDQSNRTGQGAAFSPEGQPIGGYTETQPHVAVRPPGSVGMSLNLEGEWHYL

SEQ ID NO: 8534 - protein, 178 aa, Homo sapiens
  SITE 1: note = misc_feature - Xaa can be any naturally occurring amino acid
XGLSLPSQVRSERPLFSSNPELDNLGKMPIDLVIEDRDGGCREDFEDYPASCPSLPDQNNMWIRDHEDSGSVHLGTPGPSSGGLASQSGDNSSDQGDGLDTSVASPSSGGEDEDLDQERRRNKKRGIFPKVATNIMRAWLFQHLSRRSEAPVLPDVCLGLGSPSPGPRWARPWGSDCG

SEQ ID NO: 8535 - protein, 302 aa, Homo sapiens
MRGPSGALWLLLALRTVLGGMEVRWCATSDPEQHKCGNMSEAFREAGIQPSLLCVRGTSADHCVQLIAAQEADAITLDGGAIYEAGKEHGLKPVVGEVYDQEVGTSYYAVAVVRRSSHVTIDTLKGVKSCHTGINRTVGWNVPVGYLVESGRLSVMGCDVLKAVSDYFGGSCVPGAGETSYSESLCRLCRGDSSGEGVCDKSPLERYYDYSGAFRCLAEGAGDVAFVKHSTVLENTDESPSRRQTWTRSEEEEGECPAHEEARRTMRSSAGQAWKWAPVHRPQDESDKGEFGKRAKSRDMLG

SEQ ID NO: 8536 - protein, 738 aa, Homo sapiens
MRGPSGALWLLLALRTVLGGMEVRWCATSDPEQHKCGNMSEAFREAGIQPSLLCVRGTSADHCVQLIAAQEADAITLDGGAIYEAGKEHGLKPVVGEVYDQEVGTSYYAVAVVRRSSHVTIDTLKGVKSCHTGINRTVGWNVPVGYLVESGRLSVMGCDVLKAVSDYFGGSCVPGAGETSYSESLCRLCRGDSSGEGVCDKSPLERYYDYSGAFRCLAEGAGDVAFVKHSTVLENTDGKTLPSWGQALLSQDFELLCRDGSRADVTEWRQCHLARVPAHAVVVRADTDGGLIFRLLNEGQRLFSHEGSSFQMFSSEAYGQKDLLFKDSTSELVPIATQTYEAWLGHEYLHAMKGLLCDPNRLPPYLRWCVLSTPEIQKCGDMAVAFRRQRLKPEIQCVSAKSPQHCMERIQAEQVDAVTLSGEDIYTAGKTYGLVPAAGEHYAPEDSSNSYYVVAVVRRDSSHAFTLDELRGKRSCHAGFGSPAGWDVPVGALIQRGFIRPKDCDVLTAVSEFFNASCVPVNNPKNYPSSLCALCVGDEQGRNKCVGNSQERYYGYRGAFRCLVENAGDVAFVRHTTVFDNTNGHNSEPWAAELRSEDYELLCPNGARAEVSQFAACNLAQIPPHAVMVRPDTNIFTVYGLLDKAQDLFGDDHNKNGFKMFDSSNYHGQDLLFKDATVRAVPVGEKTTYRGWLGLDYVAALEGMSSQQCSGAAAPAPGAPLLPLLLPALAARLLPPAL

SEQ ID NO: 8537 - protein, 181 aa, Homo sapiens
MRGPSGALWLLLALRTVLGGMEVRWCATSDPEQHKCGNMSEAFREAGIQPSLLCVRGTSADHCVQLIAAQEADAITLDGGAIYEAGKEHGLKPVVGEVYDQEVGTSYYAVAVVRRSSHVTIDTLKGVKSCHTGINRTVGWNVPVGYLVESGRLSVMGCDVLKGPKRGADLHPESSQVAHQP

SEQ ID NO: 8538 - protein, 96 aa, Homo sapiens
MRVFCVGLLLFSVTWAAPTFQPQTEKTKQSCVEEQRAPQASLLQNSGSQNLPDPHPMPRPTSRSASGPVAAGVILMDLSRKKKTKTILVFTIWARE

SEQ ID NO: 8539 - protein, 556 aa, Homo sapiens
MRVFCVGLLLFSVTWAAPTFQPQTEKTKQSCVEEQRITYKGHYEKHGHYVFKCVYMSPEKKNQTDVKQEEKNKDNIGFHHLGKRINQELSSKENIVQERKKDLSLSEASENKGSSKSQNYFTNRQRLNKEYSISNKENTHNGLRMSIYPKSTGNKGFEDGDDAISKLHDQEEYGAALIRNNMQHIMGPVTAIKLLGEENKENTPRNVLNIIPASMNYAKAHSKDKKKPQRDSQAQKSPVKSKSTHRIQHNIDYLKHLSKVKKIPSDFEGSGYTDLQERGDNDISPFSGDGQPFKDIPGKGEATGPDLEGKDIQTGFAGPSEAESTHLDTKKPGYNEIPEREENGGNTIGTRDETAKEADAVDVSLVEGSNDIMGSTNFKELPGREGNRVDAGSQNAHQGKVEFHYPPAPSKEKRKEGSSDAAESTNYNEIPKNGKGSTRKGVDHSNRNQATLNEKQRFPSKGKSQGLPIPSRGLDNEIKNEMDSFNGPSHENIITHGRKYHYVPHRQNNSTRNKGMPQGKGSWGRQPHSNRRFSSRRRDDSSESSDSGSSSESDGD

SEQ ID NO: 8540 - protein, 525 aa, Homo sapiens
MRVFCVGLLLFSVTWAAPTFQPQTEKTKQSCVEEQRQEEKNKDNIGFHHLGKRINQELSSKENIVQERKKDLSLSEASENKGSSKSQNYFTNRQRLNKEYSISNKENTHNGLRMSIYPKSTGNKGFEDGDDAISKLHDQEEYGAALIRNNMQHIMGPVTAIKLLGEENKENTPRNVLNIIPASMNYAKAHSKDKKKPQRDSQAQKSPVKSKSTHRIQHNIDYLKHLSKVKKIPSDFEGSGYTDLQERGDNDISPFSGDGQPFKDIPGKGEATGPDLEGKDIQTGFAGPSEAESTHLDTKKPGYNEIPEREENGGNTIGTRDETAKEADAVDVSLVEGSNDIMGSTNFKELPGREGNRVDAGSQNAHQGKVEFHYPPAPSKEKRKEGSSDAAESTNYNEIPKNGKGSTRKGVDHSNRNQATLNEKQRFPSKGKSQGLPIPSRGLDNEIKNEMDSFNGPSHENIITHGRKYHYVPHRQNNSTRNKGMPQGKGSWGRQPHSNRRFSSRRRDDSSESSDSGSSSESDGD

SEQ ID NO: 8541 - protein, 525 aa, Homo sapiens; identical to SEQ ID NO: 8540

SEQ ID NO: 8542 - protein, 412 aa, Homo sapiens
MSIYPKSTGNKGFEDGDDAISKLHDQEEYGAALIRNNMQHIMGPVTAIKLLGEENKENTPRNVLNIIPASMNYAKAHSKDKKKPQRDSQAQKSPVKSKSTHRIQHNIDYLKHLSKVKKIPSDFEGSGYTDLQERGDNDISPFSGDGQPFKDIPGKGEATGPDLEGKDIQTGFAGPSEAESTHLDTKKPGYNEIPEREENGGNTIGTRDETAKEADAVDVSLVEGSNDIMGSTNFKELPGREGNRVDAGSQNAHQGKVEFHYPPAPSKEKRKEGSSDAAESTNYNEIPKNGKGSTRKGVDHSNRNQATLNEKQRFPSKGKSQGLPIPSRGLDNEIKNEMDSFNGPSHENIITHGRKYHYVPHRQNNSTRNKGMPQGKGSWGRQPHSNRRFSSRRRDDSSESSDSGSSSESDGD

SEQ ID NO: 8543 - protein, 412 aa, Homo sapiens; identical to SEQ ID NO: 8542

SEQ ID NO: 8544 - protein, 501 aa, Homo sapiens
MSPEKKNQTDVKQEEKNKDNIGFHHLGKRINQELSSKENIVQERKKDLSLSEASENKGSSKSQNYFTNRQRLNKEYSISNKENTHNGLRMSIYPKSTGNKGFEDGDDAISKLHDQEEYGAALIRNNMQHIMGPVTAIKLLGEENKENTPRNVLNIIPASMNYAKAHSKDKKKPQRDSQAQKSPVKSKSTHRIQHNIDYLKHLSKVKKIPSDFEGSGYTDLQERGDNDISPFSGDGQPFKDIPGKGEATGPDLEGKDIQTGFAGPSEAESTHLDTKKPGYNEIPEREENGGNTIGTRDETAKEADAVDVSLVEGSNDIMGSTNFKELPGREGNRVDAGSQNAHQGKVEFHYPPAPSKEKRKEGSSDAAESTNYNEIPKNGKGSTRKGVDHSNRNQATLNEKQRFPSKGKSQGLPIPSRGLDNEIKNEMDSFNGPSHENIITHGRKYHYVPHRQNNSTRNKGMPQGKGSWGRQPHSNRRFSSRRRDDSSESSDSGSSSESDGD

SEQ ID NO: 8545 - protein, 80 aa, Homo sapiens
MAASRWARKAVVLLCASDLLLLLLLLPPPGSCAAEGSPGTPDESTPPPRKKKKDIRDYNDADMARLLEQWEANTCPTSTH

SEQ ID NO: 8546 - protein, 234 aa, Homo sapiens
MAASRWARKAVVLLCASDLLLLLLLLPPPGSCAAEGSPGTPDESTPPPRKKKKDIRDYNDADMARLLEQWEKDDDIEEGDLPEHKRPSAPVDFSKIDPSKPESILKMTKKGKTLMMFVTVSGSPTEKETEEITSLWQGSLFNANYDVQRFIVGSDRAIFMLRDGSYAWEIKDFLVGQDRCADVTLEGQVYPGKGGGSKEKNKTKQDKGKKKKEGDLKSRSSKEENRAGNKREDL

SEQ ID NO: 8547 - protein, 234 aa, Homo sapiens; identical to SEQ ID NO: 8546

SEQ ID NO: 8548 - protein, 234 aa, Homo sapiens; identical to SEQ ID NO: 8546

SEQ ID NO: 8549 - protein, 138 aa, Homo sapiens
MAASRWARKAVVLLCASDLLLLLLLLPPPGSCAAEGSPGTPDESTPPPRKKKKDIRDYNDADMARLLEQWETPEPLPVLPEVPSTCACLSSASLIWTCFSHLSPHALVKRVWPPAKQGLGGKESPASAWLPHRGGELK

SEQ ID NO: 8550 - protein, 173 aa, Homo sapiens
LLSHDYGDIVAQELLYRYKQNRSGRLTIKSLCLSNGGIFPETHRPLLLQKLLKDGGVLSPILTRLMNFFLWDMWAGIRNNDGNLVIDSLLQYINQRKKFRRRWVGALASVTIPIHFIYGPLDPVNPYPEFLELYRKTLPRSTVSILDDHISHYPQLEDPMGFLNAYMGFINSF

SEQ ID NO: 8551 - protein, 118 aa, Homo sapiens
MREWWVQVGLLAVPLLAAYLHIPPPQLSPALHSWKSSGKFFTYKGLRIFYQDSVGVVGSPEIVVLLHGFPTSSYDWYKIWEGLTLRFHRVIALDFLGFGFSDKPRPHHYSIFEQASIV

SEQ ID NO: 8552 - protein, 160 aa, Homo sapiens
MREWWVQVGLLAVPLLAAYLHIPPPQLSPALHSWKSSGKFFTYKGLRIFYQDSVGVVGSPEIVVLLHGFPTSSYDWYKIWEGLTLRFHRVIALDFLGFGFSDKPRPHHYSIFEQASIVEALLRHLGLQNRRINLLSHDYGDIVAQELLYRYKQNRSGRLT

SEQ ID NO: 8553 - protein, 169 aa, Homo sapiens
MREWWVQVGLLAVPLLAAYLHIPPPQLSPALHSWKSSGKFFTYKGLRIFYQDSVGVVGSPEIVVLLHGFPTSSYDWYKIWEGLTLRFHRVIALDFLGFGFSDKPRPHHYSIFEQASIVEALLRHLGLQNRRINLLSHDYGDIVAQELLYRYKQNRSGRLTIKSLCLSNG

SEQ ID NO: 8554 - protein, 188 aa, Homo sapiens
MREWWVQVGLLAVPLLAAYLHIPPPQLSPALHSWKSSGKFFTYKGLRIFYQDSVGVVGSPEIVVLLHGFPTSSYDWYKIWEGLTLRFHRVIALDFLGFGFSDKPRPHHYSIFEQASIVEALLRHLGLQNRRINLLSHDYGDIVAQELLYRYKQNRSGRLTIKSLCLSNGGIFPETHRPLLLQKLLKDG

SEQ ID NO: 8555 - protein, 292 aa, Homo sapiens
MREWWVQVGLLAVPLLAAYLHIPPPQLSPALHSWKSSGKFFTYKGLRIFYQDSVGVVGSPEIVVLLHGFPTSSYDWYKIWEGLTLRFHRVIALDFLGFGFSDKPRPHHYSIFEQASIVEALLRHLGLQNRRINLLSHDYGDIVAQELLYRYKQNRSGRLTIKSLCLSNGGIFPETHRPLLLQKLLKDGGVLSPILTRLMNFFVFSRGLLQYINQRKKFRRRWVGALASVTIPIHFIYGPLDPVNPYPEFLELYRKTLPRSTVSILDDHISHYPQLEDPMGFLNAYMGFINSF

SEQ ID NO: 8556 - protein, 292 aa, Homo sapiens; identical to SEQ ID NO: 8555

SEQ ID NO: 8557 - protein, 292 aa, Homo sapiens; identical to SEQ ID NO: 8555

SEQ ID NO: 8558 - protein, 213 aa, Homo sapiens
MREWWVQVGLLAVPLLAAYLHIPPPQLSPALHSWKSSGKFFTYKGLRIFYQDSVGVVGSPEIVVLLHGFPTSSYDWYKIWEGLTLRFHRVIALDFLGFGFSDKPRPHHYSIFEQASIVEALLRHLGLQNRRINLLSHDYGDIVAQELLYRYKQNRSGRLTIKSLCLSNGGIFPETHRPLLLQKLLKDGGVLSPILTRLMNFFVFSRGLTPVFG

SEQ ID NO: 8559 - protein, 326 aa, Homo sapiens
MREWWVQVGLLAVPLLAAYLHIPPPQLSPALHSWKSSGKFFTYKGLRIFYQDSVGVVGSPEIVVLLHGFPTSSYDWYKIWEGLTLRFHRVIALDFLGFGFSDKPRPHHYSIFEQASIVEALLRHLGLQNRRINLLSHDYGDIVAQELLYRYKQNRSGRLTIKSLCLSNGGIFPETHRPLLLQKLLKDGGVLSPILTRLMNFFVFSRGLTPVFGPYTRPSESELWDMWAGIRNNDGNLVIDSLLQYINQRKKFRRRWVGALASVTIPIHFIYGPLDPVNPYPEFLELYRKTLPRSTVSILDDHISHYPQLEDPMGFLNAYMGFINSF

SEQ ID NO: 8560 - protein, 326 aa, Homo sapiens; identical to SEQ ID NO: 8559

SEQ ID NO: 8561 - protein, 326 aa, Homo sapiens; identical to SEQ ID NO: 8559

SEQ ID NO: 8562 - protein, 325 aa, Homo sapiens
MVRRDRLRRMREWWVQVGLLAVPLLAAYLHIPPPQLSPALHSWKSSGKFFTYKGLRIFYQDSVGVVGSPEIVVLLHGFPTSSYDWYKIWEGLTLRFHRVIALDFLGFGFSDKPASIVEALLRHLGLQNRRINLLSHDYGDIVAQELLYRYKQNRSGRLTIKSLCLSNGGIFPETHRPLLLQKLLKDGGVLSPILTRLMNFFVFSRGLTPVFGPYTRPSESELWDMWAGIRNNDGNLVIDSLLQYINQRKKFRRRWVGALASVTIPIHFIYGPLDPVNPYPEFLELYRKTLPRSTVSILDDHISHYPQLEDPMGFLNAYMGFINSF

SEQ ID NO: 8563 - protein, 335 aa, Homo sapiens
MVRRDRLRRMREWWVQVGLLAVPLLAAYLHIPPPQLSPALHSWKSSGKFFTYKGLRIFYQDSVGVVGSPEIVVLLHGFPTSSYDWYKIWEGLTLRFHRVIALDFLGFGFSDKPRPHHYSIFEQASIVEALLRHLGLQNRRINLLSHDYGDIVAQELLYRYKQNRSGRLTIKSLCLSNGGIFPETHRPLLLQKLLKDGGVLSPILTRLMNFFVFSRGLTPVFGPYTRPSESELWDMWAGIRNNDGNLVIDSLLQYINQRKKFRRRWVGALASVTIPIHFIYGPLDPVNPYPEFLELYRKTLPRSTVSILDDHISHYPQLEDPMGFLNAYMGFINSF

SEQ ID NO: 8564 - protein, 158 aa, Homo sapiens
AVKGEVLKVGNKSCENIHLHSEAVLCTVPNDLLKLNSELNIEWKQAISSTVLGKVIVQPDQNFTGLIAGVVSISTALLLLLGFFLWLKKRKQIKDQFPNSSQNGSCRQVQYPLTDMSPILTSGDSDISSPLLQNTVHIDLSALNPELVQAVQHVVIGP

SEQ ID NO: 8565 - protein, 214 aa, Homo sapiens
AVKLKIDLANRETSIFSYREDPIVYEIHPTKSFISGGSTITGVGKNLNSVSVPRMVINVHEAGRNFTVACQHRSNSEIICCTTPSLQQLNLQLPLKTKAFFMLDGILSKYFDLIYVHNPVFKPFEKPVMISMGNENVLEIKGNDIDPEAVKGEVLKVGNKSCENIHLHSEAVLCTVPNDLLKLNSELNIEVGFLHSSHDVNKEASVIMLFSGLK

SEQ ID NO: 8566 - protein, 1408 aa, Homo sapiens
MKAPAVLAPGILVLLFTLVQRSNGECKEALAKSEMNVNMKYQLPNFTAETPIQNVILHEHHIFLGATNYIYVLNEEDLQKVAEYKTGPVLEHPDCFPCQDCSSKANLSGGVWKDNINMALVVDTYYDDQLISCGSVNRGTCQRHVFPHNHTADIQSEVHCIFSPQIEEPSQCPDCVVSALGAKVLSSVKDRFINFFVGNTINSSYFPDHPLHSISVRRLKETKDGFMFLTDQSYIDVLPEFRDSYPIKYVHAFESNNFIYFLTVQRETLDAQTFHTRIIRFCSINSGLHSYMEMPLECILTEKRKKRSTKKEVFNILQAAYVSKPGAQLARQIGASLNDDILFGVFAQSKPDSAEPMDRSAMCAFPIKYVNDFFNKIVNKNNVRCLQHFYGPNHEHCFNRTLLRNSSGCEARRDEYRTEFTTALQRVDLFMGQFSEVLLTSISTFIKGDLTIANLGTSEGRFMQVVVSRSGPSTPHVNFLLDSHPVSPEVIVEHTLNQNGYTLVITGKKITKIPLNGLGCRHFQSCSQCLSAPPFVQCGWCHDKCVRSEECLSGTWTQQICLPAIYKVFPNSAPLEGGTRLTICGWDFGFRRNNKFDLKKTRVLLGNESCTLTLSESTMNTLKCTVGPAMNKHFNMSIIISNGHGTTQYSTFSYVDPVITSISPKYGPMAGGTLLTLTGNYLNSGNSRHISIGGKTCTLKSVSNSILECYTPAQTISTEFAVKLKIDLANRETSIFSYREDPIVYEIHPTKSFISTWWKEPLNIVSFLFCFASGGSTITGVGKNLNSVSVPRMVINVHEAGRNFTVACQHRSNSEIICCTTPSLQQLNLQLPLKTKAFFMLDGILSKYFDLIYVHNPVFKPFEKPVMISMGNENVLEIKGNDIDPEAVKGEVLKVGNKSCENIHLHSEAVLCTVPNDLLKLNSELNIEWKQAISSTVLGKVIVQPDQNFTGLIAGVVSISTALLLLLGFFLWLKKRKQIKDLGSELVRYDARVHTPHLDRLVSARSVSPTTEMVSNESVDYRATFPEDQFPNSSQNGSCRQVQYPLTDMSPILTSGDSDISSPLLQNTVHIDLSALNPELVQAVQHVVIGPSSLIVHFNEVIGRGHFGCVYHGTLLDNDGKKIHCAVKSLNRITDIGEVSQFLTEGIIMKDFSHPNVLSLLGICLRSEGSPLVVLPYMKHGDLRNFIRNETHNPTVKDLIGFGLQVAKGMKYLASKKFVHRDLAARNCMLDEKFTVKVADFGLARDMYDKEYYSVHNKTGAKLPVKWMALESLQTQKFTTKSDVWSFGVLLWELMTRGAPPYPDVNTFDITVYLLQGRRLLQPEYCPDPLYEVMLKCWHPKAEMRPSFSELVSRISAIFSTFIGEHYVHVNATYVNVKCVAPYPSLLSSEDNADDEVDTRPASFWETS

SEQ ID NO: 8567 - protein, 1390 aa, Homo sapiens
MKAPAVLAPGILVLLFTLVQRSNGECKEALAKSEMNVNMKYQLPNFTAETPIQNVILHEHHIFLGATNYIYVLNEEDLQKVAEYKTGPVLEHPDCFPCQDCSSKANLSGGVWKDNINMALVVDTYYDDQLISCGSVNRGTCQRHVFPHNHTADIQSEVHCIFSPQIEEPSQCPDCVVSALGAKVLSSVKDRFINFFVGNTINSSYFPDHPLHSISVRRLKETKDGFMFLTDQSYIDVLPEFRDSYPIKYVHAFESNNFIYFLTVQRETLDAQTFHTRIIRFCSINSGLHSYMEMPLECILTEKRKKRSTKKEVFNILQAAYVSKPGAQLARQIGASLNDDILFGVFAQSKPDSAEPMDRSAMCAFPIKYVNDFFNKIVNKNNVRCLQHFYGPNHEHCFNRTLLRNSSGCEARRDEYRTEFTTALQRVDLFMGQFSEVLLTSISTFIKGDLTIANLGTSEGRFMQVVVSRSGPSTPHVNFLLDSHPVSPEVIVEHTLNQNGYTLVITGKKITKIPLNGLGCRHFQSCSQCLSAPPFVQCGWCHDKCVRSEECLSGTWTQQICLPAIYKVFPNSAPLEGGTRLTICGWDFGFRRNNKFDLKKTRVLLGNESCTLTLSESTMNTLKCTVGPAMNKHFNMSIIISNGHGTTQYSTFSYVDPVITSISPKYGPMAGGTLLTLTGNYLNSGNSRHISIGGKTCTLKSVSNSILECYTPAQTISTEFAVKLKIDLANRETSIFSYREDPIVYEIHPTKSFISGGSTITGVGKNLNSVSVPRMVINVHEAGRNFTVACQHRSNSEIICCTTPSLQQLNLQLPLKTKAFFMLDGILSKYFDLIYVHNPVFKPFEKPVMISMGNENVLEIKGNDIDPEAVKGEVLKVGNKSCENIHLHSEAVLCTVPNDLLKLNSELNIEWKQAISSTVLGKVIVQPDQNFTGLIAGVVSISTALLLLLGFFLWLKKRKQIKDLGSELVRYDARVHTPHLDRLVSARSVSPTTEMVSNESVDYRATFPEDQFPNSSQNGSCRQVQYPLTDMSPILTSGDSDISSPLLQNTVHIDLSALNPELVQAVQHVVIGPSSLIVHFNEVIGRGHFGCVYHGTLLDNDGKKIHCAVKSLNRITDIGEVSQFLTEGIIMKDFSHPNVLSLLGICLRSEGSPLVVLPYMKHGDLRNFIRNETHNPTVKDLIGFGLQVAKGMKYLASKKFVHRDLAARNCMLDEKFTVKVADFGLARDMYDKEYYSVHNKTGAKLPVKWMALESLQTQKFTTKSDVWSFGVLLWELMTRGAPPYPDVNTFDITVYLLQGRRLLQPEYCPDPLYEVMLKCWHPKAEMRPSFSELVSRISAIFSTFIGEHYVHVNATYVNVKCVAPYPSLLSSEDNADDEVDTRPASFWETS

SEQ ID NO: 8568 - protein, 764 aa, Homo sapiens
MKAPAVLAPGILVLLFTLVQRSNGECKEALAKSEMNVNMKYQLPNFTAETPIQNVILHEHHIFLGATNYIYVLNEEDLQKVAEYKTGPVLEHPDCFPCQDCSSKANLSGGVWKDNINMALVVDTYYDDQLISCGSVNRGTCQRHVFPHNHTADIQSEVHCIFSPQIEEPSQCPDCVVSALGAKVLSSVKDRFINFFVGNTINSSYFPDHPLHSISVRRLKETKDGFMFLTDQSYIDVLPEFRDSYPIKYVHAFESNNFIYFLTVQRETLDAQTFHTRIIRFCSINSGLHSYMEMPLECILTEKRKKRSTKKEVFNILQAAYVSKPGAQLARQIGASLNDDILFGVFAQSKPDSAEPMDRSAMCAFPIKYVNDFFNKIVNKNNVRCLQHFYGPNHEHCFNRTLLRNSSGCEARRDEYRTEFTTALQRVDLFMGQFSEVLLTSISTFIKGDLTIANLGTSEGRFMQVVVSRSGPSTPHVNFLLDSHPVSPEVIVEHTLNQNGYTLVITGKKITKIPLNGLGCRHFQSCSQCLSAPPFVQCGWCHDKCVRSEECLSGTWTQQICLPAIYKVFPNSAPLEGGTRLTICGWDFGFRRNNKFDLKKTRVLLGNESCTLTLSESTMNTLKCTVGPAMNKHFNMSIIISNGHGTTQYSTFSYVDPVITSISPKYGPMAGGTLLTLTGNYLNSGNSRHISIGGKTCTLKSVSNSILECYTPAQTISTEFAVKLKIDLANRETSIFSYREDPIVYEIHPTKSFIRHVNIALIQR

SEQ ID NO: 8569 - protein, 190 aa, Homo sapiens
MKSKSKSLAECFPYDKPLIMKAPAVLAPGILVLLFTLVQRSNGECKEALAKSEMNVNMKYQLPNFTAETPIQNVILHEHHIFLGATNYIYVLNEEDLQKVAEYKTGPVLEHPDCFPCQDCSSKANLSGGVWKDNINMALVVDTYYDDQLISCGSVNRGTCQRHVFPHNHTADIQSEVHCIFSPQIEEPSQ

SEQ ID NO: 8570 - protein, 187 aa, Homo sapiens
LAPAARAGYSEERCSWRGSGLTQEPGSVGQLALACAEGAVEWLYPAGALRLTLGGPDPRARPGIACLRPVRPFAGAQVFAERAGGALELLLAEGPGPAGGRCVRWGPRERRALFLQATPHQDISRRVAAFRFELREDGRPELPPQAHGLGVDGACRPCSDAELLLAACTSDFGECPRHGGSLEPAFP

SEQ ID NO: 8571 - protein, 69 aa, Homo sapiens
MGFPAAALLCALCCGLLAPAARAGYSEERCSWRGRPRRTRTSAAAWPPSALSCARTGAPSCPRRPTVSA

SEQ ID NO: 8572 - protein, 293 aa, Homo sapiens
MGFPAAALLCALCCGLLAPAARAGYSEERCSWRGSGLTQEPGSVGQLALACAEGAVEWLYPAGALRLTLGGPDPRARPGIACLRPVRPFAGAQVFAERAGGALELLLAEGPGPAGGRCVRWGPRERRALFLQATPHQDISRRVAAFRFELREDGRPELPPQAHGLGVDGACRPCSDAELLLAACTSDFVIHGIIHGVTHDVELQESVITVVAARVLRQTPPLFQAGRSGDQGLTSIRTPLRCGVHPGPGTFLFMGWSRFGEARLGCAPRFQEFRRAYEAARAAHLHPCEVALH

SEQ ID NO: 8573 - protein, 160 aa, Homo sapiens
MLGCICQMGVQEGGPGQLIARHGPQAHVCVHSCLGGACRPCSDAELLLAACTSDFVIHGIIHGVTHDVELQESVITVVAARVLRQTPPLFQAGRSGDQGLTSIRTPLRCGVHPGPGTFLFMGWSRFGEARLGCAPRFQEFRRAYEAARAAHLHPCEVALH

SEQ ID NO: 8574 - protein, 175 aa, Homo sapiens
  SITE 1: note = misc_feature - Xaa can be any naturally occurring amino acid
XAVEWLYPAGALRLTLGGPDPRARPGIACLRPVRPFAGAQVFAERAGGALELLLAEGPGPAGGRCVRWGPRERRALFLQATPHQDISRRVAAFRFELREDGRPELPPQAHGLGVDGACRPCSDAELLLAACTSDFVIHGIIHGVTHDVELQESVITVGGPTALEVMGLSIRTLFT

SEQ ID NO: 8575 - protein, 311 aa, Homo sapiens
MRGAARAAWGRAGQPWPRPPAPGPPPPPLPLLLLLLAGLLGGAGAQYSSDRCSWKGSGLTHEAHRKEVEQVYLRCAAGAVEWMYPTGALIVNLRPNTFSPARHLTVCIRSFTDSSGANIYLEKTGELRLLVPDGDGRPGRVQCFGLEQGGLFVEATPQQDIGRRTTGFQYELVRRHRASDLHELSAPCRPCSDTEVLLAVCTSDFAVRGSIQQVTHEPERQDSAIHLRVSRLYRQKSRVFEPVPEGDGHWQGRVRTLLECGVRPGHGDFLFTGHMHFGEARLGCAPRFKDFQRMYRDAQERGLNPCEVGTD

SEQ ID NO: 8576 - protein, 229 aa, Homo sapiens
MYPTGALIVNLRPNTFSPARHLTVCIRSFTDSSGANIYLEKTGELRLLVPDGDGRPGRVQCFGLEQGGLFVEATPQQDIGRRTTGFQYELVRRHRASDLHELSAPCRPCSDTEVLLAVCTSDFAVRGSIQQVTHEPERQDSAIHLRVSRLYRQKSRVFEPVPEGDGHWQGRVRTLLECGVRPGHGDFLFTGHMHFGEARLGCAPRFKDFQRMYRDAQERGLNPCEVGTD

SEQ ID NO: 8577 - protein, 229 aa, Homo sapiens; identical to SEQ ID NO: 8576

SEQ ID NO: 8578 - protein, 90 aa, Homo sapiens
RTAVRGSIQQVTHEPERQDSAIHLRVSRLYRQKSRVFEPVPEGDGHWQGRVRTLLECGARLGCAPRFKDFQRMYRDAQERGLNPCEVGTD

SEQ ID NO: 8579 - protein, 456 aa, Homo sapiens
MAAALKCLLTLGRWCPGLGVAPQARALAALVPGVTQVDNKSGFLQKRPHRQHPGILKLPHVRLPQALANGAQLLLLGSAGPTMENQVQTLTSYLWSRHLPVEPEELQRRARHLEKKFLENPDLSQTEEKLRGAVLHALRKTTYHWQELSYTEGLSLVYMAARLDGGFAAVSRAFHEIRARNPAFQPQTLMDFGSGTGSVTWAAHSIWGQSLREYMCVDRSAAMLVLAEKLLKGGSESGEPYIPGVFFRQFLPVSPKVQFDVVVSAFSLSELPSKADRTEVVQTLWRKTGHFLVLVENGTKAGHSLLMDARDLVLKGKEKSPLDPRPGFVFAPCPHELPCPQLTNLACSFSQAYHPIPFSWNKKPKEEKFSMVILARGSPEEAHRWPRITQPVLKRPRHVHCHLCCPDGHMQHAVLTARRHGRDLYRCARVSSWGDLLPVLTPSAFPPSTAQDPSES

SEQ ID NO: 8580 - protein, 478 aa, Homo sapiens
MAAALKCLLTLGRWCPGLGVAPQARALAALVPGVTQVDNKSGFLQKRPHRQHPGILKLPHVRLPQALANGAQLLLLGSAGPTMENQVQTLTSYLWSRHLPVEPEELQRRARHLEKKFLENPDLSQTEEKLRGAVLHALRKTTYHWQELSYTEGLSLVYMAARLDGGFAAVSRAFHEIRARNPAFQPQTLMDFGSGTGSVTWAAHSIWGQSLREYMCVDRSAAMLVLAEKLLKGGSESGEPYIPGVFFRQFLPVSPKVQFDVVVSAFSLSELPSKADRTEVVQTLWRKTGHFLVLVENGTKAGHSLLMDARDLVLKGKEKSPLDPRPGFVFAPCPHELPCPQLTNLACSFSQAYHPIPFSWNKKPKEEKFSMVILARGSPEEAHRWPRITQPVLKRPRHVHCHLCCPDGHMQHAVLTARRHGRYGGCDQNQWDVAGSCSPRQHLFPQGFVSLCPCQLLGRSFTCAYSVCVSSIYGSGSL

SEQ ID NO: 8581 - protein, 447 aa, Homo sapiens
MAAALKCLLTLGRWCPGLGVAPQARALAALVPGVTQVDNKSGFLQKRPHRQHPGILKLPHVRLPQALANGAQLLLLGSAGPTMENQVQTLTSYLWSRHLPVEPEELQRRARHLEKKFLENPDLSQTEEKLRGAVLHALRKTTYHWQELSYTEGLSLVYMAARLDGGFAAVSRAFHEIRARNPAFQPQTLMDFGSGTGSVTWAAHSIWGQSLREYMCVDRSAAMLVLAEKLLKGGSESGEPYIPGVFFRQFLPVSPKVQFDVVVSAFSLSELPSKADRTEVVQTLWRKTGHFLVLVENGTKAGHSLLMDARDLVLKGKEKSPLDPRPGFVFAPCPHELPCPQLTNLACSFSQAYHPIPFSWNKKPKEEKFSMVILARGSPEEAHRWPRITQPVLKRPRHVHCHLCCPDGHMQHAVLTARRHGSSWGDLLPVLTPSAFPPSTAQDPSES

SEQ ID NO: 8582 - protein, 158 aa, Homo sapiens
MAAALKCLLTLGRWCPGLGVAPQARALAALVPGVTQVDNKSGFLQKRPHRQHPGILKLPHVRLPQALANGAQLLLLGSAGPTMENQVQTLTSYLWSRHLPVEPEELQRRARHLEKKFLENPGPDFQSLFSPQTYLRQRRNFVEQCYTHYVKLPTIGKN

SEQ ID NO: 8583 - protein, 158 aa, Homo sapiens; identical to SEQ ID NO: 8582

SEQ ID NO: 8584 - protein, 158 aa, Homo sapiens; identical to SEQ ID NO: 8582

SEQ ID NO: 8585 - protein, 102 aa, Homo sapiens
MENQVQTLTSYLWSRHLPVEPEELQRRARHLEKKFLENPDLSQTEEKLRGAVLHALRKTTYHWQELSYTEGLSLVYMAARLDGGFAAVSRAFHEIRARNPAF

SEQ ID NO: 8586 - protein, 140 aa, Homo sapiens
MENQVQTLTSYLWSRHLPVEPEELQRRARHLEKKFLENPDLSQTEEKLRGAVLHALRKTTYHWQELSYTEGLSLVYMAARLDGGFAAVSRAFHEIRARNPAFQPQTLMDFGSGTGSVTWAAHSIWGQSLREYMCVDRSAA

SEQ ID NO: 8587 - protein, 174 aa, Homo sapiens
MENQVQTLTSYLWSRHLPVEPEELQRRARHLEKKFLENPDLSQTEEKLRGAVLHALRKTTYHWQELSYTEGLSLVYMAARLDGGFAAVSRAFHEIRARNPAFQPQTLMDFGSGTGSVTWAAHSIWGQSLREYMCVDRSAAMLVLAEKLLKGGSESGEPYIPGVFFRQFLPVSPK

SEQ ID NO: 8588 - protein, 186 aa, Homo sapiens
MVPRPWSGSPGPGECLHSLLSERLWICRDISAQRRSAPGSPRPSDCQQLSFLPGNQPTFLCLQALAALVPGVTQVDNKSGFLQKRPHRQHPGILKLPHVRLPQALANGAQLLLLGSAGPTMENQVQTLTSYLWSRHLPVEPEELQRRARHLEKKFLENPDLSQTEEKLRGAVLHALRKTTYHWQEL

SEQ ID NO: 8589 - protein, 123 aa, Homo sapiens
  SITE 1: note = misc_feature - Xaa can be any naturally occurring amino acid
XPGFVFAPCPHELPCPQLTNLACSFSQAYHPIPFSWNKKPKEEKFSMVILARGSPEEAHRWPRITQPVLKRPRHVHCHLCCPDGHMQHAVLTARRHGSSWGDLLPVLTPSAFPPSTAQDPSES

SEQ ID NO: 8590 - protein, 366 aa, Homo sapiens
MARERPPGRGCGVLRRCLLGAVLLFGLRLCAELRRAGPGSPTRSAPPGPAWRPPGPHLPPAPGQPRGASRRQVTYVRSGRRAPPGGGGSGTPEPGCCAPRGRPRRKGPRWHIDLQPWAGSAQSLDEEAWRFLRYISTTQIACNHMNTDSLATDSSPTHKPWSVCLDDRFNLAHQIRNKQCRLYSLGLGSDDTHFEVSMANNGCEVHRFDPSVKSAHILESQHLWYHRLSIDWRDPHPAVAAQKPHSNTRKLGSILNEFGHHKIDVLKADLESAEWKVLENLILEDVLEQIGQLIFEIHLHWPGFEVSGSDSSVVRFWYSLLKELEQKDFRLFHSYKDLSKPQLFLKKDIFNASSCYTLSWVNTRWK

SEQ ID NO: 8591 - protein, 244 aa, Homo sapiens
MDILVPLLQLLVLLLTLPLHLMALLGCWQPLCKSYFPYLMAVLTPKSNRKMESKKRELFSQIKGLTGASGKVALLELGCGTGANFQFYPPGCRVTCLDPNPHFEKFLTKSMAENRHLQYERFVVAPGEDMRQLADGSMDVVVCTLVLCSVQSPRKVLQEVRRVLRPGGVLFFWEHVAEPYGSWAFMWQQVFEPTWKHIGDGCCLTRETWKDLENAQFSEIQMERQPPPLKWLPVGPHIMGKAVK

SEQ ID NO: 8592 - protein, 276 aa, Homo sapiens
MDILVPLLQLLVLLLTLPLHLMALLGCWQPLCKSYFPYLMAVLTPKSNRKMESKKRELFSQIKGLTGASGKVALLELGCGTGANFQFYPPGCRVTCLDPNPHFEKFLTKSMAENRHLQYERFVVAPGEDMRQLADGSMDVVVCTLVLCSVQSPRKVLQEVRRVLRPGGVLFFWEHVAEPYGSWAFMWQQVFEPTWKHIGDGCCLTRETWKDLENAQFSEIQMERQPPPLKWLPVGPHIMGKAVKSFPSSKALICSFPSLQLEQATHQPIYLPLRGT

SEQ ID NO: 8593 - protein, 243 aa, Homo sapiens
MDRKTTSWDTKFYEKWYVCNREKLCESLQAVFVQSYLDQGTQIFLNNSIEKSGWLFIQLYHSFVSSVFSLFMSRTSINGLLGRGSMFVFSPDQFQRLLKINPDWKTHRLLDLGAGDGEVTKIMSPHFEEIYATELSETMIWQLQKKKYRVLGINEWQNTGFQYDVISCLNLLDRCDQPLTLLKDIRSVLEPTRGRVILALVLPFHPYVENVGGKWEKPSEILEIKGQNWEEQVNSLPEVFRKA

SEQ ID NO: 8594 - protein, 61 aa, Homo sapiens
MRLLAGWLCLSLASVWLARRMWTLRSPLTRSLGMCATERNYANHSRLSLFRVTLIKEHRSS

SEQ ID NO: 8595 - protein, 74 aa, Homo sapiens
MRLLAGWLCLSLASVWLARRMWTLRSPLTRSLYVNMTSGPGGPAAAAGGRKENHQVARKRLNVCVFTRSVSETA

SEQ ID NO: 8596 - protein, 317 aa, Homo sapiens
MRLLAGWLCLSLASVWLARRMWTLRSPLTRSLYVNMTSGPGGPAAAAGGRKENHQWYVCNREKLCESLQAVFVQSYLDQGTQIFLNNSIEKSGWLFIQLYHSFVSSVFSLFMSRTSINGLLGRGSMFVFSPDQFQRLLKINPDWKTHRLLDLGAGDGEVTKIMSPHFEEIYATELSETMIWQLQKKKYRVLGINEWQNTGFQYDVISCLNLLDRCDQPLTLLKDIRSVLEPTRGRVILALVLPFHPYVENGGKWEKPSEILEIKGQNWEEQVNSLPEVFRKAGFVIEAFTRLPYLCEGDMYNDYYVLDDAVFVLKPV

SEQ ID NO: 8597 - protein, 318 aa, Homo sapiens
MRLLAGWLCLSLASVWLARRMWTLRSPLTRSLYVNMTSGPGGPAAAAGGRKENHQWYVCNREKLCESLQAVFVQSYLDQGTQIFLNNSIEKSGWLFIQLYHSFVSSVFSLFMSRTSINGLLGRGSMFVFSPDQFQRLLKINPDWKTHRLLDLGAGDGEVTKIMSPHFEEIYATELSETMIWQLQKKKYRVLGINEWQNTGFQYDVISCLNLLDRCDQPLTLLKDIRSVLEPTRGRVILALVLPFHPYVENVGGKWEKPSEILEIKGQNWEEQVNSLPEVFRKAGFVIEAFTRLPYLCEGDMYNDYYVLDDAVFVLKPV

SEQ ID NO: 8598 - protein, 139 aa, Homo sapiens
MSRTSINGLLGRGSMFVFSPDQFQRLLKINPDWKTHRLLDLGAGDGEVTKIMSPHFEEIYATELSETMIWQLQKKKYRVLGINEWQNTGFQYDVISCLNLLDRCDQPLTLLKDIRSVLEPTRGRVILALVLPFHPYVEN

SEQ ID NO: 8599 - protein, 282 aa, Homo sapiens
MWTLRSPLTRSLYVKENHQWYVCNREKLCESLQAVFVQSYLDQGTQIFLNNSIEKSGWLFIQLYHSFVSSVFSLFMSRTSINGLLGRGSMFVFSPDQFQRLLKINPDWKTHRLLDLGAGDGEVTKIMSPHFEEIYATELSETMIWQLQKKKYRVLGINEWQNTGFQYDVISCLNLLDRCDQPLTLLKDIRSVLEPTRGRVILALVLPFHPYVENVGGKWEKPSEILEIKGQNWEEQVNSLPEVFRKAGFVIEAFTRLPYLCEGDMYNDYYVLDDAVFVLKPV

SEQ ID NO: 8600 - protein, 128 aa, Homo sapiens
  SITE 1: note = misc_feature - Xaa can be any naturally occurring amino acid
XPDQFQRLLKINPDWKTHRLLDLGAGDGEVTKIMSPHFEEIYATELSETMIWQLQKKKYRVLGINEWQNTGFQYDVISCLNLLDRCDQPLTLLKDIRSVLEPTRGRVILALVLPFHPYVENGKCGQSG

SEQ ID NO: 8601 - protein, 125 aa, Homo sapiens
  SITE 1: note = misc_feature - Xaa can be any naturally occurring amino acid
XSYLDQGTQIFLNNSIEKSGWLFIQLYHSFVSSVFSLFMSRTSINGVLGINEWQNTGFQYDVISCLNLLDRCDQPLTLLKDIRSVLEPTRGRVILALVLPFHPYVENVGGKWEKPSEILEIKGQN

SEQ ID NO: 8602 - protein, 489 aa, Homo sapiens
MPSGSSAALALAAAGVLYGGDDAQGMMAAMLSHAYGPGGCGAAAAALNGEQAALLRRKSVNTTECVPVPSSEHVAEIVGRQGCKIKALRAKTNTYIKTPVRGEEPIFVVTGRKEDVAMAKREILSAAEHFSMIRASRNKNGPALGGLSCSPNLPGQTTVQVRVPYRVVGLVVGPKGATIKRIQQQTHTYIVTPSRDKEPVFEVTGMPENVDRAREEIEMHIAMRTGNYIELNEENDFHYNGTDVSFEGGTLGSAWLSSNPVPPSRARMISNYRNDSSSSLGSGSTDSYFGSNRLADFSPTSPFSTGNFWFGDTLPSVGSEDLAVDSPAFDSLPTSAQTIWTPFEPVNPLSGFGSDPSGNMKTQRRGSQPSTPRLSPTFPESIEHPLARRVRSDPPSTGNHVGLPIYIPAFSNGTNSYSSSNGGSTSSSPPESRRKHDCVICFENEVIAALVPCGHNLFCMECANKICEKRTPSCPVCQTAVTQAIQIHS

SEQ ID NO: 8603 - protein, 659 aa, Homo sapiens
MPSGSSAALALAAAPAPLPQPPPPPPPPPPPLPPPSGGPELEGDGLLLRERLAALGLDDPSPAEPGAPALRAPAAAAQGQARRAAELSPEERAPPGRPGAPEAAELELEEDEEEGEEAELDGDLLEEEELEEAEEEDRSSLLLLSPPAATASQTQQIPGGSLGSVLLPAARFDAREAAAAAAAAGVLYGGDDAQGMMAAMLSHAYGPGGCGAAAAALNGEQAALLRRKSVNTTECVPVPSSEHVAEIVGRQGCKIKALRAKTNTYIKTPVRGEEPIFVVTGRKEDVAMAKREILSAAEHFSMIRASRNKNGPALGGLSCSPNLPGQTTVQVRVPYRVVGLVVGPKGATIKRIQQQTHTYIVTPSRDKEPVFEVTGMPENVDRAREEIEMHIAMRTGNYIELNEENDFHYNGTDVSFEGGTLGSAWLSSNPVPPSRARMISNYRNDSSSSLGSGSTDSYFGSNRLADFSPTSPFSTGNFWFGDTLPSVGSEDLAVDSPAFDSLPTSAQTIWTPFEPVNPLSGFGSDPSGNMKTQRRGSQPSTPRLSPTFPESIEHPLARRVRSDPPSTGNHVGLPIYIPAFSNGTNSYSSSNGGSTSSSPPESRRKHDCVICFENEVIAALVPCGHNLFCMECANKICEKRTPSCPVCQTAVTQAIQIHS

SEQ ID NO: 8604 - protein, 115 aa, Homo sapiens
YGGDDAQGMMAAMLSHAYGPGGCGAAAAALNGEQAALLRRKSVNTTECVPVPSSEHVAEIVGRQGECRGGEVQLGMAPGVGGETRERSVGRKRRTRRGPQVHREGVWEEPRVDQM

SEQ ID NO: 8605 - protein, 183 aa, Homo sapiens
MRAAYLFLLFLPAGLLAQGQYDLDPLPPFPDHVQYTHYSDQIDNPDYYDYQEVTPRPSEEQFQFQSQQQVQQEVIPAPTPEPGNAELEPTEPGPLDCREEQYPCTRLYSIHRPCKQCLNEVCFYSLRRVYVINKEICVRTVCAHEELLRADLCRDKFSKCGVMASSGLCQSVAASCARSCGSC

SEQ ID NO: 8606 - protein, 182 aa, Homo sapiens
MRAAYLFLLFLPGLLAQGQYDLDPLPPFPDHVQYTHYSDQIDNPDYYDYQEVTPRPSEEQFQFQSQQQVQQEVIPAPTPEPGNAELEPTEPGPLDCREEQYPCTRLYSIHRPCKQCLNEVCFYSLRRVYVINKEICVRTVCAHEELLRADLCRDKFSKCGVMASSGLCQSVAASCARSCGSC

SEQ ID NO: 8607 - protein, 17 aa, Homo sapiens
MKLHCCLFTLVASIIVP

SEQ ID NO: 8608 - protein, 109 aa, Homo sapiens
MKLHCCLFTLVASIIVPAAFVLEDVDFDQMVSLEANRSSYNASFPSSFELSASSHSDDDVIIAKEGTSVSIECLLTASHYEDVHWHNSKGQQLDGRSRGGKWLVSDNFL

SEQ ID NO: 8609 - protein, 123 aa, Homo sapiens
MKLHCCLFTLVASIIVPAAFVLEDVDFDQMVSLEANRSSYNASFPSSFELSASSHSDDDVIIAKEGTSVSIECLLTASHYEDVHWHNSKGQQLDGRSRGGKWLVSDNFLNITNVAFDDRGLYT

SEQ ID NO: 8610 - protein, 362 aa, Homo sapiens
MKLHCCLFTLVASIIVPAAFVLEDVDFDQMVSLEANRSSYNASFPSSFELSASSHSDDDVIIAKEGTSVSIECLLTASHYEDVHWHNSKGQQLDGRSRGGKWLVSDNFLNITNVAFDDRGLYTCFVTSPIRASYSVTLRVIFTSGDMSVYYMIVCLIAFTITLILNVTRLCMMSSHLRKTEKAINEFFRTEGAEKLQKAFEIAKRIPIITSAKTLELAKVTQFKTMEFARYIEELARSVPLPPLILNCRAFVEEMFEAVRVDDPDDLGERIKERPALNAQGGIYVINPEMGRSNSPGGDSDDGSLNEQGQEIAVQVSVHLQSETKSIDTESQGSSHFSPPDDIGSAESNCNYKDGAYENCQL

SEQ ID NO: 8611 - protein, 216 aa, Homo sapiens
MSVYYMIVCLIAFTITLILNVTRLCMMSSHLRKTEKAINEFFRTEGAEKLQKAFEIAKRIPIITSAKTLELAKVTQFKTMEFARYIEELARSVPLPPLILNCRAFVEEMFEAVRVDDPDDLGERIKERPALNAQGGIYVINPEMGRSNSPGGDSDDGSLNEQGQEIAVQVSVHLQSETKSIDTESQGSSHFSPPDDIGSAESNCNYKDGAYENCQL

SEQ ID NO: 8612 - protein, 73 aa, Homo sapiens
MDRLKSHLTVCFLPSVPFLILVSTLATAKSVTNSTLNGTNVVLGSVPVIIARTDHIIVKEGNSALINCSVYGI

SEQ ID NO: 8613 - protein, 90 aa, Homo sapiens
MDRLKSHLTVCFLPSVPFLILVSTLATAKSVTNSTLNGTNVVLGSVPVIIARTDHIIVKEGNSALINCSVYGIPDPQFKWYNSIGKLLKE

SEQ ID NO: 8614 - protein, 98 aa, Homo sapiens
MDRLKSHLTVCFLPSVPFLILVSTLATAKSVTNSTLNGTNVVLGSVPVIIARTDHIIVKEGNSALINCSVYGIPDPQFKWYNSIGKLLKEEEDEKERG

SEQ ID NO: 8615 - protein, 409 aa, Homo sapiens
MDRLKSHLTVCFLPSVPFLILVSTLATAKSVTNSTLNGTNVVLGSVPVIIARTDHIIVKEGNSALINCSVYGIPDPQFKWYNSIGKLLKEEEDEKERGGGKWQMHDSGLLNITKVSFSDRGKYTCVASNIYGTVNNTVTLRVIFTSGDMGVYYMVVCLVAFTIVMVLNITRLCMMSSHLKKTEKAINEFFRTEGAEKLQKAFEIAKRIPIITSAKTLELAKVTQFKTMEFARYIEELARSVPLPPLIMNCRTIMEEIMEVVGLEEQGQNFVRHTPEGQEAADRDEVYTIPNSLKRSDSPAADSDASSLHEQPQQIAIKVSVHPQSKKEHADDQEGGQFEVKDVEETELSAEHSPETAEPSTDVTSTELTSEEPTPVEVPDKVLPPAYLEATEPAVTHDKNTCIIYESHV

SEQ ID NO: 8616 - protein, 102 aa, Homo sapiens
MDRLKSHLTVCFLPSVPFLILVSTLATAKSVTNSTLNGTNVVLGSVPVIIARTDHIIVKEGNSALINCSVYGIPDPQFKWYNSIGKLLKEEEDEKERGGGRL

SEQ ID NO: 8617 - protein, 102 aa, Homo sapiens; identical to SEQ ID NO: 8616

SEQ ID NO: 8618 - protein, 44 aa, Homo sapiens
MHDSGLLNITKVSFSDRGKYTCVASNIYGTVNNTVTLRVIFTSG

SEQ ID NO: 8619 - protein, 64 aa, Homo sapiens
MHDSGLLNITKVSFSDRGKYTCVASNIYGTVNNTVTLRVIFTSGDMGVYYMVVCLVAFTIVMVL

SEQ ID NO: 8620 - protein, 157 aa, Homo sapiens
MHDSGLLNITKVSFSDRGKYTCVASNIYGTVNNTVTLRVIFTSGDMGVYYMVVCLVAFTIVMVLNITRLCMMSSHLKKTEKAINEFFRTEGAEKLQKAFEIAKRIPIITSAKTLELAKVTQFKTMEFARYIEELARSVPLPPLIMNCRTIMEEIMEV

SEQ ID NO: 8621 - protein, 306 aa, Homo sapiens
MHDSGLLNITKVSFSDRGKYTCVASNIYGTVNNTVTLRVIFTSGDMGVYYMVVCLVAFTIVMVLNITRLCMMSSHLKKTEKAINEFFRTEGAEKLQKAFEIAKRIPIITSAKTLELAKVTQFKTMEFARYIEELARSVPLPPLIMNCRTIMEEIMEVVGLEEQGQNFVRHTPEGQEAADRDEVYTIPNSLKRSDSPAADSDASSLHEQPQQIAIKVSVHPQSKKEHADDQEGGQFEVKDVEETELSAEHSPETAEPSTDVTSTELTSEEPTPVEVPDKVLPPAYLEATEPAVTHDKNTCIIYESHV

SEQ ID NO: 8622 - protein, 279 aa, Homo sapiens
MGELSPLQRPLATEGTMKAQGVLLKLALLALPLLLLLSTPPCAPQVSGIRGDALERFCLQQPLDCDDIYAQGYQSDGVYLIYPSGPSVPVPVFCDMTTEGGKWTVFQKRFNGSVSFFRGWNDYKLGFGRADGEYWLGLQNMHLLTLKQKYELRVDLEDFENNTAYAKYADFSISPNAVSAEEDGYTLFVAGFEDGGAGDSLSYHSGQKFSTFDRDQDLFVQNCAALSSGAFWFRSCHFANLNGFYLGGSHLSYANGINWAQWKGFYYSLKRTEMKIRRA

SEQ ID NO: 8623 - protein, 255 aa, Homo sapiens
MKALLALPLLLLLSTPPCAPQVSGIRGDALERFCLQQPLDCDDIYAQGYQSDGVYLIYPSGPSVPVPVFCDMTTEGGKWTVFQKRFNGSVSFFRGWNDYKLGFGRADGEYWLGLQNMHLLTLKQKYELRVDLEDFENNTAYAKYADFSISPNAVSAEEDGYTLFVAGFEDGGAGDSLSYHSGQKFSTFDRDQDLFVQNCAALSSGAFWFRSCHFANLNGFYLGGSHLSYANGINWAQWKGFYYSLKRTEMKIRRA

SEQ ID NO: 8624 - protein, 280 aa, Homo sapiens
MVGANAKRTGDLWSWEGAVLTLSAHRQALLALPLLLLLSTPPCAPQVSGIRGDALERFCLQQPLDCDDIYAQGYQSDGVYLIYPSGPSVPVPVFCDMTTEGGKWTVFQKRFNGSVSFFRGWNDYKLGFGRADGEYWLGLQNMHLLTLKQKYELRVDLEDFENNTAYAKYADFSISPNAVSAEEDGYTLFVAGFEDGGAGDSLSYHSGQKFSTFDRDQDLFVQNCAALSSGAFWFRSCHFANLNGFYLGGSHLSYANGINWAQWKGFYYSLKRTEMKIRRA

SEQ ID NO: 8625 - protein, 151 aa, Homo sapiens
MSLLGPKVLLFLAAFIITSDDVTQATPETFTEDPNLVNDPATDETVLAVLADIAPSTDDLECWDEKFTCTRLYSVHRPVKQCIHQLCFTSLRRMYIVNKEICSRLVCKEHEAMKDELCRQMAGLPPRRLRRSNYFRLPPCENVDLQRPNGL

SEQ ID NO: 8626 - protein, 148 aa, Homo sapiens
MSLLGPKVLLFLAAFIITSDWIPLGVNSQRGDDVTQATPETFTEDPNLVNDPATDETECWDEKFTCTRLYSVHRPVKQCIHQLCFTSLRRMYIVNKEICSRLVCKEHEAMKDELCRQMAGLPPRRLRRSNYFRLPPCENVDLQRPNGL

SEQ ID NO: 8627 - protein, 91 aa, Homo sapiens
MSLLGPKVLLFLAAFIITSDWIPLGVNSQRGDDVTQATPETFTEDPNLVNDPATDETVLAVLADIAPSTDDLASLSEKNTTAECWDEKFTC

SEQ ID NO: 8628 - protein, 173 aa, Homo sapiens
MSLLGPKVLLFLAAFIITSDWIPLGVNSQRGDDVTQATPETFTEDPNLVNDPATDETVLAVLADIAPSTDDLASLSEKNTTAECWDEKFTCTRLYSVHRPVKQCIHQLCFTSLRRMYIVNKEICSRLVCKEHEAMKDELCRQMAGLPPRRLRRSNYFRLPPCENVDLQRPNGL

SEQ ID NO: 8629 - protein, 138 aa, Homo sapiens
MSLLGPKVLLFLAAFIITSDWIPLGVNSQRGDDVTQATPETFTEDPNLVNDPATDETVLAVLADIAPSTDDLASLSEKNTTAECWDEKFTCTRLYSVHRPVKQCIHQLCFTSLRRMYIVNKEICSRLVCKEHEAMKDP

SEQ ID NO: 8630 - protein, 109 aa, Homo sapiens
MSLLGPKVLLFLAAFIITSDWIPLGVNSQRGDDVTQATPETFTEDPNLVNDPATDETVLAVLADIAPSTDDLDELCRQMAGLPPRRLRRSNYFRLPPCENVDLQRPNGL

SEQ ID NO: 8631 - protein, 163 aa, Homo sapiens
MSLLGPKVLLFLAAFIITSDWIPLGVNSQRGDDVTQATPETFTEDPNLVNDPATDETVLAVLADIAPSTDDLECWDEKFTCTRLYSVHRPVKQCIHQLCFTSLRRMYIVNKEICSRLVCKEHEAMKDELCRQMAGLPPRRLRRSNYFRLPPCENVDLQRPNGL

SEQ ID NO: 8632 - protein, 163 aa, Homo sapiens; identical to SEQ ID NO: 8631

SEQ ID NO: 8633 - protein, 128 aa, Homo sapiens
MSLLGPKVLLFLAAFIITSDWIPLGVNSQRGDDVTQATPETFTEDPNLVNDPATDETVLAVLADIAPSTDDLECWDEKFTCTRLYSVHRPVKQCIHQLCFTSLRRMYIVNKEICSRLVCKEHEAMKDP

SEQ ID NO: 8634 - protein, 163 aa, Homo sapiens
  SITE 1: note = misc_feature - Xaa can be any naturally occurring amino acid
XLAAFIITSDWIPLGVNSQRGDDVTQATPETFTEDPNLVNDPATDETVLAVLADIAPSTDDLASLSEKNTTAECWDEKFTCTRLYSVHRPVKQCIHQLCFTSLRRMYIVNKEICSRLVCKEHEAMKDELCRQMAGLPPRRLRRSNYFRLPPCENVDLQRPNGL

SEQ ID NO: 8635 - protein, 79 aa, Homo sapiens
YSVHRPVKQCIHQLCFTSLRRMYIVNKEICSRLVCKEHEAMKDELCRQMAGLPPRRLRRSNYFRLPPCENVDLQRPNGL

SEQ ID NO: 8636 - protein, 75 aa, Homo sapiens
FDFIHDVNKKHKEFVGNWNKNAVHVNLFETPVEAQYVRLYPTSCHTACTLRFELLGCELNARKADLRRGADDREQ

SEQ ID NO: 8637 - protein, 268 aa, Homo sapiens
MPRPRLLAALCGALLCAPSLLVALDICSKNPCHNGGLCEEISQEVRGDVFPSYTCTCLKGYAGNHCETKCVEPLGLENGNIANSQIAASSVRVTFLGLQHWVPELARLNRAGMVNAWTPSSNDDNPWIQVNLLRRMWVTGVVTQGASRLASHEYLKAFKVAYSLNGHEFDFIHDVNKKHKEFVGNWNKNAVHVNLFETPVEAQYVRLYPTSCHTACTLRFELLGCELNAATRPGACISSAGTPPMHGWTSRATSTPGLRGATVTISGC

SEQ ID NO: 8638 - protein, 335 aa, Homo sapiens
MPRPRLLAALCGALLCAPSLLVALDICSKNPCHNGGLCEEISQEVRGDVFPSYTCTCLKGYAGNHCETKCVEPLGLENGNIANSQIAASSVRVTFLGLQHWVPELARLNRAGMVNAWTPSSNDDNPWIQVNLLRRMWVTGVVTQGASRLASHEYLKAFKVAYSLNGHEFDFIHDVNKKHKEFVGNWNKNAVHVNLFETPVEAQYVRLYPTSCHTACTLRFELLGCELNGCANPLGLKNNSIPDKQITASSSYKTWGLHLFSWNPSYARLDKQGNFNAWVAGSYGNDQWLQIFPGNWDNHSHKKNLFETPILARYVRILPVAWHNRIALRLELLGC

SEQ ID NO: 8639 - protein, 387 aa, Homo sapiens
MPRPRLLAALCGALLCAPSLLVALDICSKNPCHNGGLCEEISQEVRGDVFPSYTCTCLKGYAGNHCETKCVEPLGLENGNIANSQIAASSVRVTFLGLQHWVPELARLNRAGMVNAWTPSSNDDNPWIQVNLLRRMWVTGVVTQGASRLASHEYLKAFKVAYSLNGHEFDFIHDVNKKHKEFVGNWNKNAVHVNLFETPVEAQYVRLYPTSCHTACTLRFELLGCELNGCANPLGLKNNSIPDKQITASSSYKTWGLHLFSWNPSYARLDKQGNFNAWVAGSYGNDQWLQVDLGSSKEVTGIITQGARNFGSVQFVASYKVAYSNDSANWTEYQDPRTGSSKIFPGNWDNHSHKKNLFETPILARYVRILPVAWHNRIALRLELLGC

SEQ ID NO: 8640 - protein, 387 aa, Homo sapiens; identical to SEQ ID NO: 8639

SEQ ID NO: 8641 - protein, 343 aa, Homo sapiens
MPRPRLLAALCGALLCAPSLLVALECVEPLGLENGNIANSQIAASSVRVTFLGLQHWVPELARLNRAGMVNAWTPSSNDDNPWIQVNLLRRMWVTGVVTQGASRLASHEYLKAFKVAYSLNGHEFDFIHDVNKKHKEFVGNWNKNAVHVNLFETPVEAQYVRLYPTSCHTACTLRFELLGCELNGCANPLGLKNNSIPDKQITASSSYKTWGLHLFSWNPSYARLDKQGNFNAWVAGSYGNDQWLQVDLGSSKEVTGIITQGARNFGSVQFVASYKVAYSNDSANWTEYQDPRTGSSKIFPGNWDNHSHKKNLFETPILARYVRILPVAWHNRIALRLELLGC

SEQ ID NO: 8642 - protein, 25 aa, Homo sapiens
MPRPRLLAALCGALLCAPSLLVALG

SEQ ID NO: 8643 - protein, 43 aa, Homo sapiens
MAAEFDTFLASGLRWFCHVDDDNYVNPRALLQLLRAFPLARDV

SEQ ID NO: 8644 - protein, 132 aa, Homo sapiens
MAAEFDTFLASGLRWFCHVDDDNYVNPRALLQLLRAFPLARDVYVGRPSLNRPIHASEPQPHNRTRLVQFWFATGGAGFCINRKLALKMAPWASGSRFMDTSALIRLPDDCTMGYIIECKLGGRLQPSPLFH

SEQ ID NO: 8645 - protein, 130 aa, Homo sapiens
MQCRLPRGLAGALLTLLCMGLLCLRYHLNLSPQRVQGTPELSQPNPGPPKLQLHDVFIAVKTTRAFHRLRLELLLDTWVSRTREQGPTLWSPTAPRNTATQLCPARWLLSSTPSWPVGLGGSAMWTMTTM

SEQ ID NO: 8646 - protein, 321 aa, Homo sapiens
MQCRLPRGLAGALLTLLCMGLLCLRYHLNLSPQRVQGTPELSQPNPGPPKLQLHDVFIAVKTTRAFHRLRLELLLDTWVSRTREQTFVFTDSPDKGLQERLGSHLVVTNCSAEHSHPALSCKMAAEFDTFLASGLRWFCHVDDDNYVNPRALLQLLRAFPLARDVYVGRPSLNRPIHASEPQPHNRTRLVQFWFATGGAGFCINRKLALKMAPWASGSRFMDTSALIRLPDDCTMGYIIECKLGGRLQPSPLFHSHLETLQLLRTAQLPEQVTLSYGVFEGKLNVIKLQGPFSPEEDPSRFRSLHCLLYPDTPWCPQLGAR

SEQ ID NO: 8647 - protein, 118 aa, Homo sapiens
MQCRLPRGLAGALLTLLCMGLLCLRYHLNLSPQRVQGTPELSQPNPGPPKLQLHDVFIAVKTTRAFHRLRLELLLDTWVSRTREQTFVFTDSPDKGLQERLGSPDSSSLLQGPTLWSP

SEQ ID NO: 8648 - protein, 127 aa, Homo sapiens
MQCRLPRGLAGALLTLLCMGLLCLRYHLNLSPQRVQGTPELSQPNPGPPKLQLHDVFIAVKTTRAFHRLRLELLLDTWVSRTREQVTNICLHRQPRQRPPGETGVPPCGHQLLRGTQPPSSVLQDGC

SEQ ID NO: 8649 - protein, 307 aa, Homo sapiens
MQCRLPRGLAGALLTLLCMGLLCLRYHLNLSPQRVQGTPELSQPNPGPPKLQLHDVFIAVKTTRAFHRLRLELLLDTWVSRTREQVTRSHLVVTNCSAEHSHPALSCKMAAEFDTFLASGLRWFCHVDDDNYVNPRALLQLLRAFPLARDVYVGRPSLNRPIHASEPQPHNRTRLVQFWFATGGAGFCINRKLALKMAPWASGSRFMDTSALIRLPDDCTMGYIIECKLGGRLQPSPLFHSHLETLQLLRTAQLPEQVTLSYGVFEGKLNVIKLQGPFSPEEDPSRFRSLHCLLYPDTPWCPQLGAR

SEQ ID NO: 8650 - protein, 87 aa, Homo sapiens
  SITE 1: note = misc_feature - Xaa can be any naturally occurring amino acid
XSHLETLQLLRTAQLPEQISLPPLSALSRYTLVSPAGCPMNPELLGKGWAETSGCALAPKVALWVPGKCLVIGSPWQGLRVVGKPRI

SEQ ID NO: 8651 - protein, 3065 aa, Homo sapiens
MEEKQQIILANQDGGTVAGAAPTFFVILKQPGNGKTDQGILVTNQDACALASSVSSPVKSKGKICLPADCTVGGITVTLDNNSMWNEFYHRSTEMILTKQGRRMFPYCRYWITGLDSNLKYILVMDISPVDNHRYKWNGRWWEPSGKAEPHVLGRVFIHPESPSTGHYWMHQPVSFYKLKLTNNTLDQEGHIILHSMHRYLPRLHLVPAEKAVEVIQLNGPGVHTFTFPQTEFFAVTAYQNIQITQLKIDYNPFAKGFRDDGLNNKPQRDGKQKNSSDQEGNNISSSSGHRVRLTEGQGSEIQPGDLDPLSRGHETSGKGLEKTSLNIKRDFLGFMDTDSALSEVPQLKQEISECLIASSFEDDSRVASPLDQNGSFNVVIKEEPLDDYDYELGECPEGVTVKQEETDEETDVYSNSDDDPILEKQLKRHNKVDNPEADHLSSKWLPSSPSGVAKAKMFKLDTGKMPVVYLEPCAVTRSTVKISELPDNMLSTSRKDKSSMLAELEYLPTYIENSNETAFCLGKESENGLRKHSPDLRVVQKYPLLKEPQWKYPDISDSISTERILDDSKDSVGDSLSGKEDLGRKRTTMLKIATAAKVVNANQNASPNVPGKRGRPRKLKLCKAGRPPKNTGKSLISTKNTPVSPGSTFPDVKPDLEDVDGVLFVSFESKEALDIHAVDGTTEESSSLQASTTNDSGYRARISQLEKELIEDLKTLRHKQVIHPGLQEVGLKLNSVDPTMSIDLKYLGVQLPLAPATSFPFWNLTGTNPASPDAGFPFVSRTGKTNDFTKIKGWRGKFHSASASRNEGGNSESSLKNRSAFCSDKLDEYLENEGKLMETSMGFSSNAPTSPVVYQLPTKSTSYVRTLDSVLKKQSTISPSTSYSLKPHSVPPVSRKAKSQNRQATFSGRTKSSYKSILPYPVSPKQKYSHVILGDKVTKNSSGIISENQANNFVVPTLDENIFPKQISLRQAQQQQQQQQGSRPPGLSKSQVKLMDLEDCALWEGKPRTYITEERADVSLTTLLTAQASLKTKPIHTIIRKRAPPCNNDFCRLGCVCSSLALEKRQPAHCRRPDCMFGCTCLKRKVVLVKGGSKTKHFQRKAAHRDPVFYDTLGEEAREEEEGIREEEEQLKEKKKRKKLEYTICETEPEQPVRHYPLWVKVEGEVDPEPVYIPTPSVIEPMKPLLLPQPEVLSPTVKGKLLTGIKSPRSYTPKPNPVIREEDKDPVYLYFESMMTCARVRVYERKKEDQRQPSSSSSPSPSFQQQTSCHSSPENHNNAKEPDSEQQPLKQLTCDLEDDSDKLQEKSWKSSCNEGESSSTSYMHQRSPGGPTKLIEIISDCNWEEDRNKILSILSQHINSNMPQSLKVGSFIIELASQRKSRGEKNPPVYSSRVKISMPSCQDQDDMAEKSGSETPDGPLSPGKMEDISPVQTDALDSVRERLHGGKGLPFYAGLSPAGKLVAYKRKPSSSTSGLIQVASNAKVAASRKPRTLLPSTSNSKMASSSGTATNRPGKNLKAFVPAKRPIAARPSPGGVFTQFVMSKVGALQQKIPGVSTPQTLAGTQKFSIRPSPVMVVTPVVSSEPVQVCSPVTAAVTTTTPQVFLENTTAVTPMTAISDVETKETTYSSGATTTGVVEVSETNTSTSVTSTQSTATVNLTKTTGITTPVASVAFPKSLVASPSTITLPVASTASTSLVVVTAAASSSMVTTPTSSLGSVPIILSGINGSPPVSQRPENAAQIPVATPQVSPNTVKRAGPRLLLIPVQQGSPTLRPVSNTQLQGHRMVLQPVRSPSGMNLFRHPNGQIVQLLPLHQLRGSNTQPNLQPVMFRNPGSVMGIRLPAPSKPSETPPSSTSSSAFSVMNPVIQAVGSSSAVNVITQAPSLLSSGASFVSQAGTLTLRISPPEPQSFASKTGSETKITYSSGGQPVGTASLIPLQSGSFALLQLPGQKPVPSSILQHVASLQMKRESQNPDQKDETNSIKREQETKKVLQSEGEAVDPEANVIKQNSGAATSEETLNDSLEDRGDHLDEECLPEEGCATVKPSEHSCITGSHTDQDYKDVNEEYGARNRKSSKEKVAVLEVRTISEKASNKTVQNLSKVQHQKLGDVKVEQQKGFDNPEENSSEFPVTFKEESKFELSGSKVMEQQSNLQPEAKEKECGDSLEKDRERWRKHLKGPLTRKCVGASQECKKEADEQLIKETKTCQENSDVFQQEQGISDLLGKSGITEDARVLKTECDSWSRISNPSAFSIVPRRAAKSSRGNGHFQGHLLLPGEQIQPKQEKKGGRSSADFTVLDLEEDDEDDNEKTDDSIDEIVDVVSDYQSEEVDDVEKNNCVEYIEDDEEHVDIETVEELSEEINVAHLKTTAAHTQSFKQPSCTHISADEKAAERSRKAPPIPLKLKPDYWSDKLQKEAEAFAYYRRTHTANERRRRGEMRDLFEKLKITLGLLHSSKVSKSLILTRAFSEIQGLTDQADKLIGQKNLLTRKRNILIRKVSSLSGKTEEVVLKKLEYIYAKQQALEAQKRKKKMGSDEFDISPRISKQQEGSSASSVDLGQMFINNRRGKPLILSRKKDQATENTSPLNTPHTSANLVMTPQGQLLTLKGPLFSGPVVAVSPDLLESDLKPQVAGSAVALPENDDLFMMPRIVNVTSLATEGGLVDMGGSKYPHEVPDSKPSDHLKDTVRNEDNSLEDKGRISSRGNRDGRVTLGPTQVFLANKDSGYPQIVDVSNMQKAQEFLPKKISGDMRGIQYKWKESESRGERVKSKDSSFHKLKMKDLKDSSIEMELRKVTSAIEEAALDSSELLTNMEDEDDTDETLTSLLNEIAFLNQQLNDDSVGLAELPSSMDTEFPGDARRAFISKVPPGSRATFQVEHLGTGLKELPDVQGESDSISPLLLHLEDDDFSENEKQLAEPASEPDVLKIVIDSEIKDSLLSNKKAIDGGKNTSGLPAEPESVSSPPTLHMKTGLENSNSTDTLWRPMPKLAPLGLKVANPSSDADGQSLKVMPCLAPIAAKVGSVGHKMNLTGNDQEGRESKVMPTLAPVVAKLGNSGASPSSAGK

SEQ ID NO: 8652 - protein, 1086 aa, Homo sapiens
MEEKQQIILANQDGGTVAGAAPTFFVILKQPGNGKTDQGILVTNQDACALASSVSSPVKSKGKICLPADCTVGGITVTLDNNSMWNEFYHRSTEMILTKQGRRMFPYCRYWITGLDSNLKYILVMDISPVDNHRYKWNGRWWEPSGKAEPHVLGRVFIHPESPSTGHYWMHQPVSFYKLKLTNNTLDQEGHIILHSMHRYLPRLHLVPAEKAVEVIQLNGPGVHTFTFPQTEFFAVTAYQNIQITQLKIDYNPFAKGFRDDGLNNKPQRDGKQKNSSDQEGNNISSSSGHRVRLTEGQGSEIQPGDLDPLSRGHETSGKGLEKTSLNIKRDFLGFMDTDSALSEVPQLKQEISECLIASSFEDDSRVASPLDQNGSFNVVIKEEPLDDYDYELGECPEGVTVKQEETDEETDVYSNSDDDPILEKQLKRHNKVDNPEADHLSSKWLPSSPSGVAKAKMFKLDTGKMPVVYLEPCAVTRSTVKISELPDNMLSTSRKDKSSMLAELEYLPTYIENSNETAFCLGKESENGLRKHSPDLRVVQKYPLLKEPQWKYPDISDSISTERILDDSKDSVGDSLSGKEDLGRKRTTMLKIATAAKVVNANQNASPNVPGKRGRPRKLKLCKAGRPPKNTGKSLISTKNTPVSPGSTFPDVKPDLEDVDGVLFVSFESKEALDIHAVDGTTEESSSLQASTTNDSGYRARISQLEKELIEDLKTLRHKQVIHPGLQEVGLKLNSVDPTMSIDLKYLGVQLPLAPATSFPFWNLTGTNPASPDAGFPFVSRTGKTNDFTKIKGWRGKFHSASASRNEGGNSESSLKNRSAFCSDKLDEYLENEGKLMETSMGFSSNAPTSPVVYQLPTKSTSYVRTLDSVLKKQSTISPSTSYSLKPHSVPPVSRKAKSQNRQATFSGRTKSSYKSILPYPVSPKQKYSHVILGDKVTKNSSGIISENQANNFVVPTLDENIFPKQISLRQAQQQQQQQQGSRPPGLSKSQVKLMDLEDCALWEGKPRTYITEERADVSLTTLLTAQASLKTKPIHTIIRKRAPPCNNDFCRLGCVCSSLALEKRQPAHCRRPDCMFGCTCLKRK

SEQ ID NO: 8653 - protein, 1138 aa, Homo sapiens
MEEKQQIILANQDGGTVAGAAPTFFVILKQPGNGKTDQGILVTNQDACALASSVSSPVKSKGKICLPADCTVGGITVTLDNNSMWNEFYHRSTEMILTKQGRRMFPYCRYWITGLDSNLKYILVMDISPVDNHRYKWNGRWWEPSGKAEPHVLGRVFIHPESPSTGHYWMHQPVSFYKLKLTNNTLDQEGHIILHSMHRYLPRLHLVPAEKAVEVIQLNGPGVHTFTFPQTEFFAVTAYQNIQITQLKIDYNPFAKGFRDDGLNNKPQRDGKQKNSSDQEGNNISSSSGHRVRLTEGQGSEIQPGDLDPLSRGHETSGKGLEKTSLNIKRDFLGFMDTDSALSEVPQLKQEISECLIASSFEDDSRVASPLDQNGSFNVVIKEEPLDDYDYELGECPEGVTVKQEETDEETDVYSNSDDDPILEKQLKRHNKVDNPEADHLSSKWLPSSPSGVAKAKMFKLDTGKMPVVYLEPCAVTRSTVKISELPDNMLSTSRKDKSSMLAELEYLPTYIENSNETAFCLGKESENGLRKHSPDLRVVQKYPLLKEPQWKYPDISDSISTERILDDSKDSVGDSLSGKEDLGRKRTTMLKIATAAKVVNANQNASPNVPGKRGRPRKLKLCKAGRPPKNTGKSLISTKNTPVSPGSTFPDVKPDLEDVDGVLFVSFESKEALDIHAVDGTTEESSSLQASTTNDSGYRARISQLEKELIEDLKTLRHKQVIHPGLQEVGLKLNSVDPTMSIDLKYLGVQLPLAPATSFPFWNLTGTNPASPDAGFPFVSRTGKTNDFTKIKGWRGKFHSASASRNEGGNSESSLKNRSAFCSDKLDEYLENEGKLMETSMGFSSNAPTSPVVYQLPTKSTSYVRTLDSVLKKQSTISPSTSYSLKPHSVPPVSRKAKSQNRQATFSGRTKSSYKSILPYPVSPKQKYSHVILGDKVTKNSSGIISENQANNFVVPTLDENIFPKQISLRQAQQQQQQQQGSRPPGLSKSQVKLMDLEDCALWEGKPRTYITEERADVSLTTLLTAQASLKTKPIHTIIRKRAPPCNNDFCRLGCVCSSLALEKRQPAHCRRPDCMFGCTCLKRKVVLVKGGSKTKHFQRKAAHRDPVFYDTLGEEAREEEEGIREEEEQLKEKKKR

SEQ ID NO: 8654 - protein, 2856 aa, Homo sapiens
MEEKQQIILANQDGGTVAGAAPTFFVILKQPGNGKTDQGILVTNQDACALASSVSSPVKSKGKICLPADCTVGGITVTLDNNSMWNEFYHRSTEMILTKQGRRMFPYCRYWITGLDSNLKYILVMDISPVDNHRYKWNGRWWEPSGKAEPHVLGRVFIHPESPSTGHYWMHQPVSFYKLKLTNNTLDQEGHIILHSMHRYLPRLHLVPAEKAVEVIQLNGPGVHTFTFPQTEFFAVTAYQNIQITQLKIDYNPFAKGFRDDGLNNKPQRDGKQKNSSDQEGNNISSSSGHRVRLTEGQGSEIQPGDLDPLSRGHETSGKGLEKTSLNIKRDFLGFMDTDSALSEVPQLKQEISECLIASSFEDDSRVASPLDQNGSFNVVIKEEPLDDYDYELGECPEGVTVKQEETDEETDVYSNSDDDPILEKQLKRHNKVDNPEADHLSSKWLPSSPSGVAKAKMFKLDTGKMPVVYLEPCAVTRSTVKISELPDNMLSTSRKDKSSMLAELEYLPTYIENSNETAFCLGKESENGLRKHSPDLRVVQKYPLLKEPQWKYPDISDSISTERILDDSKDSVGDSLSGKEDLGRKRTTMLKIATAAKVVNANQNASPNVPGKRGRPRKLKLCKAGRPPKNTGKSLISTKNTPVSPGSTFPDVKPDLEDVDGVLFVSFESKEALDIHAVDGTTEESSSLQASTTNDSGYRARISQLEKELIEDLKTLRHKQVIHPGLQEVGLKLNSVDPTMSIDLKYLGVQLPLAPATSFPFWNLTGTNPASPDAGFPFVSRTGKTNDFTKIKGWRGKFHSASASRNEGGNSESSLKNRSAFCSDKLDEYLENEGKLMETSMGFSSNAPTSPVVYQLPTKSTSYVRTLDSVLKKQSTISPSTSYSLKPHSVPPVSRKAKSQNRQATFSGRTKSSYKSILPYPVSPKQKYSHVILGDKVTKNSSGIISENQANNFVVPTLDENIFPKQISLRQAQQQQQQQQGSRPPGLSKSQVKLMDLEDCALWEGKPRTYITEERADVSLTTLLTAQASLKTKPIHTIIRKRAPPCNNDFCRLGCVCSSLALEKRQPAHCRRPDCMFGCTCLKRKVVLVKGGSKTKHFQRKAAHRDPVFYDTLGEEAREEEEGIREEEEQLKEKKKRKKLEYTICETEPEQPVRHYPLWVKVEGEVDPEPVYIPTPSVIEPMKPLLLPQPEVLSPTVKGKLLTGIKSPRSYTPKPNPVIREEDKDPVYLYFESMMTCARVRVYERKKEDQRQPSSSSSPSPSFQQQTSCHSSPENHNNAKEPDSEQQPLKQLTCDLEDDSDKLQEKSWKSSCNEGESSSTSYMHQRSPGGPTKLIEIISDCNWEEDRNKILSILSQHINSNMPQSLKVGSFIIELASQRKSRGEKNPPVYSSRVKISMPSCQDQDDMAEKSGSETPDGPLSPGKMEDISPVQTDALDSVRERLHGGKGLPFYAGLSPAGKLVAYKRKPSSSTSGLIQVASNAKVAASRKPRTLLPSTSNSKMASSSGTATNRPGKNLKAFVPAKRPIENAAQIPVATPQVSPNTVKRAGPRLLLIPVQQGSPTLRPVSNTQLQGHRMVLQPVRSPSGMNLFRHPNGQIVQLLPLHQLRGSNTQPNLQPVMFRNPGSVMGIRLPAPSKPSETPPSSTSSSAFSVMNPVIQAVGSSSAVNVITQAPSLLSSGASFVSQAGTLTLRISPPEPQSFASKTGSETKITYSSGGQPVGTASLIPLQSGSFALLQLPGQKPVPSSILQHVASLQMKRESQNPDQKDETNSIKREQETKKVLQSEGEAVDPEANVIKQNSGAATSEETLNDSLEDRGDHLDEECLPEEGCATVKPSEHSCITGSHTDQDYKDVNEEYGARNRKSSKEKVAVLEVRTISEKASNKTVQNLSKVQHQKLGDVKVEQQKGFDNPEENSSEFPVTFKEESKFELSGSKVMEQQSNLQPEAKEKECGDSLEKDRERWRKHLKGPLTRKCVGASQECKKEADEQLIKETKTCQENSDVFQQEQGISDLLGKSGITEDARVLKTECDSWSRISNPSAFSIVPRRAAKSSRGNGHFQGHLLLPGEQIQPKQEKKGGRSSADFTVLDLEEDDEDDNEKTDDSIDEIVDVVSDYQSEEVDDVEKNNCVEYIEDDEEHVDIETVEELSEEINVAHLKTTAAHTQSFKQPSCTHISADEKAAERSRKAPPIPLKLKPDYWSDKLQKEAEAFAYYRRTHTANERRRRGEMRDLFEKLKITLGLLHSSKVSKSLILTRAFSEIQGLTDQADKLIGQKNLLTRKRNILIRKVSSLSGKTEEVVLKKLEYIYAKQQALEAQKRKKKMGSDEFDISPRISKQQEGSSASSVDLGQMFINNRRGKPLILSRKKDQATENTSPLNTPHTSANLVMTPQGQLLTLKGPLFSGPVVAVSPDLLESDLKPQVAGSAVALPENDDLFMMPRIVNVTSLATEGGLVDMGGSKYPHEVPDSKPSDHLKDTVRNEDNSLEDKGRISSRGNRDGRVTLGPTQVFLANKDSGYPQIVDVSNMQKAQEFLPKKISGDMRGIQYKWKESESRGERVKSKDSSFHKLKMKDLKDSSIEMELRKVTSAIEEAALDSSELLTNMEDEDDTDETLTSLLNEIAFLNQQLNDDSVGLAELPSSMDTEFPGDARRAFISKVPPGSRATFQVEHLGTGLKELPDVQGESDSISPLLLHLEDDDFSENEKQLAEPASEPDVLKIVIDSEIKDSLLSNKKAIDGGKNTSGLPAEPESVSSPPTLHMKTGLENSNSTDTLWRPMPKLAPLGLKVANPSSDADGQSLKVMPCLAPIAAKVGSVGHKMNLTGNDQEGRESKVMPTLAPVVAKLGNSGASPSSAGK

SEQ ID NO: 8655 - protein, 3065 aa, Homo sapiens; identical to SEQ ID NO: 8651

SEQ ID NO: 8656 - protein, 2856 aa, Homo sapiens; identical to SEQ ID NO: 8654

SEQ ID NO: 8657 - protein, 61 aa, Homo sapiens [sequence omitted]

SEQ ID NO: 8658 - protein, 83 aa, Homo sapiens
  SITE 1: note = misc_feature - Xaa can be any naturally occurring amino acid
XDQEGNNISSSSGHRVRLTEGQGSEIQPGDLDPLSRGHETSGKGLEKTSLNIKRDFLGFMDTDSALSEVPQLKQEISEWYSFA

SEQ ID NO: 8659 - protein, 1174 aa, Homo sapiens
  SITE 1: note = misc_feature - Xaa can be any naturally occurring amino acid
XLTCDLEDDSDKLQEKSWKSSCNEGESSSTSYMHQRSPGGPTKLIEIISDCNWEEDRNKILSILSQHINSNMPQSLKVNGKSYPQAKLLLGQMGALHPANRLAAYITGRLRPSVLDLSTLSTVISKVASNAKVAASRKPRTLLPSTSNSKMASSSGTATNRPGKNLKAFVPAKRPIAARPSPGGVFTQFVMSKVGALQQKIPGVSTPQTLAGTQKFSIRPSPVMVVTPVVSSEPVQVCSPVTAAVTTTTPQVFLENTTAVTPMTAISDVETKETTYSSGATTTGVVEVSETNTSTSVTSTQSTATVNLTKTTGITTPVASVAFPKSLVASPSTITLPVASTASTSLVVVTAAASSSMVTTPTSSLGSVPIILSGINGSPPVSQRPENAAQIPVATPQVSPNTVKRAGPRLLLIPVQQGSPTLRPVSNTQLQGHRMVLQPVRSPSGMNLFRHPNGQIVQLLPLHQLRGSNTQPNLQPVMFRNPGSVMGIRLPAPSKPSETPPSSTSSSAFSVMNPVIQAVGSSSAVNVITQAPSLLSSGASFVSQAGTLTLRISPPEPQSFASKTGSETKITYSSGGQPVGTASLIPLQSGSFALLQLPGQKPVPSSILQHVASLQMKRESQNPDQKDETNSIKREQETKKVLQSEGEAVDPEANVIKQNSGAATSEETLNDSLEDRGDHLDEECLPEEGCATVKPSEHSCITGSHTDQDYKDVNEEYGARNRKSSKEKVAVLEVRTISEKASNKTVQNLSKVQHQKLGDVKVEQQKGFDNPEENSSEFPVTFKEESKFELSGSKVMEQQSNLQPEAKEKECGDSLEKDRERWRKHLKGPLTRKCVGASQECKKEADEQLIKETKTCQENSDVFQQEQGISDLLGKSGITEDARVLKTECDSWSRISNPSAFSIVPRRAAKSSRGNGHFQGHLLLPGEQIQPKQEKKGGRSSADFTVLDLEEDDEDDNEKTDDSIDEIVDVVSDYQSEEVDDVEKNNCVEYIEDDEEHVDIETVEELSEEINVAHLKTTAAHTQSFKQPSCTHISADEKAAERSRKAPPIPLKLKPDYWSDKLQKEAEAFAYYRRTHTANERRRRGEMRDLFEKLKITLGLLHSSKVSKSLILTRAFSEIQGLTDQADKLIGQKNLLTRKRNILIRKVSSLSGKTEEVVLKKLEYIYAKQQALEA

SEQ ID NO: 8660 - protein, 447 aa, Homo sapiens
MRFRIYKRKVLILTLVVAACGFVLWSSNGRQRKNEALAPPLLDAEPARGAGGRGGDHPSVAVGIRRVSNVSAASLVPAVPQPEADNLTLRYRSLVYQLNFDQTLRNVDKAGTWAPRELVLVVQVHNRPEYLRLLLDSLRKAQGIDNVLVIFSHDFWSTEINQLIAGVNFCPVLQVFFPFSIQLYPNEFPGSDPRDCPRDLPKNAALKLGCINAEYPDSFGHYREAKFSQTKHHWWWKLHFVWERVKILRDYAGLILFLEEDHYLAPDFYHVFKKMWKLKQQECPECDVLSLGTYSASRSFYGMADKVDVKTWKSTEHNMGLALTRNAYQKLIECTDTFCTYDDYNWDWTLQYLTVSCLPKFWKVLVPQIPRIFHAGDCGMHHKKTCRPSTQSAQIESLLNNNKQYMFPETLTISEKFTVVAISPPRKNGGWGDIRDHELCKSYRRLQ

SEQ ID NO: 8661 - protein, 108 aa, Homo sapiens
MESCSCHPGSGVQWRDHGSLQLPPPGFKMKMRRYKLFLMFCMAGLCLISFLHFFKTLSYVTFPRELASLSPNLVSSFFWNNAPVTPQASPEPGGPDLLRTPLYSHSPL

SEQ ID NO: 8662 - protein, 161 aa, Homo sapiens
MKMRRYKLFLMFCMAGLCLISFLHFFKTLSYVTFPRELASLSPNLVSSFFWNNAPVTPQASPEPGGPDLLRTPLYSHSPLLQPLPPSKAAEELHRVDLVLPEDTTEYFVRTKAGGVCFKPGTKMLERPPPGRPEEKPEGANGSSARRPPRYLLSARERTGG

SEQ ID NO: 8663 - protein, 533 aa, Homo sapiens
MKMRRYKLFLMFCMAGLCLISFLHFFKTLSYVTFPRELASLSPNLVSSFFWNNAPVTPQASPEPGGPDLLRTPLYSHSPLLQPLPPSKAAEELHRVDLVLPEDTTEYFVRTKAGGVCFKPGTKMLERPPPGRPEEKPEGANGSSARRPPRYLLSARERTGGRGARRKWVECVCLPGWHGPSCGVPTVVQYSNLPTKERLVPREVPRRVINAINVNHEFDLLDVRFHELGDVVDAFVVCESNFTAYGEPRPLKFREMLTNGTFEYIRHKVLYVFLDHFPPGGRQDGWIADDYLRTFLTQDGVSRLRNLRPDDVFIIDDADEIPARDGVLFLKLYDGWTEPFAFHMRKSLYGFFWKQPGTLEVVSGCTVDMLQAVYGLDGIRLRRRQYYTMPNFRQYENRTGHILVQWSLGSPLHFAGWHCSWCFTPEGIYFKLVSAQNGDFPRWGDYEDKRDLNYIRGLIRTGGWFDGTQQEYPPADPSEHMYAPKYLLKNYDRFHYLLDNPYQEPRSTAAGGWRHRGPEGRPPARGKLDEAEV

SEQ ID NO: 8664 - protein, 423 aa, Homo sapiens
MNYSITVSIVMGIPTVKREVKSYLIETLHSLIDNLYPEEKLDCVIVVFIGETDIDYVHGVVANLEKEFSKEISSGLVEVISPPESYYPDLTNLKETFGDSKERVRWRTKQNLDYCFLMMYAQEKGIYYIQLEDDIIVKQNYFNTIKNFALQLSSEEWMILEFSQLGFIGKMFQAPDLTLIVEFIFMFYKEKPIDWLLDHILWVKVCNPEKDAKHCDRQKANLRIRFRPSLFQHVGLHSSLSGKIQKLTDKDYMKPLLLKIHVNPPAEVSTSLKVYQGHTLEKTYMGEDFFWAITPIAGDYILFKFDKPVNVESYLFHSGNQEHPGDILLNTTVEVLPFKSEGLEISKETKDKRLEDGYFRIGKFENGVAEGMVDPSLNPISAFRLSVIQNSAVWAILNEQRVFSGWWQKSRDKAEGPQAPLLF

SEQ ID NO: 8665 - protein, 535 aa, Homo sapiens
MRLRNGTVATALAFITSFLTLSWYTTWQNGKEKLIAYQREFLALKERLRIAEHRISQRSSELNTIVQQFKRVGAETNGSKDALNKFSDNTLKLLKELTSKKSLQVPSIYYHLPHLLKNEGSLQPAVQIGNGRTGVSIVMGIPTVKREVKSYLIETLHSLIDNLYPEEKLDCVIVVFIGETDIDYVHGVVANLEKEFSKEISSGLVEVISPPESYYPDLTNLKETFGDSKERVRWRTKQNLDYCFLMMYAQEKGIYYIQLEDDIIVKQNYFNTIKNFALQLSSEEWMILEFSQLGFIGKMFQAPDLTLIVEFIFMFYKEKPIDWLLDHILWVKVCNPEKDAKHCDRQKANLRIRFRPSLFQHVGLHSSLSGKIQKLTDKDYMKPLLLKIHVNPPAEVSTSLKVYQGHTLEKTYMGEDFFWAITPIAGDYILFKFDKPVNVESYLFHSGNQEHPGDILLNTTVEVLPFKSEGLEISKETKDKRLEDGYFRIGKFENGVAEGMVDPSLNPISAFRLSVIQNSAVWAILNEIHIKKATN

SEQ ID NO: 8666 - protein, 535 aa, Homo sapiens; identical to SEQ ID NO: 8665

SEQ ID NO: 8667 - protein, 535 aa, Homo sapiens; identical to SEQ ID NO: 8665

SEQ ID NO: 8668 - protein, 44 aa, Homo sapiens
MRLRNGTVATALAFITSFLTLSWYTTWQNGKGKENDSENVHEMY

SEQ ID NO: 8669 - protein, 200 aa, Homo sapiens
MGIPSVRREVHSYLTDTLHSLISELSPQEKEDSVIVVLIAETDSQYTSAVTENIKALFPTEIHSGLLEVISPSPHFYPDFSRLRESFGDPKERVRWRTKQNLDYCFLMMYAQSKGIYYVQLEDDIVAKPNYLSTMKNFALQQPSEDWMILEFSQLGFIGKMFKSLDLSLIVEFILMFYRDKPIDWLLDHILWVKVCNPEK

SEQ ID NO: 8670 - protein, 548 aa, Homo sapiens
MRLRNGTFLTLLLFCLCAFLSLSWYAALSGQKGDVVDVYQREFLALRDRLHAAEQESLKRSKELNLVLDEIKRAVSERQALRDGDGNRTWGRLTEDPRLKPWNGSHRHVLHLPTVFHHLPHLLAKESSLQPAVRVGQGRTGVSVVMGIPSVRREVHSYLTDTLHSLISELSPQEKEDSVIVVLIAETDSQYTSAVTENIKALFPTEIHSGLLEVISPSPHFYPDFSRLRESFGDPKERVRWRTKQNLDYCFLMMYAQSKGIYYVQLEDDIVAKPNYLSTMKNFALQQPSEDWMILEFSQLGFIGKMFKSLDLSLIVEFILMFYRDKPIDWLLDHILWVKVCNPEKDAKHCDRQKANLRIRFKPSLFQHVGTHSSLAGKIQKLKDKDFGKQALRKEHVNPPAEVSTSLKTYQHFTLEKAYLREDFFWAFTPAAGDFIRFRFFQPLRLERFFFRSGNIEHPEDKLFNTSVEVLPFDNPQSDKEALQEGRTATLRYPRSPDGYLQIGSFYKGVAEGEVDPAFGPLEALRLSIQTDSPVWVILSEIFLKKAD

SEQ ID NO: 8671 - protein, 157 aa, Homo sapiens
MSRVAGTRTDVNELLQRWTPRCVRWHTGGARRVALDRPLVTACLPPAGDVVDVYQREFLALRDRLHAAEQESLKRSKELNLVLDEIKRAVSERQALRDGDGNRTWGRLTEDPRLKPWNGSHRHVLHLPTVFHHLPHLLAKESSLQPAVRVGQGRTGD

SEQ ID NO: 8672 - protein, 563 aa, Homo sapiens
MSRVAGTRTDVNELLQRWTPRCVRWHTGGARRVALDRPLVTACLPPAGDVVDVYQREFLALRDRLHAAEQESLKRSKELNLVLDEIKRAVSERQALRDGDGNRTWGRLTEDPRLKPWNGSHRHVLHLPTVFHHLPHLLAKESSLQPAVRVGQGRTGVSVVMGIPSVRREVHSYLTDTLHSLISELSPQEKEDSVIVVLIAETDSQYTSAVTENIKALFPTEIHSGLLEVISPSPHFYPDFSRLRESFGDPKERVRWRTKQNLDYCFLMMYAQSKGIYYVQLEDDIVAKPNYLSTMKNFALQQPSEDWMILEFSQLGFIGKMFKSLDLSLIVEFILMFYRDKPIDWLLDHILWVKVCNPEKDAKHCDRQKANLRIRFKPSLFQHVGTHSSLAGKIQKLKDKDFGKQALRKEHVNPPAEVSTSLKTYQHFTLEKAYLREDFFWAFTPAAGDFIRFRFFQPLRLERFFFRSGNIEHPEDKLFNTSVEVLPFDNPQSDKEALQEGRTATLRYPRSPDGYLQIGSFYKGVAEGEVDPAFGPLEALRLSIQTDSPVWVILSEIFLKKAD

SEQ ID NO: 8673 - protein, 373 aa, Homo sapiens
  SITE 1: note = misc_feature - Xaa can be any naturally occurring amino acid
XEDSVIVVLIAETDSQYTSAVTENIKALFPTEIHSGLLEVISPSPHFYPDFSRLRESFGDPKERVRWRTKQNLDYCFLMMYAQSKGIYYVQLEDDIVAKPNYLSTMKNFALQQPSEDWMILEFSQLGFIGKMFKSLDLSLIVEFILMFYRDKPIDWLLDHILWVKVCNPEKDAHCDRQKANLRIRFKPSLFQHVGTHSSLAGKIQKLKDKDFGKQALRKEHVNPPAEVSTSLKTYQHFTLEKAYLREDFFWAFTPAAGDFIRFRFFQPLRLERFFFRSGNIEHPEDKLFNTSVEVLPFDNPQSDKEALQEGRTATLRYPRSPDGYLQIGSFYKGVAEGEVDPAFGPLEALRLSIQTDSPVWVILSEIFLKKAD

SEQ ID NO: 8674 - protein, 429 aa, Homo sapiens
  SITE 1: note = misc_feature - Xaa can be any naturally occurring amino acid
XEQESLKRSKELNLVLDEIKRAVSERQALRDGDGNRTWGRLTEDPRLKPWNGSHRHVLHLPTVFHHLPHLLAKESSLQPAVRVGQGRTGVSVVMGIPSVRREVHSYLTDTLHSLISELSPQEKEDSVIVVLIAETDSQYTSAVTENIKALFPTEIHSGLLEVISPSPHFYPDFSRLRESFGDPKERVRWRTKQNLDYCFLMMYAQSKGIYYVQLEDDIVAKPNYLSTMKNFALQQPSEDWMILEFSQLGFIGQRLWKAGAAEGACEPASRGEHEPEDIPALHPGESLPARGLLLGLHPCRGGLHPLPLLPTSKTGAVLLPQWEHRAPGGQALQHVCGGAALRQPSVRQGGPAGGPHRHPPVPSEPRRLPPDRLLLQGSGRGRGGPSLRPSGSTAPLDPDGLPCVGDSERDLPEKGRLSCGLLRVPCGQP

SEQ ID NO: 8675 - protein, 322 aa, Homo sapiens
  SITE 1: note = misc_feature - Xaa can be any naturally occurring amino acid
XFPTEIHSGLLEVISPSPHFYPDFSRLRESFGDPKERVRWRTKQNLDYCFLMMYAQSKGIYYVQLEDDIVAKPNYLSTMKNFALQQPSEDWMILEFSQLGFIGKMFKSLDLSLIVEFILMFYRDKPIDWLLDHILWVKVCNPEKDAAGIKVGAHAITAVPPPLQDKDFGKQALRKEHVNPPAEVSTSLKTYQHFTLEKAYLREDFFWAFTPAAGDFIRFRFFQPLRLERFFFRSGNIEHPEDKLFNTSVEVLPFDNPQSDKEALQEGRTATLRYPRSPDGYLQIGSFYKGVAEGEVDPAFGPLEALRLSIQTDSPVWVILSE

SEQ ID NO: 8676 - protein, 240 aa, Homo sapiens
  SITE 1: note = misc_feature - Xaa can be any naturally occurring amino acid
XKMFKSLDLSLIVEFILMFYRDKPIDWLLDHILWVKVCNPEKDAKHCDRQKANLRIRFKPSLFQHVGTHSSLAGKIQKLKDKDFGKQALRKEHVNPPAEVSTSLKTYQHFTLEKAYLREDFFWAFTPAAGDFIRFRFFQPLRLERGNIEHPEDKLFNTSVEVLPFDNPQSDKEALQEGRTATLRYPRSPDGYLQIGSFYKGVAEGEVDPAFGPLEALRLSIQTDSPVWVILSEIFLKKAD

SEQ ID NO: 8677 - protein, 150 aa, Homo sapiens
  SITE 1: note = misc_feature - Xaa can be any naturally occurring amino acid
XLLLFCLCAFLSLSWYAALSGQKGDVVDVYQREFLALRDRLHAAEQESLKRSKELNLVLDEIKRAVSERQALRDGDGNRTWGRLTGPPIEAVERLTPARAAPAHRLPSPATPAGQGEQSAARGARGPGPHRSVGGDGHPERAARGALVPD

SEQ ID NO: 8678 - protein, 245 aa, Homo sapiens
  SITE 1: note = misc_feature - Xaa can be any naturally occurring amino acid
XQYTSAVTENIKALFPTEIHSGLLEVISPSPHFYPDFSRLRESFGDPKERVRWRTKQNLDYCFLMMYAQSKGIYYVQLEDDIVAKPNYLSTMKNFALQQPSEDWMILEFSQLGFIGKMFKSLDLSLIVEFILMFYRDKPIDWLLDHILWVKVCNPEKDAKHCDRQKANLRIRFKPSLFQHVGTHSSLAGKIQKLKDKDFGKQALRKEHVNPPAEWEHRAPGGQALQHVCGGAALRQPSVRQGGPA

SEQ ID NO: 8679 - protein, 307 aa, Homo sapiens
  SITE 1: note = misc_feature - Xaa can be any naturally occurring amino acid
XTSAVTENIKALFPTEIHSGLLEVISPSPHFYPDFSRLRESFGDPKERVRWRTKQNLDYCFLMMYAQSKGIYYVQLEDDIVAKPNYLSTMKNFALQQPSEDWMILEFSQLGFIARGHSLLAGWQDPETEGQRLWKAGAAEGACEPASRGEHEPEDIPALHPGESLPARGLLLGLHPCRGGLHPLPLLPTSKTGAVLLPQWEHRAPGGQALQHVCGGAALRQPSVRQGGPAGGPHRHPPVPSEPRRLPPDRLLLQGSGRGRGGPSLRPSGSTAPLDPDGLPCVGDSERDLPEKGRLSCGLLRVPCGQP

SEQ ID NO: 8680 - protein, 113 aa, Homo sapiens
MRTKQVNLLITLVAVALFSFSCFSIYRITQTISFALGISTVNRGNYSYLKQTLTSVVSRMTLSQEKDSVVIVLVADSNEDYLHSVVKMITKKFKRQVRSGSLEVISIPAFLYS

SEQ ID NO: 8681 - protein, 166 aa, Homo sapiens
MRTKQVNLLITLVAVALFSFSCFSIYRITQTNNQLINCRNHILEFKENMLHLRNKTEKNTQEMMKVLNRMKYEITKREILSGNLGKLFRSEDLTHFVRFFLMFYKEKPIDWLLNDIFQVKVCDAGEDLRNCMKRKKQIRIQYKPSLFQHVGIHSSFPRKEQYEKKI

SEQ ID NO: 8682 - protein, 375 aa, Homo sapiens
MRTKQVNLLITLVAVALFSFSCFSIYRITQTNNQLINCRNHILEFKENMLHLRNKTEKNTQEMMKVLNRMKYEITKREILSGNLVAQKADILNKNETVSNTFEDLKFFFPHLRKEGRIYPDVIIGKGKTGVSFALGISTVNRGNYSYLKQTLTSVVSRMTLSQEKDSVVIVLVADSNEDYLHSVVKMITKKFKRQVRSGSLEVISIPAFLYSSMLNAKHLAEASQKLASWRIKQVLDFCILLLYAQPKAKYYLQLEDDIIAKEMYFTKITDFVGNISSNNWFFIEFSMLGFIGKLFRSEDLTHFVRFFLMFYKEKPIDWLLNDIFQVKVCDAGEDLRNCMKRKKQIRIQYKPSLFQHVGIHSSFPRKEQYEKDVY

SEQ ID NO: 8683 - protein, 374 aa, Homo sapiens
MRTKQVNLLITLVAVALFSFSCFSIYRITQTNNQLINCRNHILEFKENMLHLRNKTEKNTQEMMKVLNRMKYEITKREILSGNLVAQKADILNKNETVSNTFEDLKFFFPHLRKEGRIYPDVIIGKGKTGVSFALGISTVNRGNYSYLKQTLTSVVSRMTLSQEKDSVVIVLVADSNEDYLHSVVKMITKKFKRQVRSGSLEVISIPAFLYSSMLNAKHLAEASQKLASWRIKQVLDFCILLLYAQPKAKYYLQLEDDIIAKEMYFTKITDFVGNISSNNWFFIEFSMLGFIGKLFRSEDLTHFVRFFLMFYKEKPIDWLLNDIFQVKVCDAGEDLRNCMKRKKQIRIQYKPSLFQHVGIHSSFPRKEQYEKKI

SEQ ID NO: 8684 - protein, 36 aa, Homo sapiens
MRTKQVNLLITLVAVALFSFSCFSIYRITQTNSKGK

SEQ ID NO: 8685 - protein, 91 aa, Homo sapiens
  SITE 1: note = misc_feature - Xaa can be any naturally occurring amino acid
XNISSNNWFFIEFSMLGFIGKLFRSEDLTHFVRFFLMFYKEKPIDWLLNDIFQRNCMKRKKQIRIQYKPSLFQHVGIHSSFPRKEQYEKKI

SEQ ID NO: 8686 - protein, 283 aa, Homo sapiens
METGPEDPSSMPEESSPRRTPQSIPYQDLPHLVNADGQYLFCRYWKPTGTPKALIFVSHGAGEHSGRYEELARMLMGLDLLVFAHDHVGHGQSEGERMVVSDFHVFVRDVLQHVDSMQKDYPGLPVFLLGHSMGGAIAILTAAERPGHFAGMVLISPLVLANPESATTFKVDIYNSDPLICRAGLKVCFGIQLLNAVSRVERALPKLTVPFLLLQGSADRLCDSKGAYLLMELAKSQDKTLKIYEGAYHVLHKELPEVTNSVFHEINMWVSQRTATAGTASPP

SEQ ID NO: 8687 - protein, 313 aa, Homo sapiens
METGPEDPSSMPEESSPRRTPQSIPYQDLPHLVNADGQYLFCRYWKPTGTPKALIFVSHGAGEHSGRYEELARMLMGLDLLVFAHDHVGHGQSEGERMVVSDFHVFVRDVLQHVDSMQKDYPGLPVFLLGHSMGGAIAILTAAERPGHFAGMVLISPLVLANPESATTFKVLAAKVLNLVLPNLSLGPIDSSVLSRNKTEVDIYNSDPLICRAGLKVCFGIQLLNAVSRVERALPKLTVPFLLLQGSADRLCDSKGAYLLMELAKSQDKTLKIYEGAYHVLHKELPEVTNSVFHEINMWVSQRTATAGTASPP

SEQ ID NO: 8688 - protein, 89 aa, Homo sapiens
MLMGLDLLVFAHDHVGHGQSEGERMVVSDFHVFVRDVLQHVDSMQKDYPGLPVFLLGHSMGGAIAILTAAERPGHFAGMVLISPLVLAN

SEQ ID NO: 8689 - protein, 77 aa, Homo sapiens
MPEESSPRRTPQSIPYQDLPHLVNADGQYLFCRYWKPTGTPKALIFVSHGAGEHSGRYEELARMLMGLDLLVFAHDH

SEQ ID NO: 8690 - protein, 303 aa, Homo sapiens
MPEESSPRRTPQSIPYQDLPHLVNADGQYLFCRYWKPTGTPKALIFVSHGAGEHSGRYEELARMLMGLDLLVFAHDHVGHGQSEGERMVVSDFHVFVRDVLQHVDSMQKDYPGLPVFLLGHSMGGAIAILTAAERPGHFAGMVLISPLVLANPESATTFKVLAAKVLNLVLPNLSLGPIDSSVLSRNKTEVDIYNSDPLICRAGLKVCFGIQLLNAVSRVERALPKLTVPFLLLQGSADRLCDSKGAYLLMELAKSQDKTLKIYEGAYHVLHKELPEVTNSVFHEINMWVSQRTATAGTASPP

SEQ ID NO: 8691 - protein, 303 aa, Homo sapiens; identical to SEQ ID NO: 8690

SEQ ID NO: 8692 - protein, 277 aa, Homo sapiens
MQTRFRRIFPWKDASTKRMPEFIHFSPLKPYKGREWEKAGSEHVLETHLLPVGHGQSEGERMVVSDFHVFVRDVLQHVDSMQKDYPGLPVFLLGHSMGGAIAILTAAERPGHFAGMVLISPLVLANPESATTFKVLAAKVLNLVLPNLSLGPIDSSVLSRNKTEVDIYNSDPLICRAGLKVCFGIQLLNAVSRVERALPKLTVPFLLLQGSADRLCDSKGAYLLMELAKSQDKTLKIYEGAYHVLHKELPEVTNSVFHEINMWVSQRTATAGTASPP

SEQ ID NO: 8693 - protein, 197 aa, Homo sapiens
PVGHGQSEGERMVVSDFHVFVRDVLQHVDSMQKDYPGLPVFLLGHSMGGAIAILTAAERPGHFAGMVLISPLVLANPESATTFKVDIYNSDPLICRAGLKVCFGIQLLNAVSRVERALPKLTVPFLLLQGSADRLCDSKGAYLLMELAKSQDKTLKIYEGAYHVLHKELPEVTNSVFHEINMWVSQRTATAGTASPP

SEQ ID NO: 8694 - protein, 155 aa, Homo sapiens [sequence omitted]

SEQ ID NO: 8695 - protein, 209 aa, Homo sapiens
  SITE 1: note = misc_feature - Xaa can be any naturally occurring amino acid
XLQGGAIAILTAAERPGHFAGMVLISPLVLANPESATTFKDYSRILKHLMEKASRMLKFWIPRPFWVLAAKVLNLVLPNLSLGPIDSSVLSRNKTEVDIYNSDPLICRAGLKVCFGIQLLNAVSRVERALPKLTVPFLLLQGSADRLCDSKGAYLLMELAKSQDKTLKIYEGAYHVLHKELPEVTNSVFHEINMWVSQRTATAGTASPP

SEQ ID NO: 8696 - protein, 103 aa, Homo sapiens
MKSLILLAILAALAVVTLCYESHESMESYELNPFINRRNANTFISPQQRWRAKVQERIRERSKPVHELNREACDDYRLCERYAMVYGYNAAYNRYFRKRRGTK

SEQ ID NO: 8697 - protein, 128 aa, Homo sapiens
MKSLILLAILAALAVVTLCYGEWQKEENFGFDIVSVLSLNWHRAQESHESMESYELNPFINRRNANTFISPQQRWRAKVQERIRERSKPVHELNREACDDYRLCERYAMVYGYNAAYNRYFRKRRGTK

SEQ ID NO: 8698 - protein, 74 aa, Homo sapiens
  SITE 1: note = misc_feature - Xaa can be any naturally occurring amino acid
XSHESMESYELRSENALSLSTSSIGKPVMTTDFANATPWFMDTMLPIIATSGSAEGPNETEGRKKISFFLEAGT

SEQ ID NO: 8699 - protein, 77 aa, Homo sapiens
MAGNSILLAAVSILSACQQSYFALQVGKARLKYKVTPPAVTGSPEFERVFRAHFCYLSGSGVHIWPSPILLGIFRSC

SEQ ID NO: 8700 - protein, 147 aa, Homo sapiens
MAGNSILLAAVSILSACQQSYFALQVGKARLKYKVTPPAVTGSPEFERVFRAQQNCVEFYPIFIITLWMAGWYFNQVFATCLGLVYIYGRHLYFWGYSEAAKKRITGFRLSLGILALLTLLGALGIANSFLDEYLDLNIAKKLRRQF

SEQ ID NO: 8701 - protein, 147 aa, Homo sapiens; identical to SEQ ID NO: 8700

SEQ ID NO: 8702 - protein, 147 aa, Homo sapiens; identical to SEQ ID NO: 8700

SEQ ID NO: 8703 - protein, 46 aa, Homo sapiens
MARSLVCLGVIILLSAFSGPGVRGGPMPKLADRKLCADQECSHPIS

SEQ ID NO: 8704 - protein, 131 aa, Homo sapiens
MARSLVCLGVIILLSAFSGPGVRGGPMPKLADRKLCADQECSHPISMAVALQDYMAPDCRFLTIHRGQVVYVFSKLKGRGRLFWGGSVQGDYYGDLAARLGYFPSSIVREDQTLKPGKVDVKTDKWDFYCQ

SEQ ID NO: 8705 - protein, 131 aa, Homo sapiens; identical to SEQ ID NO: 8704

SEQ ID NO: 8706 - protein, 131 aa, Homo sapiens; identical to SEQ ID NO: 8704

SEQ ID NO: 8707 - protein, 95 aa, Homo sapiens
  SITE 1: note = misc_feature - Xaa can be any naturally occurring amino acid
XRSLVCLGVIILLSAFSGPGVRGGPMPKLADRKLCADQECSHPISMAVALQDYMAPDCRFLTIHRGQVVFREITMEIWLLAWAISPVALSERTRP

SEQ ID NO: 8708 - protein, 58 aa, Homo sapiens
  SITE 1: note = misc_feature - Xaa can be any naturally occurring amino acid
XSLVCLGVIILLSAFSGPGVRGGPMPKLADRKLCADQECSRSGRLLWRSGCSPGLFPQ

SEQ ID NO: 8709 - protein, 1412 aa, Homo sapiens
MAKFGVHRILLLAISLTKCLESTKLLADLKKCGDLECEALINRVSAMRDYRGPDCRYLNFTKGEEISVYVKLAGEREDLWAGSKGKEFGYFPRDAVQIEEVFISEEIQMSTKESDFLCLLGVSYTFDNEDSELNGDYGENIYPYEEDKDEKSSIYESDFQIEPGFYATYESTLFEDQVPALEAPEDIGSTSESKDWEEVVVESMEQDRIPEVHVPPSSAVSGVKEWFGLGGEQAEEKAFESVIEPVQESSFRSRKIAVEDENDLEELNNGEPQTEHQQESESEIDSVPKTQSELASESEHIPKPQSTGWFGGGFTSYLGFGDEDTGLELIAEESNPPLQDFPNSISSDKEATVPCTEILTEKKDTITNDSLSLKPSWFDFGFAILGFAYAKEDKIMLDDRKNEEDGGADEHEHPLTSELDPEKEQEIETIKIIETEDQIDKKPVSEKTDESDTIPYLKKFLYNFDNPWNFQNIPKETELPFPKQILDQNNVIENEETGEFSIDNYPTDNTKVMIFKSSYSLSDMVSNIELPTRIHEEVYFEPSSSKDSDENSKPSVDTEGPALVEIDRSVENTLLNSQMVSTDNSLSSQNYISQKEDASEFQILKYLFQIDVYDFMNSAFSPIVILTERVVAALPEGMRPDSNLYGFPWELVICAAVVGFFAVLFFLWRSFRSVRSRLYVGREKKLALMLSGLIEEKSKLLEKFSLVQKEYEGYEVESSLKDASFEKEATEAQSLEATCEKLNRSNSELEDEILCLEKELKEEKSKHSEQDELMADISKRIQSLEDESKSLKSQVAEAKMTFKIFQMNEERLKIAIKDALNENSQLQESQKQLLQEAEVWKEQVSELNKQKVTFEDSKVHAEQVLNDKESHIKTLTERLLKMKDWAAMLGEDITDDDNLELEMNSESENGAYLDNPPKGALKKLIHAAKLNASLKTLEGERNQIYIQLSEVDKTKEELTEHIKNLQTEQASLQSENTHFENENQKLQQKLKVMTELYQENEMKLHRKLTVEENYRLEKEEKLSKVDEKISHATEELETYRKRAKDLEEELERTIHSYQGQIISHEKKAHDNWLAARNAERNLNDLRKENAHNRQKLTETELKFELLEKDPYALDVPNTAFGREHSPYGPSPLGWPSSETRAFLSPPTLLEGPLRLSPLLPGGGGRGSRGPGNPLDHQITNERGESSCDRLTDPHRAPSDTGSLSPPWDQDRRMMFPPPGQSYPDSALPPQRQDRFCSNSGRLSGPAELRSFNMPSLDKMDGSMPSEMESSRNDTKDDLGNLNVPDSSLPAENEATGPGFVPPPLAPIRGPLFPVDARGPFLRRGPPFPPPPPGAMFGASRDYFPPGDFPGPPPAPFAMRNVYPPRGFPPYLPPRPGFFPPPPHSEGRSEFPSGLIPPSNEPATEHPEPQQET

SEQ ID NO: 8710 - protein, 1907 aa, Homo sapiens
MAAAPGLLVWLLVLRLPWRVPGQLDPSTGRRFSEHKLCADDECSMLMYRGEALEDFTGPDCRFVNFKKGDPVYVYYKLARGWPEVWAGSVGRTFGYFPKDLIQVVHEYTKEELQVPTDETDFVCFDGGRDDFHNYNVEELLGFLELYNSAATDSEKAVEKTLQDMEKNPELSKEREPEPEPVEANSEESDSVFSENTEDLQEQFTTQKHHSHANSQANHAQGEQASFESFEEMLQDKLKVPESENNKTSNSSQVSNEQDKIDAYKLLKKEMTLDLKTKFGSTADALVSDDETTRLVTSLEDDFDEELDTEYYAVGKEDEENQEDFDELPLLTFTDGEDMKTPAKSGVEKYPTDKEQNSNEEDKVQLTVPPGIKNDDKNILTTWGDTIFSIVTGGEETRDTMDLESSSSEEEKEDDDDALVPDSKQGKPQSATDYSDPDNVDDGLFIVDIPKTNNDKEVNAEHHIKGKGRGVQESKRGLVQDKTELEDENQEGMTVHSSVHSNNLNSMPAAEKGKDTLKSAYDDTENDLKGAAIHISKGMLHEEKPGEQILEGGSESESAQKAAGNQMNDRKIQQESLGSAPLMGDDHPNASRDSVEGDALVNGAKLHTLSVEHQREELKEELVLKTQNQPRFSSPDEIDLPRELEDEVPILGRNLPWQQERDVAATASKQMSEKIRLSEGEAKEDSLDEEFFHHKAMQGTEVGQTDQTDSTGGPAFLSKVEEDDYPSEELLEDENAINAKRSKEKNPGNQGRQFDVNLQVPDRAVLGTIHPDPEIEESKQETSMILDSEKTSETAAKGVNTGGREPNTMVEKERPLADKKAQRPFERSDFSDSIKIQTPELGEVFQNKDSDYLKNDNPEEHLKTSGLAGEPEGELSKEDHENTEKYMGTESQGSAAAEPEDDSFHWTPHTSVEPGHSDKREDLLIISSFFKEQQSLQRFQKYFNVHELEALLQEMSSKLKSAQQESLPYNMEKVLDKVFRASESQILSIAEKMLDTRVAENRDLGMNENNIFEEAAVLDDIQDLIYFVRYKHSTAEETATLVMAPPLEEGLGGAMEEMQPLHEDNFSREKTAELNVQVPEEPTHLDQRVIGDTHASEVSQKPNTEKDLDPGPVTTEDTPMDAIDANKQPETAAEEPASVTPLENAILLIYSFMFYLTKSLVATLPDDVQPGPDFYGLPWKPVFITAFLGIASFAIFLWRTVLVVKDRVYQVTEQQISEKLKTIMKENTELVQKLSNYEQKIKESKKHVQETRKQNMILSDEAIKYKDKIKTLEKNQEILDDTAKNLRVMLESEREQNVKNQDLISENKKSIEKLKDVISMNASEFSEVQIALNEAKLSEEKVKSECHRVQEENARLKKKKEQLQQEIEDWSKLHAELSEQIKSFEKSQKDLEVALTHKDDNINALTNCITQLNLLECESESEGQNKGGNDSDELANGEVGGDRNEKMKNQIKQMMDVSRTQTAISVVEEDLKLLQLKLRASVSTKCNLEDQVKKLEDDRNSLQAAKAGLEDECKTLRQKVEILNELYQQKEMALQKKLSQEEYERQEREHRLSAADEKAVSAAEEVKTYKRRIEEMEDELQKTERSFKNQIATHEKKAHENWLKARAAERAIAEEKREAANLRHKLLELTQKMAMLQEEPVIVKPMPGKPNTQNPPRRGPLSQNGSFGPSPVSGGECSPPLTVEPPVRPLSATLNRRDMPRSEFGSVDGPLPHPRWSAEASGKPSPSDPGSGTATMMNSSSRGSSPTRVLDEGKVNMAPKGPPPFPGVPLMSTPMGGPVPPPIRYGPPPQLCGPFGPRPLPPPFGPGMRPPLGLREFAPGVPPGRRDLPLHPRGFLPGHAPFRPLGSLGPREYFIPGTRLPPPTHGPQEYPPPPAVRDLLPSGSRDEPPPASQSTSQDCSQALKQSP

SEQ ID NO: 8711 - protein, 500 aa, Homo sapiens
MAAAPGLLVWLLVLRLPWRVPGQLDPSTGRRFSEHKLCADDECSMLMYRGEALEDFTGPDCRFVNFKKGDPVYVYYKLARGWPEVWAGSVGRTFGYFPKDLIQVVHEYTKEELQVPTDETDFVCFDGGRDDFHNYNVEELLGFLELYNSAATDSEKAVEKTLQDMEKNPELSKEREPEPEPVEANSEESDSVFSENTEDLQEQFTTQKHHSHANSQANHAQGEQASFESFEEMLQDKLKVPESENNKTSNSSQVSNEQDKIDAYKLLKKEMTLDLKTKFGSTADALVSDDETTRLVTSLEDDFDEELDTEYYAVGKEDEENQEDFDELPLLTFTDGEDMKTPAKSGVEKYPTDKEQNSNEEDKVQLTVPPGIKNDDKNILTTWGDTIFSIVTGGEETRDTMDLESSSSEEEKEDDDDALVPDSKQGKPQSATDYSDPDNVDDGLFIVDIPKTNNDKEVNAEHHIKGKGRGVQESKRGLVQDKTELEDENQEGFKTEPIKL

SEQ ID NO: 8712 - protein, 785 aa, Homo sapiens
MDSVPATVPSIAATPGDPELVGPLSVLYAAFIAKLLELVATLPDDVQPGPDFYGLPWKPVFITAFLGIASFAIFLWRTVLVVKDRVYQVTEQQISEKLKTIMKENTELVQKLSNYEQKIKESKKHVQETRKQNMILSDEAIKYKDKIKTLEKNQEILDDTAKNLRVMLESEREQNVKNQDLISENKKSIEKLKDVISMNASEFSEVQIALNEAKLSEEKVKSECHRVQEENARLKKKKEQLQQEIEDWSKLHAELSEQIKSFEKSQKDLEVALTHKDDNINALTNCITQLNLLECESESEGQNKGGNDSDELANGEVGGDRNEKMKNQIKQMMDVSRTQTAISVVEEDLKLLQLKLRASVSTKCNLEDQVKKLEDDRNSLQAAKAGLEDECKTLRQKVEILNELYQQKEMALQKKLSQEEYERQEREHRLSAADEKAVSAAEEVKTYKRRIEEMEDELQKTERSFKNQIATHEKKAHENWLKARAAERAIAEEKREAANLRHKLLELTQKMAMLQEEPVIVKPMPGKPNTQNPPRRGPLSQNGSFGPSPVSGGECSPPLTVEPPVRPLSATLNRRDMPRSEFGSVDGPLPHPRWSAEASGKPSPSDPGSGTATMMNSSSRGSSPTRVLDEGKVNMAPKGPPPFPGVPLMSTPMGGPVPPPIRYGPPPQLCGPFGPRPLPPPFGPGMRPPLGLREFAPGVPPGRRDLPLHPRGFLPGHAPFRPLGSLGPREYFIPGTRLPPPTHGPQEYPPPPAVRDLLPSGSRDEPPPASQSTSQDCSQALKQSP

SEQ ID NO: 8713 - protein, 1016 aa, Homo sapiens
  SITE 1: note = misc_feature - Xaa can be any naturally occurring amino acid
XLVPDSKQGKPQSATDYSDPDNVDDGLFIVDIPKTNNDKEVNAEHHIKGKGRGVQESKRGLVQDKTELEDENQEGMTVHSSVHSNNLNSMPAAEKGKDTLKSAYDDTENDLKGAAIHISKGMLHEEKPGEQILEGGSESESAQKAAGNQMNDRKIQQESLGSAPLMGDDHPNASRDSVEGDALVNGAKLHTLSVEHQREELKEELVLKTQNQPRFSSPDEIDLPRELEDEVPILGRNLPWQQERDVAATASKQMSEKIRLSEGEAKEDSLDEEFFHHKAMQGTEVGQTDQTDSTGGPAFLSKVEEDDYPSEELLEDENAINAKRSKEKNPGNQGRQFDVNLQVPDRAVLGTIHPDPEIEESKQETSMILDSEKTSETAAKGVNTGGREPNTMVEKERPLADKKAQRPFERSDFSDSIKIQTPELGEVFQNKDSDYLKNDNPEEHLKTSGLAGEPEGELSKEDHENTEKYMGTESQGSAAAEPEDDSFHWTPHTSVEPGHSDKREDLLIISSFFKEQQSLQRFQKYFNVHELEALLQEMSSKLKSAQQESLPYNMEKVLDKVFRASESQILSIAEKMLDTRVAENRDLGMNENNIFEEAAVLDDIQDLIYFVRYKHSTAEETATLVMAPPLEEGLGGAMEEMQPLHEDNFSREKTAELNVQVPEEPTHLDQRVIGDTHASEVSQKPNTEKDLDPGPVTTEDTPMDAIDANKQPETAAEEPASVTPLENAILLIYSFMFYLTKSLVATLPDDVQPGPDFYGLPWKPVFITAFLGIASFAIFLWRTVLVVKDRVYQVTEQQISEKLKTIMKENTELVQKLSNYEQKIKESKKHVQETRKQNMILSDEAIKYKDKIKTLEKNQEILDDTAKNLRVMLESEREQNVKNQDLLQQEIEDWSKLHAELSEQIKSFEKSQKDLEVALTHKDDNINALTNCITQLNLLECESESEGQNKGGNDSDELANGEVGGDRNEKMKNQIKQMMDVSRTQTAISVVEEDLKLLQLKLRASVSTKCNLEDQV

SEQ ID NO: 8714 - protein, 107 aa, Homo sapiens
  SITE 1: note = misc_feature - Xaa can be any naturally occurring amino acid
XSAEASGKPSPSDPGSGTATMMNSSSRGSSPTRVLDEGKVNMAPKGPPPFPGVPLMSTPMGGPVPPPIRYGPPPQLCGPFGPRPLPPPFDKDGRPGTVAHACNPSTL

SEQ ID NO: 8715 - protein, 388 aa, Homo sapiens
MFRLNSLSALAELAVGSRWYHGGSQPIQIRRRLMMVAFLGASAVTASTGLLWKRAHAESPPCVDNLKSDIGDKGKNKDEGDVCNHEKKTADLAPHPEEKKKKRSGFRDRKVMEYENRIRAYSTPDKIFRYFATLKVISEPGEAEVFMTPEDFVRSITPNEKQPEHLGLDQYIIKRFDGKARFSKKKILHRVRKKSKGSILQRRKKALQKEERTRHGSTKHNEQEVRRTIMEWLEKAGVQWHHLSSLQPPTPWFKRFFCLSLLSSWDYRHTPPCPANFFIFSRDRVSPCWPGWSRYPDLMIRPPWLRKVLGLQKISQEREKFADEGSIFYTLGECGLISFSDYIFLTTVLSTPQRNFEIAFKMFDLNGDGEVDMEEFEQVQSIIRSQTS

SEQ ID NO: 8716 - protein, 480 aa, Homo sapiens
MFRLNSLSALAELAVGSRWYHGGSQPIQIRRRLMMVAFLGASAVTASTGLLWKRAHAESPPCVDNLKSDIGDKGKNKDEGDVCNHEKKTADLAPHPEEKKKKRSGFRDRKVMEYENRIRAYSTPDKIFRYFATLKVISEPGEAEVFMTPEDFVRSITPNEKQPEHLGLDQYIIKRFDGKDFWQKISQEREKFADEGSIFYTLGECGLISFSDYIFLTTVLSTPQRNFEIAFKMFDLNGDGEVDMEEFEQVQSIIRSQTSMGMRHRDRPTTGNTLKSGLCSALTTYFFGADLKGKLTIKNFLEFQRKLQHDVLKLEFERHDPVDGRITERQFGGMLLAYSGVQSKKLTAMQRQLKKHFKEGKGLTFQEVENFFTFLKNINDVDTALSFYHMAGASLDKVTMQQVARTVAKVELSDHVCDVVFALFDCDGNGELSNKEFVSIMKQRLMRGLEKPKDMGFTRLMQAMWKCAQETAWDFALPKQ

SEQ ID NO: 8717 - protein, 482 aa, Homo sapiens
MFRLNSLSALAELAVGSRWYHGGSQPIQIRRRLMMVAFLGASAVTASTGLLWKRAHAESPPCVDNLKSDIGDKGKNKDEGDVCNHEKKTADLAPHPEEKKKKRSGFRDRKVMEYENRIRAYSTPDKIFRYFATLKVISEPGEAEVFMTPEDFVRSITPNEKQPEHLGLDQYIIKRFDGKDFWQTEKISQEREKFADEGSIFYTLGECGLISFSDYIFLTTVLSTPQRNFEIAFKMFDLNGDGEVDMEEFEQVQSIIRSQTSMGMRHRDRPTTGNTLKSGLCSALTTYFFGADLKGKLTIKNFLEFQRKLQHDVLKLEFERHDPVDGRITERQFGGMLLAYSGVQSKKLTAMQRQLKKHFKEGKGLTFQEVENFFTFLKNINDVDTALSFYHMAGASLDKVTMQQVARTVAKVELSDHVCDVVFALFDCDGNGELSNKEFVSIMKQRLMRGLEKPKDMGFTRLMQAMWKCAQETAWDFALPKQ

SEQ ID NO: 8718 - protein, 476 aa, Homo sapiens
MFRLNSLSALAELAVGSRWYHGGSQPIQIRRRLMMVAFLGASAVTASTGLLWKRAHAESPPCVDNLKSDIGDKGKNKDEGDVCNHEKKTADLAPHPEEKKKKRSGFRDRKVMEYENRIRAYSTPDKIFRYFATLKVISEPGEAEVFMTPEDFVRSITPNEKQPEHLGLDQYIIKRFDGKKISQEREKFADEGSIFYTLGECGLISFSDYIFLTTVLSTPQRNFEIAFKMFDLNGDGEVDMEEFEQVQSIIRSQTSMGMRHRDRPTTGNTLKSGLCSALTTYFFGADLKGKLTIKNFLEFQRKLQHDVLKLEFERHDPVDGRITERQFGGMLLAYSGVQSKKLTAMQRQLKKHFKEGKGLTFQEVENFFTFLKNINDVDTALSFYHMAGASLDKVTMQQVARTVAKVELSDHVCDVVFALFDCDGNGELSNKEFVSIMKQRLMRGLEKPKDMGFTRLMQAMWKCAQETAWDFALPKQ

SEQ ID NO: 8719 - protein, 478 aa, Homo sapiens [sequence omitted]

SEQ ID NO: 8720 - protein, 154 aa, Homo sapiens
MKRIYTYRRAKEIFKDTPKAPQRNFEIAFKMFDLNGDGEVDMEEFEQVQSIIRSQTSMGMRHRDRPTTGNTLKSGLCSALTTYFFGADLKGKLTIKNFLEFQRKLQHDVLKLEFERHDPVDGRITERQFGGMLLAYSGVQSKKLTAMQRQLKKH

SEQ ID NO: 8721 - protein, 278 aa, Homo sapiens
MKRIYTYRRAKEIFKDTPKAPQRNFEIAFKMFDLNGDGEVDMEEFEQVQSIIRSQTSMGMRHRDRPTTGNTLKSGLCSALTTYFFGADLKGKLTIKNFLEFQRKLQHDVLKLEFERHDPVDGRITERQFGGMLLAYSGVQSKKLTAMQRQLKKHFKEGKGLTFQEVENFFTFLKNINDVDTALSFYHMAGASLDKVTMQQVARTVAKVELSDHVCDVVFALFDCDGNGELSNKEFVSIMKQRLMRGLEKPKDMGFTRLMQAMWKCAQETAWDFALPKQ

SEQ ID NO: 8722 - protein, 212 aa, Homo sapiens
MVAFLGASAVTASTGLLWKRAHAESPPCVDNLKSDIGDKGKNKDEGDVCNHEKKTADLAPHPEEKKKKRSGFRDRKVMEYENRIRAYSTPDKIFRYFATLKVISEPGEAEVFMTPEDFVRSITPNEKQPEHLGLDQYIIKRFDGKKISQEREKFADEGSIFYTLGECGLISFSDYIFLTTVLSTPQRNFEIAFKMFDLNGDGEVDMEEFEQA

SEQ ID NO: 8723 - protein, 278 aa, Homo sapiens
MVSLKAKLNHLRQSMLKQKAPQRNFEIAFKMFDLNGDGEVDMEEFEQVQSIIRSQTSMGMRHRDRPTTGNTLKSGLCSALTTYFFGADLKGKLTIKNFLEFQRKLQHDVLKLEFERHDPVDGRITERQFGGMLLAYSGVQSKKLTAMQRQLKKHFKEGKGLTFQEVENFFTFLKNINDVDTALSFYHMAGASLDKVTMQQVARTVAKVELSDHVCDVVFALFDCDGNGELSNKEFVSIMKQRLMRGLEKPKDMGFTRLMQAMWKCAQETAWDFALPKQ

SEQ ID NO: 8724 - protein, 246 aa, Homo sapiens
  SITE 1: note = misc_feature - Xaa can be any naturally occurring amino acid
XNEKQPEHLGLDQYIIKRFDGKKISQEREKFADEGSIFYTLGECGLISFSDYIFLTTVLSTPQRNFEIAFKMFDLNGDGEVDMEEFEQVQSIIRSQTSMGMRHRDRPTTGNTLKSGLCSALTTYFFGADLKGKLTIKNFLEFQRKLQHDVLKLEFERHDPVDGRITERQFGGMLLAYSGVQSKKLTAMQRQLKKHFKEGKGLTFQEVENFFTFLKNINDVDTALSFYHMAGASLDKGKGTIFMGRR

SEQ ID NO: 8725 - protein, 512 aa, Homo sapiens
MAEPSVESSSPGGSATSDDHEFDPSADMLVHDFDDERTLEEEEMMEGETNFSSEIEDLAREGDMPIHELLSLYGYGSTVRLPEEDEEEEEEEEEGEDDEDADNDDNSGCSGENKEENIKDSSGQEDETQSSNDDPSQSVASQDAQEIIRPRRCKYFDTNSEVEEESEEDEDYIPSEDWKKEIMVGSMFQAEIPVGICRYKENEKVYENDDQLLWDPEYLPEDKVIIFLKDASRRTGDEKGVEAIPEGSHIKDNEQALYELVKCNFDTEEALRRLRFNVKAAREELSVWTEEECRNFEQGLKAYGKDFHLIQANKVRTRSVGECVAFYYMWKKSERYDFFAQQTRFGKKKYNLHPGVTDYMDRLLDESESAASSRAPSPPPTASNSSNSQSEKEDGTVSTANQNGVSSNGPGEILNKEEVKVEGLHINGPTGGNKKPLHADMDTNGYETDNLTTDPKLAHMTARNENDFDEKSERPAKRRRVNSNGKESPGSSEFFQEAVSHGKFEELENTDD

SEQ ID NO: 8726 - protein, 433 aa, Homo sapiens
MAEPSVESSSPGGSATSDDHEFDPSADMLVHDFDDERTLEEEEMMEGETNFSSEIEDLAREGDMPIHELLSLYGYGSTVRLPEEDEEEEEEEEEGEDDEDADNDDNSGCSGENKEENIKDSSGQEDETQSSNDDPSQSVASQDAQEIIRPRRCKYFDTNSEVEEESEEDEDYIPSEDWKKEIMVGSMFQAEIPVGICRYKENEKVYENDDQLLWDPEYLPEDKVIIFLKDASRRTGDEKGVEAIPEGSHIKDNEQALYELVKCNFDTEEALRRLRFNVKAAREELSVWTEEECRNFEQGLKAYGKDFHLIQANKVRTRSVGECVAFYYMWKKSERYDFFAQQTRFGKKKYNLHPGVTDYMDRLLDESESAASSRAPSPPPTASNSSNSQSEKEDGTVSTANQNGVSSNGPGILQMLLPVHFSAISSRANAFLK

SEQ ID NO: 8727 - protein, 486 aa, Homo sapiens
MDGASSGGGGSSEGGGGSSGSGYGVVARFSQCLAEFRTWLRTNWLRFNADKTDVMLPSVESSSPGGSATSDDHEFDPSADMLVHDFDDERTLEEEEMMEGETNFSSEIEDLAREGDMPIHELLSLYGYGSTVRLPEEDEEEEEEEEEGEDDEDADNDDNSGCSGENKEENIKDSSGQEDETQSSNDDPSQSVASQDAQEIIRPRRCKYFDTNSEVEEESEEDEDYIPSEDWKKEIMVGSMFQAEIPVGICRYKENEKVYENDDQLLWDPEYLPEDKVIIFLKDASRRTGDEKGVEAIPEGSHIKDNEQALYELVKCNFDTEEALRRLRFNVKAAREELSVWTEEECRNFEQGLKAYGKDFHLIQANKVRTRSVGECVAFYYMWKKSERYDFFAQQTRFGKKKYNLHPGVTDYMDRLLDESESAASSRAPSPPPTASNSSNSQSEKEDGTVSTANQNGVSSNGPGILQMLLPVHFSAISSRANAFLK

SEQ ID NO: 8728 - protein, 565 aa, Homo sapiens
MDGASSGGGGSSEGGGGSSGSGYGVVARFSQCLAEFRTWLRTNWLRFNADKTDVMLPSVESSSPGGSATSDDHEFDPSADMLVHDFDDERTLEEEEMMEGETNFSSEIEDLAREGDMPIHELLSLYGYGSTVRLPEEDEEEEEEEEEGEDDEDADNDDNSGCSGENKEENIKDSSGQEDETQSSNDDPSQSVASQDAQEIIRPRRCKYFDTNSEVEEESEEDEDYIPSEDWKKEIMVGSMFQAEIPVGICRYKENEKVYENDDQLLWDPEYLPEDKVIIFLKDASRRTGDEKGVEAIPEGSHIKDNEQALYELVKCNFDTEEALRRLRFNVKAAREELSVWTEEECRNFEQGLKAYGKDFHLIQANKVRTRSVGECVAFYYMWKKSERYDFFAQQTRFGKKKYNLHPGVTDYMDRLLDESESAASSRAPSPPPTASNSSNSQSEKEDGTVSTANQNGVSSNGPGEILNKEEVKVEGLHINGPTGGNKKPLHADMDTNGYETDNLTTDPKLAHMTARNENDFDEKSERPAKRRRVNSNGKESPGSSEFFQEAVSHGKFEELENTDD

SEQ ID NO: 8729 - protein, 450 aa, Homo sapiens
MFMFNWFTDCLWTLFLSNYQPSVESSSPGGSATSDDHEFDPSADMLVHDFDDERTLEEEEMMEGETNFSSEIEDLAREGDMPIHELLSLYGYGSTVRLPEEDEEEEEEEEEGEDDEDADNDDNSGCSGENKEENIKDSSGQEDETQSSNDDPSQSVASQDAQEIIRPRRCKYFDTNSEVEEESEEDEDYIPSEDWKKEIMVGSMFQAEIPVGICRYKENEKVYENDDQLLWDPEYLPEDKVIIFLKDASRRTGDEKGVEAIPEGSHIKDNEQALYELVKCNFDTEEALRRLRFNVKAAREELSVWTEEECRNFEQGLKAYGKDFHLIQANKVRTRSVGECVAFYYMWKKSERYDFFAQQTRFGKKKYNLHPGVTDYMDRLLDESESAASSRAPSPPPTASNSSNSQSEKEDGTVSTANQNGVSSNGPGILQMLLPVHFSAISSRANAFLK

SEQ ID NO: 8730 - protein, 470 aa, Homo sapiens
MFMFNWFTDCLWTLFLSNYQPSVESSSPGGSATSDDHEFDPSADMLVHDFDDERTLEEEEMMEGETNFSSEIEDLAREGDMPIHELLSLYGYGSTVRLPEEDEEEEEEEEEGEDDEDADNDDNSGCSGENKEENIKDSSGQEDETQSSNDDPSQSVASQDAQEIIRPRRCKYFDTNSEVEEESEEDEDYIPSEDWKKEIMVGSMFQAEIPVGICRYKENEKVYENDDQLLWDPEYLPEDKVIIFLKDASRRTGDEKGVEAIPEGSHIKDNEQALYELVKCNFDTEEALRRLRFNVKAAREELSVWTEEECRNFEQGLKAYGKDFHLIQANKVRTRSVGECVAFYYMWKKSERYDFFAQQTRFGKKKYNLHPGVTDYMDRLLDESESAASSRAPSPPPTASNSSNSQSEKEDGTVSTANQNGVSSNGPGEILNKEEVKVEGLHINGPTGILQMLLPVHFSAISSRANAFLK

SEQ ID NO: 8731 - protein, 529 aa, Homo sapiens
MFMFNWFTDCLWTLFLSNYQPSVESSSPGGSATSDDHEFDPSADMLVHDFDDERTLEEEEMMEGETNFSSEIEDLAREGDMPIHELLSLYGYGSTVRLPEEDEEEEEEEEEGEDDEDADNDDNSGCSGENKEENIKDSSGQEDETQSSNDDPSQSVASQDAQEIIRPRRCKYFDTNSEVEEESEEDEDYIPSEDWKKEIMVGSMFQAEIPVGICRYKENEKVYENDDQLLWDPEYLPEDKVIIFLKDASRRTGDEKGVEAIPEGSHIKDNEQALYELVKCNFDTEEALRRLRFNVKAAREELSVWTEEECRNFEQGLKAYGKDFHLIQANKVRTRSVGECVAFYYMWKKSERYDFFAQQTRFGKKKYNLHPGVTDYMDRLLDESESAASSRAPSPPPTASNSSNSQSEKEDGTVSTANQNGVSSNGPGEILNKEEVKVEGLHINGPTGGNKKPLHADMDTNGYETDNLTTDPKLAHMTARNENDFDEKSERPAKRRRVNSNGKESPGSSEFFQEAVSHGKFEELENTDD

SEQ ID NO: 8732 - protein, 81 aa, Homo sapiens
MFMFNWFTDCLWTLFLSNYQPSVESSSPGGSATSDDHEFDPSADMLVHDFDDERTLEEEEMMEGETNFSSEIEDLARVNNM

SEQ ID NO: 8733 - protein, 370 aa, Homo sapiens
MPIHELLSLYGYGSTVRLPEEDEEEEEEEEEGEDDEDADNDDNSGCSGENKEENIKDSSGQEDETQSSNDDPSQSVASQDAQEIIRPRRCKYFDTNSEVEEESEEDEDYIPSEDWKKEIMVGSMFQAEIPVGICRYKENEKVYENDDQLLWDPEYLPEDKVIIFLKDASRRTGDEKGVEAIPEGSHIKDNEQALYELVKCNFDTEEALRRLRFNVKAAREELSVWTEEECRNFEQGLKAYGKDFHLIQANKVRTRSVGECVAFYYMWKKSERYDFFAQQTRFGKKKYNLHPGVTDYMDRLLDESESAASSRAPSPPPTASNSSNSQSEKEDGTVSTANQNGVSSNGPGILQMLLPVHFSAISSRANAFLK

SEQ ID NO: 8734 - protein, 70 aa, Homo sapiens
MFQPLSSPDSHRKGTGFGLGIVFSLTFFKRRMWPLAFGSGMGLGMAYSNCQHDFQAPYLLHGKYVKEQEQ

SEQ ID NO: 8735 - protein, 71 aa, Homo sapiens
RKWDRCLADAVVKIGTGFGLGIVFSLTFFKRRMWPLAFGSGMGLGMAYSNCQHDFQAPYLLHGKYVKEQEQ

SEQ ID NO: 8736 - protein, 46 aa, Homo sapiens
  SITE 1: note = misc_feature - Xaa can be any naturally occurring amino acid
XKWDRCLADAVVKIEMGFHHVAQAGLELRVQTIHLPWPPNVPGLQA

SEQ ID NO: 8737 - protein, 286 aa, Homo sapiens
MCLFQLCGLVRYMEFGPPTVNDKLMRFFDHCEKFLTEVEKNATALYHVEAFKTGPEMQNILKKVAATLQVPVNDLNADLIQVAFFTCSFDLAIKGVKSPWCDVFDIDDAKVLEYLNDLKQYWKRGYGYTINSRSSCTLFQDIFQHLDKAVEQKQRSQPISSPVILQFGHAETLLPLLSLMGYFKDKEPLTAYNYKKQMHRKFRSGLIVPYASNLIFVLYHCENAKTPKEQFRVQMLLNEKVLPLAYSQETVSFYEDLKNHYKDILQSCQTSEECELARANSTSDEL

SEQ ID NO: 8738 - protein, 312 aa, Homo sapiens
MLRAPGCLLRTSVAPAAALAAALLSSLARCSLLEPRDPVASSLSPYFGTKTRYEDVNPVLLSGPEAPWRDPELLEGTCTPVQLVALIRHGTRYPTVKQIRKLRQLHGLLQARGSRDGGASSTGSRDLGAALADWPLWYADWMDGQLVEKGRQDMRQLALRLASLFPALFSRENYGRLRLITSSKHRCMDSSAAFLQGLWQHYHPGLPPPDVADMEFGPPTVNDKLMRFFDHCEKFLTEVEKNATALYHVEAFKTGPEMQNILKKVAATLQVPVNDLNAGLSQFLLQSSSSLVMQRLFFHCFLSWATSKTRNP

SEQ ID NO: 8739 - protein, 487 aa, Homo sapiens
MLRAPGCLLRTSVAPAAALAAALLSSLARCSLLEPRDPVASSLSPYFGTKTRYEDVNPVLLSGPEAPWRDPELLEGTCTPVQLVALIRHGTRYPTVKQIRKLRQLHGLLQARGSRDGGASSTGSRDLGAALADWPLWYADWMDGQLVEKGRQDMRQLALRLASLFPALFSRENYGRLRLITSSKHRCMDSSAAFLQGLWQHYHPGLPPPDVADMEFGPPTVNDKLMRFFDHCEKFLTEVEKNATALYHVEAFKTGPEMQNILKKVAATLQVPVNDLNADLIQVAFFTCSFDLAIKGVKSPWCDVFDIDDAKVLEYLNDLKQYWKRGYGYTINSRSSCTLFQDIFQHLDKAVEQKQRSQPISSPVILQFGHAETLLPLLSLMGYFKDKEPLTAYNYKKQMHRKFRSGLIVPYASNLIFVLYHCENAKTPKEQFRVQMLLNEKVLPLAYSQETVSFYEDLKNHYKDILQSCQTSEECELARANSTSDEL

SEQ ID NO: 8740 - protein, 146 aa, Homo sapiens
MKLPILRSNPEDQILYQTERYNEETFGYEVPIKEEGDYVLVLKFAEVYFAQSQQKVFDVRLNGHVVVKDLDIFDRVGHSTAHDEIIPMSIRKGKLSVQGEVSTFTGKLYIEFVKGYYDNPKVCALYIMAGTVDDVPKLQPHPGLEK

SEQ ID NO: 8741 - protein, 217 aa, Homo sapiens
MLGAWAVEGTAVALLRLLLLLLPPAIRGPGLGVAGVAGAAGAGLPESVIWAVNAGGEAHVDVHGIHFRKDPLEGRVGRASDYGMKLPILRSNPEDQILYQTERYNEETFGYEVPIKEEGDYVLVLKFAEVYFAQSQQKMYQSFSLIRDWRRKKRKKKKKNMMKGLISKNRPIRTGCSQAPAHPTPMPRTTAASCFPSWWPSESSFQPSSASAGCENK

SEQ ID NO: 8742 - protein, 292 aa, Homo sapiens
MLGAWAVEGTAVALLRLLLLLLPPAIRGPGLGVAGVAGAAGAGLPESVIWAVNAGGEAHVDVHGIHFRKDPLEGRVGRASDYGMKLPILRSNPEDQILYQTERYNEETFGYEVPIKEEGDYVLVLKFAEVYFAQSQQKVFDVRLNGHVVVKDLDIFDRVGHSTAHDEIIPMSIRKGKLSVQGEVSTFTGKLYIEFVKGYYDNPKVCALYIMAGTVDDVPKLQPHPGLEKKEEEEEEEEYDEGSNLKKQTNKNRVQSGPRTPNPYASDNSSLMFPILVAFGVFIPTLFCLCRL

SEQ ID NO: 8743 - protein, 173 aa, Homo sapiens
  SITE 1: note = misc_feature - Xaa can be any naturally occurring amino acid
XNEETFGYEVPIKEEGDYVLVLKFAEVYFAQSQQKVFDVRLNGHVVVKDLDIFDRVGHSTAHDEIIPMSIRKGKLSVQGEVSTFTGKLYIEFVKMYQSFSLIRDWRRKKRKKKKKNMMKGLISKNRPIRTGCSQAPAHPTPMPRTTAASCFPSWWPSESSFQPSSASAGCENK

SEQ ID NO: 8744 - protein, 115 aa, Homo sapiens
MVSRKAVAALLVVHVAAMLASQTEAFVPIFTYGELQRMQEKERNKGQKKSLSVWQRSGEEGPVDPAEPIREEENEMIKLTAPLEIGMRMNSRQLEKYPATLEGLLSEMLPQHAAK

SEQ ID NO: 8745 - protein, 114 aa, Homo sapiens
MVSRKAVAALLVVHVAAMLASQTEAFVPIFTYGELQRMQEKERNKGQKKSLSVWQRSGEEGPVDPAEPIREEENEMIKLTAPLEIGMRMNSRQLEKYPATLEGLLSEMLPQHAK

SEQ ID NO: 8746 - protein, 108 aa, Homo sapiens
MVSRKAVAALLVVHVAAMLASQTEAFVPIFTYGELQRMQEKERNKGQKKSLSVWQRSGEEGPVDPAEPIREEENEMIKLTAPLEIGMRMNSRQLEKYPATLEGLLTAK

SEQ ID NO: 8747 - protein, 919 aa, Homo sapiens
MAADVFMCSPRRPRSRGRQVLLKPQVSEDDDDSDTDEPSPPPASGAATPARAHASAAPPPPRAGPGREEPPRRQQIIHSGHFMVSSPHREHPPKKGYDFDTVNKQTCQTYSFGKTSSCHLSIDASLTKLFECMTLAYSGKLVSPKWKNFKGLKLQWRDKIRLNNAIWRAWYMQYLEKRKNPVCHFVTPLDGSVDVDEHRRPEAITTEGKYWKSRIEIVIREYHKWRTYFKKRLQQHKDEDLSSLVQDDDMLYWHKHGDGWKTPVPMEEDPLLDTDMLMSEFSDTLFSTLSSHQPVAWPNPREIAHLGNADMIQPGLIPLQPNLDFMDTFEPFQDLFSSSRSIFGSMLPASASAPVPDPNNPPAQESILPTTALPTVSLPDSLIAPPTAPSLAHMDEQGCEHTSRTEDPFIQPTDFGPSEPPLSVPQPFLPVFTMPLLSPSPAPPPISPVLPLVPPPATALNPPAPPTFHQPQKFAGVNKAPSVITHTASATLTHDAPATTFSQSQGLVITTHHPAPSAAPCGLALSPVTRPPQPRLTFVHPKPVSLTGGRPKQPHKIVPAPKPEPVSLVLKNARIAPAAFSGQPQAVIMTSGPLKREGMLASTVSQSNVVIAPAAIARAPGVPEFHSSILVTDLGHGTSSPPAPVSRLFPSTAQDPLGKGEQVPLHGGSPQVTVTGPSRDCPNSGQASPCASEQSPSPQSPQNNCSGKSDPKNVAALKNRQMKHISAEQKRRFNIKMCFDMLNSLISNNSKLTSHAITLQKTVEYITKLQQERGQMQEEARRLREEIEELNATIISCQQLLPATGVPVTRRQFDHMKDMFDEYVKTRTLQNWKFWIFSIIIKPLFESFKGMVSTSSLEELHRTALSWLDQHCSLPILRPMVLSTLRQLSTSTSILTDPAQLPEQASKAVTRIGKRLGES

SEQ ID NO: 8748 - protein, 217 aa, Homo sapiens
MDEQGCEHTSRTEDPFIQPTDFGPSEPPLSVPPPISPVLPLVPPPATALNPPAPPTFHQPQKFAGVNKAPSVITHTASATLTHDAPATTFSQSQGLVITTHHPAPSAAPCGLALSPVTRPPQPRLTFVHPKPVSLTGGRPKQPHKIVPAPKPEPVSLVLKNARIAPGEPGGETQCGAPPDPEGCFPIPKAFKLVTTTTTLVCTCMRTHIHLNETKVS

SEQ ID NO: 8749 - protein, 526 aa, Homo sapiens
MDEQGCEHTSRTEDPFIQPTDFGPSEPPLSVPQPFLPVFTMPLLSPSPAPPPISPVLPLVPPPATALNPPAPPTFHQPQKFAGVNKAPSVITHTASATLTHDAPATTFSQSQGLVITTHHPAPSAAPCGLALSPVTRPPQPRLTFVHPKPVSLTGGRPKQPHKIVPAPKPEPVSLVLKNARIAPAAFSGQPQAVIMTSGPLKREGMLASTVSQSNVVIAPAAIARAPGVPEFHSSILVTDLGHGTSSPPAPVSRLFPSTAQDPLGKGEQVPLHGGSPQVTVTGPSRDCPNSGQASPCASEQSPSPQSPQNNCSGKSDPKNVAALKNRQMKHISAEQKRRFNIKMCFDMLNSLISNNSKLTSHAITLQKTVEYITKLQQERGQMQEEARRLREEIEELNATIISCQQLLPATGVPVTRRQFDHMKDMFDEYVKTRTLQNWKFWIFSIIIKPLFESFKGMVSTSSLEELHRTALSWLDQHCSLPILRPMVLSTLRQLSTSTSILTDPAQLPEQASKAVTRIGKRLGES

SEQ ID NO: 8750 - protein, 74 aa, Homo sapiens
MLYWHKHGDGWKTPVPMEEDPLLDTDMLMSEFSDTLFSTLSSHQPVAWPNPREIAHLGNADMIQPGLIPLQPNL

SEQ ID NO: 8751 - protein, 308 aa, Homo sapiens
MVLGALVALSSCPLGLRTSCLTGREAASAGWARPCGPGLHLNILLILAAAFSGQPQAVIMTSGPLKREGMLASTVSQSNVVIAPAAIARAPGVPEFHSSILVTDLGHGTSSPPAPVSRLFPSTAQDPLGKGEQVPLHGGSPQVTVTGPSRDCPNSGQASPCASEQSPSPQSPQNNCSGKSDPKNVAALKNRQMKHISAEQKRRFNIKMCFDMLNSLISNNSKLTSHAITLQKTVEYITKLQQERGQMQEEARRLREEIEELNATIISCQQLLPATGVPVTRRQFDHMKDMFDEYVKTRTLQNWKFWIV

SEQ ID NO: 8752 - protein, 171 aa, Homo sapiens
  SITE 1: note = misc_feature - Xaa can be any naturally occurring amino acid
XHGGSPQVTVTGPSRDCPNSGQASPCASEQSPSPQSPQNNCSGKSDPKNVAALKNRQMKHISAEQKRRFNIKMCFDMLNSLISNNSKLTSHAITLQKTVEYITKLQQERGQMQEEARRLREEIEELNATIIDPFSVGRYFPAPGERSTPVQPPSGLQSPAPLRACLFFNHT

SEQ ID NO: 8753 - protein, 213 aa, Homo sapiens
MAGALAGLAAGLQVPRVAPSPDSDSDTDSEDPSLRRSAGGLLRSQVIHSGHFMVSSPHSDSLPRRRDQEGSVGPSDFGPRSIDPTLTRLFECLSLAYSGKLVSPKWKNFKGLKLLCRDKIRLNNAIWRAWYIQYFFTNSRLPQPPMPSNFPEPPSFSPVVDSLFSSGTLGPEVPPASSAMTHLSGHSRLQARNSCPGPLDSSAFLSSDFLLPE

SEQ ID NO: 8754 - protein, 721 aa, Homo sapiens
MAGALAGLAAGLQVPRVAPSPDSDSDTDSEDPSLRRSAGGLLRSQVIHSGHFMVSSPHSDSLPRRRDQEGSVGPSDFGPRSIDPTLTRLFECLSLAYSGKLVSPKWKNFKGLKLLCRDKIRLNNAIWRAWYIQYVKRRKSPVCGFVTPLQGPEADAHRKPEAVVLEGNYWKRRIELPPEDAYVGNADMIQPDLTPLQPSLDDFMDISDFFTNSRLPQPPMPSNFPEPPSFSPVVDSLFSSGTLGPEVPPASSAMTHLSGHSRLQARNSCPGPLDSSAFLSSDFLLPEDPKPRLPPPPVPPPLLHYPPPAKVPGLEPCPPPPFPPMAPPTALLQEEPLFSPRFPFPTVPPAPGVSPLPAPAAFPPTPQSVPSPAPTPFPIELLPLGYSEPAFGPCFSMPRGKPPAPSPRGQKASPPTLAPATASPPTTAGSNNPCLTQLLTAAKPEQALEPPLVSSTLLRSPGSPETVPEFPCTFLPPTPAPTPPRPPPGPATLAPSRPLLVPKAERLSPPAPSGSERRLSGDLSSMPGPGTLSVRVSPPQPILSRGRPDSNKTENRRITHISAEQKRRFNIKLGFDTLHGLVSTLSAQPSLKVSKATTLQKTAEYILMLQQERAGLQEEAQQLRDEIEELNAAINLCQQQLPATGVPITHQRFDQMRDMFDDYVRTRTLHNWKFWVFSILIRPLFESFNGMVSTASVHTLRQTSLAWLDQYCSLPALRPST

SEQ ID NO: 8755 - protein, 852 aa, Homo sapiens
MAGALAGLAAGLQVPRVAPSPDSDSDTDSEDPSLRRSAGGLLRSQVIHSGHFMVSSPHSDSLPRRRDQEGSVGPSDFGPRSIDPTLTRLFECLSLAYSGKLVSPKWKNFKGLKLLCRDKIRLNNAIWRAWYIQYVKRRKSPVCGFVTPLQGPEADAHRKPEAVVLEGNYWKRRIEVVMREYHKWRIYYKKRLRKPSREDDLLAPKQAEGRWPPPEQWCKQLFSSVVPVLLGDPEEEPGGRQLLDLNCFLSDISDTLFTMTQSGPSPLQLPPEDAYVGNADMIQPDLTPLQPSLDDFMDISDFFTNSRLPQPPMPSNFPEPPSFSPVVDSLFSSGTLGPEVPPASSAMTHLSGHSRLQARNSCPGPLDSSAFLSSDFLLPEDPKPRLPPPPVPPPLLHYPPPAKVPGLEPCPPPPFPPMAPPTALLQEEPLFSPRFPFPTVPPAPGVSPLPAPAAFPPTPQSVPSPAPTPFPIELLPLGYSEPAFGPCFSMPRGKPPAPSPRGQKASPPTLAPATASPPTTAGSNNPCLTQLLTAAKPEQALEPPLVSSTLLRSPGSPQETVPEFPCTFLPPTPAPTPPRPPPGPATLAPSRPLLVPKAERLSPPAPSGSERRLSGDLSSMPGPGTLSVRVSPPQPILSRGRPDSNKTENRRITHISAEQKRRFNIKLGFDTLHGLVSTLSAQPSLKVSKATTLQKTAEYILMLQQERAGLQEEAQQLRDEIEELNAAINLCQQQLPATGVPITHQRFDQMRDMFDDYVRTRTLHNWKFWVFSILIRPLFESFNGMVSTASVHTLRQTSLAWLDQYCSLPALRPTVLNSLRQLGTSTSILTDPGRIPEQATRAVTEGTLGKPL

SEQ ID NO: 8756 - protein, 575 aa, Homo sapiens
MAGALAGLAAGLQVPRVAPSPDSDSDTDSEDPSLRRSAGGLLRSQVIHSGHFMVSSPHSDSLPRRRDQEGSVGPSDFGPRSIDPTLTRLFECLSLAYSGKLVSPKWKNFKGLKLLCRDKIRLNNAIWRAWYIQYVKRRKSPVCGFVTPLQGPEADAHRKPEAVVLEGNYWKRRIEVVMREYHKWRIYYKKRLRKPSREDDLLAPKQAEGRWPPPEQWCKQLFSSVVPVLLGDPEEEPGGRQLLDLNCFLSDISDTLFTMTQSGPSPLQLPPEDAYVGNADMIQPDLTPLQPSLDDFMDISDFFTNSRLPQPPMPSNFPEPPSFSPVVDSLFSSGTLGPEVPPASSAMTHLSGHSRLQARNSCPGPLDSSAFLSSDFLLPEDPKPRLPPPPVPPPLLHYPPPAKVPGLEPCPPPPFPPMAPPTALLQEEPLFSPRFPFPTVPPAPGVSPLPAPAAFPPTPQSVPSPAPTPFPIELLPLGYSEPAFGPCFSMPRGKPPAPSPRGQKASPPTLAPATASPPTTAGSNNPCLTQLLTAAKPEQALEPPLVSSTLLRSPGSPAVNGGCQGTSAPCQALGL

SEQ ID NO: 8757 - protein, 831 aa, Homo sapiens
MAGALAGLAAGLQVPRVAPSPDSDSDTDSEDPSLRRSAGGLLRSQVIHSGHFMVSSPHSDSLPRRRDQEGSVGPSDFGPRSIDPTLTRLFECLSLAYSGKLVSPKWKNFKGLKLLCRDKIRLNNAIWRAWYIQYVKRRKSPVCGFVTPLQGPEADAHRKPEAVVLEGNYWKRRIEVVMREYHKWRIYYKKRLRKPSREDDLLAPKQAEGRWPPPEQWCKQLFSSVVPVLLGDPEEEPGGRQLLDLNCFLSDISDTLFTMTQSGPSPLQLPPEDAYVGNADMIQPDLTPLQPSLDDFMDISDFFTNSRLPQPPMPSNFPEPPSFSPVVDSLFSSGTLGPEVPPASSAMTHLSGHSRLQARNSCPGPLDSSAFLSSDFLLPEDPKPRLPPPPVPPPLLHYPPPAKVPGLEPCPPPPFPPMAPPTALLQEEPLFSPRFPFPTVPPAPGVSPLPAPAAFPPTPQSVPSPAPTPFPIELLPLGYSEPAFGPCFSMPRGKPPAPSPRGQKASPPTLAPATASPPTTAGSNNPCLTQLLTAAKPEQALEPPLVSSTLLRSPGSPQETVPEFPCTFLPPTPAPTPPRPPPGPATLAPSRPLLVPKAERLSPPAPSGSERRLSGDLSSMPGPGTLSVRVSPPQPILSRGRPDSNKNRRITHISAEQKRRFNIKLGFDTLHGLVSTLSAQPSLKERAGLQEEAQQLRDEIEELNAAINLCQQQLPATGVPITHQRFDQMRDMFDDYVRTRTLHNWKFWVFSILIRPLFESFNGMVSTASVHTLRQTSLAWLDQYCSLPALRPTVLNSLRQLGTSTSILTDPGRIPEQATRAVTEGTLGKPL

SEQ ID NO: 8758 - protein, 833 aa, Homo sapiens
MAGALAGLAAGLQVPRVAPSPDSDSDTDSEDPSLRRSAGGLLRSQVIHSGHFMVSSPHSDSLPRRRDQEGSVGPSDFGPRSIDPTLTRLFECLSLAYSGKLVSPKWKNFKGLKLLCRDKIRLNNAIWRAWYIQYVKRRKSPVCGFVTPLQGPEADAHRKPEAVVLEGNYWKRRIEVVMREYHKWRIYYKKRLRKPSREDDLLAPKQAEGRWPPPEQWCKQLFSSVVPVLLGDPEEEPGGRQLLDLNCFLSDISDTLFTMTQSGPSPLQLPPEDAYVGNADMIQPDLTPLQPSLDDFMDISDFFTNSRLPQPPMPSNFPEPPSFSPVVDSLFSSGTLGPEVPPASSAMTHLSGHSRLQARNSCPGPLDSSAFLSSDFLLPEDPKPRLPPPPVPPPLLHYPPPAKVPGLEPCPPPPFPPMAPPTALLQEEPLFSPRFPFPTVPPAPGVSPLPAPAAFPPTPQSVPSPAPTPFPIELLPLGYSEPAFGPCFSMPRGKPPAPSPRGQKASPPTLAPATASPPTTAGSNNPCLTQLLTAAKPEQALEPPLVSSTLLRSPGSPQETVPEFPCTFLPPTPAPTPPRPPPGPATLAPSRPLLVPKAERLSPPAPSGSERRLSGDLSSMPGPGTLSVRVSPPQPILSRGRPDSNKTENRRITHISAEQKRRFNIKLGFDTLHGLVSTLSAQPSLKERAGLQEEAQQLRDEIEELNAAINLCQQQLPATGVPITHQRFDQMRDMFDDYVRTRTLHNWKFWVFSILIRPLFESFNGMVSTASVHTLRQTSLAWLDQYCSLPALRPTVLNSLRQLGTSTSILTDPGRIPEQATRAVTEGTLGKPL

SEQ ID NO: 8759 - protein, 850 aa, Homo sapiens
MAGALAGLAAGLQVPRVAPSPDSDSDTDSEDPSLRRSAGGLLRSQVIHSGHFMVSSPHSDSLPRRRDQEGSVGPSDFGPRSIDPTLTRLFECLSLAYSGKLVSPKWKNFKGLKLLCRDKIRLNNAIWRAWYIQYVKRRKSPVCGFVTPLQGPEADAHRKPEAVVLEGNYWKRRIEVVMREYHKWRIYYKKRLRKPSREDDLLAPKQAEGRWPPPEQWCKQLFSSVVPVLLGDPEEEPGGRQLLDLNCFLSDISDTLFTMTQSGPSPLQLPPEDAYVGNADMIQPDLTPLQPSLDDFMDISDFFTNSRLPQPPMPSNFPEPPSFSPVVDSLFSSGTLGPEVPPASSAMTHLSGHSRLQARNSCPGPLDSSAFLSSDFLLPEDPKPRLPPPPVPPPLLHYPPPAKVPGLEPCPPPPFPPMAPPTALLQEEPLFSPRFPFPTVPPAPGVSPLPAPAAFPPTPQSVPSPAPTPFPIELLPLGYSEPAFGPCFSMPRGKPPAPSPRGQKASPPTLAPATASPPTTAGSNNPCLTQLLTAAKPEQALEPPLVSSTLLRSPGSPQETVPEFPCTFLPPTPAPTPPRPPPGPATLAPSRPLLVPKAERLSPPAPSGSERRLSGDLSSMPGPGTLSVRVSPPQPILSRGRPDSNKNRRITHISAEQKRRFNIKLGFDTLHGLVSTLSAQPSLKVSKATTLQKTAEYILMLQQERAGLQEEAQQLRDEIEELNAAINLCQQQLPATGVPITHQRFDQMRDMFDDYVRTRTLHNWKFWVFSILIRPLFESFNGMVSTASVHTLRQTSLAWLDQYCSLPALRPTVLNSLRQLGTSTSILTDPGRIPEQATRAVTEGTLGKPL

SEQ ID NO: 8760 - protein, 235 aa, Homo sapiens
PKWKNFKGLKLLCRDKIRLNNAIWRAWYIQYVKRRKSPVCGFVTPLQGPEADAHRKPEAVVLEGNYWKRRIEVVMREYHKWRIYYKKRVSGGGPGRPQSFPPAAAGYRPPRKIPGKGILTPELAPLGPSIQSRADSATVWPQRLLAASLPRGRLRKPSREDDLLAPKQAEGRWPPPEQWCKQLFSSVVPVLLGDPEEEPGGRQLLDLNCFLSDISDTLFTMTQSGPSPLQLPPED

SEQ ID NO: 8761 - protein, 469 aa, Homo sapiens
MHSFPPLLLLLFWGVVSHSFPATLETQEQDVDLVQKYLEKYYNLKNDGRQVEKRRNSGPVVEKLKQMQEFFGLKVTGKPDAETLKVMKQPRCGVPDVAQFVLTEGNPRWEQTHLTYRIENYTPDLPRADVDHAIEKAFQLWSNVTPLTFTKVSEGQADIMISFVRGDHRDNSPFDGPGGNLAHAFQPGPGIGGDAHFDEDERWTNNFREYNLHRVAAHELGHSLGLSHSTDIGALMYPSYTFSGDVQLAQDDIDGIQAIYGRSQNPVQPIGPQTPKACDSKLTFDAITTIRGEVMFFKDRFYMRTNPFYPEVELNFISVFWPQLPNGLEAAYEFADRDEVRFFKGNKYWAVQGQNVLHGYPKDIYSSFGFPRTVKHIDAALSEENTGKTYFFVANKYWRYDEYKRSMDPGYPKMIAHDFPGIGHKVDAVFMKDGFFYFFHGTRQYKFDPKTKRILTLQKANSWFNCRKN

SEQ ID NO: 8762 - protein, 476 aa, Homo sapiens
MMHLAFLVLLCLPVCSAYPLSGAAKEEDSNKDLAQQYLEKYYNLEKDVKQFRRKDSNLIVKKIQGMQKFLGLEVTGKLDTDTLEVMRKPRCGVPDVGHFSSFPGMPKWRKTHLTYRIVNYTPDLPRDAVDSAIEKALKVWEEVTPLTFSRLYEGEADIMISFAVKEHGDFYSFDGPGHSLAHAYPPGPGLYGDIHFDDDEKWTEDASGTNLFLVAAHELGHSLGLFHSANTEALMYPLYNSFTELAQFRLSQDDVNGIQSLYGPPPASTEEPLVPTKSVPSGSEMPAKCDPALSFDAISTLRGEYLFFKDRYFWRRSHWNPEPEFHLISAFWPSLPSYLDAAYEVNSRDTVFIFKGNEFWAIRGNEVQAGYPRGIHTLGFPPTIRKIDAAVSDKEKKKTYFFAADKYWRFDENSQSMEQGFPRLIADDFPGVEPKVDAVLQAFGFFYFFSGSSQFEFDPNARMVTHILKSNSWLHC

SEQ ID NO: 8763 - protein, 181 aa, Homo sapiens
MMHLAFLVLLCLPVCSAYPLSGAAKEEDSNKDLAQQYLEKYYNLEKDVKQFRRKDSNLIVKKIQGMQKFLGLEVTGKLDTDTLEVMRKPRCGVPDVGHFSSFPGMPKWRKTHLTYRIVNYTPDLPRDAVDSAIEKALKVWEEVTPLTFSRLYEGEADIMISFAVKGHSLAHAYPPGPGLYG

SEQ ID NO: 8764 - protein, 113 aa, Homo sapiens
MAPAAWLRSAAARALLPPMLLLLLQPPPLLARALPPDAHHLHAERRGPQPWHAALPSSPAPAPATQEAPRPASSLRPPRCGVPDPSDGLSARNRQKRFVLSGGRWEKTDLTYR

SEQ ID NO: 8765 - protein, 488 aa, Homo sapiens
MAPAAWLRSAAARALLPPMLLLLLQPPPLLARALPPDAHHLHAERRGPQPWHAALPSSPAPAPATQEAPRPASSLRPPRCGVPDPSDGLSARNRQKRFVLSGGRWEKTDLTYRILRFPWQLVQEQVRQTMAEALKVWSDVTPLTFTEVHEGRADIMIDFARYWHGDDLPFDGPGGILAHAFFPKTHREGDVHFDYDETWTIGDDQGTDLLQVAAHEFGHVLGLQHTTAAKALMSAFYTFRYPLSLSPDDCRGVQHLYGQPWPTVTSRTPALGPQAGIDTNEIAPLEPDAPPDACEASFDAVSTIRGELFFFKAGFVWRLRGGQLQPGYPALASRHWQGLPSPVDAAFEDAQGHIWFFQGAQYWVYDGEKPVLGPAPLTELGLVRFPVHAALVWGPEKNKIYFFRGRDYWRFHPSTRRVDSPVPRRATDWRGVPSEIDAAFQDADGYAYFLRGRLYWKFDPVKVKALEGFPRLVGPDFFGCAEPANTFL

SEQ ID NO: 8766 - protein, 354 aa, Homo sapiens
MAPAAWLRSAAARALLPPMLLLLLQPPPLLARALPPDAHHLHAERRGPQPWHAALPSSPAPAPATQEAPRPASSLRPPRCGVPDPSDGLSARNRQKRILRFPWQLVQEQVRQTMAEALKVWSDVTPLTFTEVHEGRADIMIDFARYWHGDDLPFDGPGGILAHAFFPKTHREGDVHFDYDETWTIGDDQGTDLLQVAAHEFGHVLGLQHTTAAKALMSAFYTFRYPLSLSPDDCRGVQHLYGQPWPTVTSRTPALGPQAGIDTNEIAPLEPDAPPDACEASFDAVSTIRGELFFFKAGFVWRLRGGQLQPGYPALASRHWQGLPSPVDAAFEDAQGHIWFFQGTTGVSTPAPGV

SEQ ID NO: 8767 - protein, 170 aa, Homo sapiens
  SITE 1: note = misc_feature - Xaa can be any naturally occurring amino acid
XAHEFGHVLGLQHTTAAKALMSAFYTFRYPLSLSPDDCRGVQHLYGQPWPTVTSRTPALGPQAGIDTNEIAPLEPDAPPDACEASFDAVSTIRGELFFFKAGFVWRLRGGQLQPGYPALASRHWQGLPSPVDAAFEDAQGHIWFFQELGFPSSTGRDESLEHCRCQGLHK

SEQ ID NO: 8768 - protein, 470 aa, Homo sapiens
MKFLLILLLQATASGALPLNSSTSLEKNNVLFGERYLEKFYGLEINKLPVTKMKYSGNLMKEKIQEMQHFLGLKVTGQLDTSTLEMMHAPRCGVPDVHHFREMPGGPVWRKHYITYRINNYTPDMNREDVDYAIRKAFQVWSNVTPLKFSKINTGMADILVVFARGAHGDFHAFDGKGGILAHAFGPGSGIGGDAHFDEDEFWTTHSGGTNLFLTAVHEIGHSLGLGHSSDPKAVMFPTYKYVDINTFRLSADDIRGIQSLYGDPKENQRLPNPDNSEPALCDPNLSFDAVTTVGNKIFFFKDRFFWLKVSERPKTSVNLISSLWPTLPSGIEAAYEIEARNQVFLFKDDKYWLISNLRPEPNYPKSIHSFGFPNFVKKIDAAVFNPRFYRTYFFVDNQYWRYDERRQMMDPGYPKLITKNFQGIGPKIDAVFYSKNKYYYFFQGSNQFEYDFLLQRITKTLKSNSWFGC

SEQ ID NO: 8769 - protein, 471 aa, Homo sapiens
MHPGVLAAFLFLSWTHCRALPLPSGGDEDDLSEEDLQFAERYLRSYYHPTNLAGILKENAASSMTERLREMQSFFGLEVTGKLDDNTLDVMKKPRCGVPDVGEYNVFPRTLKWSKMNLTYRIVNYTPDMTHSEVEKAFKKAFKVWSDVTPLNFTRLHDGIADIMISFGIKEHGDFYPFDGPSGLLAHAFPPGPNYGGDAHFDDDETWTSSSKGYNLFLVAAHEFGHSLGLDHSKDPGALMFPIYTYTGKSHFMLPDDDVQGIQSLYGPGDEDPNPKHPKTPDKCDPSLSLDAITSLRGETMIFKDRFFWRLHPQQVDAELFLTKSFWPELPNRIDAAYEHPSHDLIFIFRGRKFWALNGYDILEGYPKKISELGLPKEVKKISAAVHFEDTGKTLLFSGNQVWRYDDTNHIMDKDYPRLIEEDFPGIGDKVDAVYEKNGYIYFFNGPIQFEYSIWSNRIVRVMPANSILWC

SEQ ID NO: 8770 - protein, 489 aa, Homo sapiens
MHPGVLAAFLFLSWTHCRALPLPSGGDEDDLSEEDLQFAERYLRSYYHPTNLAGILKENAASSMTERLREMQSFFGLEVTGKLDDNTLDVMKKPRCGVPDVGEYNVFPRTLKWSKMNLTYRIVNYTPDMTHSEVEKAFKKAFKVWSDVTPLNFTRLHDGIADIMISFGIKEHGDFYPFDGPSGLLAHAFPPGPNYGGDAHFDDDETWTSSSKGYNLFLVAAHEFGHSLGLDHSKDPGALMFPIYTYTGKSHFMLPDDDVQGIQSLYGPGDEDPNPKHPKTPDKCDPSLSLDAITSLRGETMIFKDRFFWRLHPQQVDAELFLTKSFWPELPNRIDAAYEHPSHDLIFIFRGRKFWALNGYDILEGYPKKISELGLPKEVKKISAAVHFEDTGKTLLFSGNQVWRYDDTNHIMDKDYPRLIEEDFPGIGDKVDAVYEKNESHSVTQAGVHCRNLSSLQPPPPGFKRFSCLSLWSSWDYRLYLFFQRTHTV

SEQ ID NO: 8771 - protein, 383 aa, Homo sapiens [sequence omitted]

SEQ ID NO: 8772 - protein, 194 aa, Homo sapiens
MRESLLFLRLPSSPALSRRRALRWALRPPRVAQAFSGRVCGQAWLQQYGYLPPGDLRTHTQRSPQSLSAAIAAMQKFYGLQVTGKADADTMKAMRRPRCGVPDKFGAEIKANVRRKRYAIQGLKWQHNEITFCIQNYTPKVGEYATYEAIRKAFRVWESATPLRFREVPYAYIREGHEKQADIMIFFAEGFHGD

SEQ ID NO: 8773 - protein, 582 aa, Homo sapiens
MSPAPRPPRCLLLPLLTLGTALASLGSAQSSSFSPEAWLQQYGYLPPGDLRTHTQRSPQSLSAAIAAMQKFYGLQVTGKADADTMKAMRRPRCGVPDKFGAEIKANVRRKRYAIQGLKWQHNEITFCIQNYTPKVGEYATYEAIRKAFRVWESATPLRFREVPYAYIREGHEKQADIMIFFAEGFHGDSTPFDGEGGFLAHAYFPGPNIGGDTHFDSAEPWTVRNEDLNGNDIFLVAVHELGHALGLEHSSDPSAIMAPFYQWMDTENFVLPDDDRRGIQQLYGGESGFPTKMPPQPRTTSRPSVPDKPKNPTYGPNICDGNFDTVAMLRGEMFVFKERWFWRVRNNQVMDGYPMPIGQFWRGLPASINTAYERKDGKFVFFKGDKHWVFDEASLEPGYPKHIKELGRGLPTDKIDAALFWMPNGKTYFFRGNKYYRFNEELRAVDSEYPKNIKVWEGIPESPRGSFMGSDEVFTYFYKGNKYWKFNNQKLKVEPGYPKSALRDWMGCPSGGRPDEGTEEETEVIIIEVDEEGGGAVSAAAVVLPVLLLLLVLAVGLAVFFFRRHGTPRRLLYCQRSLLDKV

SEQ ID NO: 8774 - protein, 71 aa, Homo sapiens
MSPAPRPPRCLLLPLLTLGTALASLGSAQSSSFSPESLEELYNWGELPLPRFPWALLSALEPPDKHLDSAQ

SEQ ID NO: 8775 - protein, 143 aa, Homo sapiens
MDPGYPAQSPLWRGVPSTLDDAMRWSDGASYFFRGQEYWKVLDGELEVAPGYPQSTARDWLVCGDSQADGSVAAGVDAAEGPRAPPGQHDQSRSEDGYEVCSCTSGASSPPGAPGPLVAATMLLLLPPLSPGALWTAAQALTL

SEQ ID NO: 8776 - protein, 118 aa, Homo sapiens
MHRFWRGLPLHLDSVDAVYERTSDHKIVFFKGDRYWVFKDNNVEEGYPRPVSDFSLPPGGIDAAFSWAHNDRTYFFKDQLYWRYDDHTRHMDPGYPAQSPLWRGVPSTLDDAMRWSDG

SEQ ID NO: 8777 - protein, 39 aa, Homo sapiens
MHRFWRGLPLHLDSVDAVYERTSDHKIVFFKGPAVLALR

SEQ ID NO: 8778 - protein, 169 aa, Homo sapiens
MKTPRCSLPDLPVLTQARRRRQAPAPTKWNKRNLSWRVRTFPRDSPLGHDTVRALMYYALKVWSDIAPLNFHEVAGSAADIQIDFSKADHNDGYPFDGPGGTVAHAFFPGHHHTAGDTHFDDDEAWTFRSSDAHGMDLFAVAVHEFGHAIGLSHVAAAHSIMRPYYQGP

SEQ ID NO: 8779 - protein, 115 aa, Homo sapiens
MQQFGGLEATGILDEATLALMKTPRCSLPDLPVLTQARRRRQAPAPTKWNKRNLSWRVRTFPRDSPLGHDTVRALMYYALKVWSDIAPLNFHEVAGSAADIQIDFSKADHNDGYP

SEQ ID NO: 8780 - protein, 519 aa, Homo sapiens
MQQFGGLEATGILDEATLALMKTPRCSLPDLPVLTQARRRRQAPAPTKWNKRNLSWRVRTFPRDSPLGHDTVRALMYYALKVWSDIAPLNFHEVAGSAADIQIDFSKADHNDGYPFDGPGGTVAHAFFPGHHHTAGDTHFDDDEAWTFRSSDAHGMDLFAVAVHEFGHAIGLSHVAAAHSIMRPYYQGPVGDPLRYGLPYEDKVRVWQLYGVRESVSPTAQPEEPPLLPEPPDNRSSAPPRKDVPHRCSTHFDAVAQIRGEAFFFKGKYFWRLTRDRHLVSLQPAQMHRFWRGLPLHLDSVDAVYERTSDHKIVFFKGDRYWVFKDNNVEEGYPRPVSDFSLPPGGIDAAFSWAHNDRTYFFKDQLYWRYDDHTRHMDPGYPAQSPLWRGVPSTLDDAMRWSDGASYFFRGQEYWKVLDGELEVAPGYPQSTARDWLVCGDSQADGSVAAGVDAAEGPRAPPGQHDQSRSEDGYEVCSCTSGASSPPGAPGPLVAATMLLLLPPLSPGALWTAAQALTL

SEQ ID NO: 8781 - protein, 603 aa, Homo sapiens
MRRRAARGPGPPPPGPGLSRLPLPLLLLLALGTRGGCAAPAPAPRAEDLSLGVEWLSRFGYLPPADPTTGQLQTQEELSKAITAMQQFGGLEATGILDEATLALMKTPRCSLPDLPVLTQARRRRQAPAPTKWNKRNLSWRVRTFPRDSPLGHDTVRALMYYALKVWSDIAPLNFHEVAGSAADIQIDFSKADHNDGYPFDGPGGTVAHAFFPGHHHTAGDTHFDDDEAWTFRSSDAHGMDLFAVAVHEFGHAIGLSHVAAAHSIMRPYYQGPVGDPLRYGLPYEDKVRVWQLYGVRESVSPTAQPEEPPLLPEPPDNRSSAPPRKDVPHRCSTHFDAVAQIRGEAFFFKGKYFWRLTRDRHLVSLQPAQMHRFWRGLPLHLDSVDAVYERTSDHKIVFFKGDRYWVFKDNNVEEGYPRPVSDFSLPPGGIDAAFSWAHNDRTYFFKDQLYWRYDDHTRHMDPGYPAQSPLWRGVPSTLDDAMRWSDGASYFFRGQEYWKVLDGELEVAPGYPQSTARDWLVCGDSQADGSVAAGVDAAEGPRAPPGQHDQSRSEDGYEVCSCTSGASSPPGAPGPLVAATMLLLLPPLSPGALWTAAQALTL

SEQ ID NO: 8782 - protein, 302 aa, Homo sapiens
MYYALKVWSDIAPLNFHEVAGSAADIQIDFSKADHNDGYPFDGPGGTVAHAFFPGHHHTAGDTHFDDDEAWTFRSSDAHGMDLFAVAVHEFGHAIGLSHVAAAHSIMRPYYQGPVGDPLRYGLPYEDKVRVWQLYGVRESVSPTAQPEEPPLLPEPPDNRSSAPPRKDVPHRCSTHFDAVAQIRGEAFFFKGKYFWRLTRDRHLVSLQPAQMHRFWRGLPLHLDSVDAVYERTSDHKIVFFKGDRYWVFKDNNVEEGYPRPVSDFSLPPGGIDAAFSWAHNDRTYFFKDQLYWRYDDHTRHM

SEQ ID NO: 8783 - protein, 485 aa, Homo sapiens
MNCQQLWLGFLLPMTVSGRVLGLAEVAPVDYLSQYGYLQKPLEGSNNFKPEDITEALRAFQEASELPVSGQLDDATRARMRQPRCGLEDPFNQKTLKYLLLARAALRQAFQDWSNVAPLTFQEVQAGAADIRLSFHGRQSSYCSNTFDGPGRVLAHADIPELGSVHFDEDEFWTEGTYRGVNLRIIAAHEVGHALGLGHSRYSQALMAPVYEGYRPHFKLHPDDVAGIQALYGKKSPVIRDEEEEETELPTVPPVPTEPSPMPDPCSSELDAMMLGPRGKTYAFKGDYVWTVSDSGPGPLFRVSALWEGLPGNLDAAVYSPRTQWIHFFKGDKVWRYINFKMSPGFPKKLNRVEPNLDAALYWPLNQKVFLFKGSGYWQWDELARTDFSSYPKPIKGLFTGVPNQPSAAMSWQDGRVYFFKGKVYWRLNQQLRVEKGYPRNISHNWMHCRPRTIDTTPSGGNTTPSGTGITLDTTLSATETTFEY

SEQ ID NO: 8784 - protein, 305 aa, Homo sapiens
MNCQQLWLGFLLPMTVSGRVLGLAEVAPVDYLSQYGYLQKPLEGSNNFKPEDITEALRAFQEASELPVSGQLDDATRARMRQPRCGLEDPFNQKTLKYLLLGRWRKKHLTFRILNLPSTLPPHTARAALRQAFQDWSNVAPLTFQEVQAGAADIRLSFHGRQSSYCSNTFDGPGKKSPVIRDEEEEETELPTVPPVPTEPSPMPDPCSSELDAMMLGEAPPLQAVGRRWGQPADPEAWTNGSDMGLQHEQWRAPWEDLCFQGGLCVDCIRFRTGPLVPSVCPLGGAPRKPGCCCLLASNTMDSLL

SEQ ID NO: 8785 - protein, 508 aa, Homo sapiens
MNCQQLWLGFLLPMTVSGRVLGLAEVAPVDYLSQYGYLQKPLEGSNNFKPEDITEALRAFQEASELPVSGQLDDATRARMRQPRCGLEDPFNQKTLKYLLLGRWRKKHLTFRILNLPSTLPPHTARAALRQAFQDWSNVAPLTFQEVQAGAADIRLSFHGRQSSYCSNTFDGPGRVLAHADIPELGSVHFDEDEFWTEGTYRGVNLRIIAAHEVGHALGLGHSRYSQALMAPVYEGYRPHFKLHPDDVAGIQALYGKKSPVIRDEEEEETELPTVPPVPTEPSPMPDPCSSELDAMMLGPRGKTYAFKGDYVWTVSDSGPGPLFRVSALWEGLPGNLDAAVYSPRTQWIHFFKGDKVWRYINFKMSPGFPKKLNRVEPNLDAALYWPLNQKVFLFKGSGYWQWDELARTDFSSYPKPIKGLFTGVPNQPSAAMSWQDGRVYFFKGKVYWRLNQQLRVEKGYPRNISHNWMHCRPRTIDTTPSGGNTTPSGTGITLDTTLSATETTFEY

SEQ ID NO: 8786 - protein, 81 aa, Homo sapiens
MNCQQLWLGFLLPMTVSGRVLGLAEVAPVDYLSQYGYLQKPLEGSNNFKPEDITEALRESPGPCRHPRAGQCALRRRRVLD

SEQ ID NO: 8787 - protein, 108 aa, Homo sapiens
MNCQQLWLGFLLPMTVSGRVLGLAEVAPVDYLSQYGYLQKPLEGSNNFKPEDITEALRPLEKEAPDFPHLEPALHPSTPHSPGSPASSLPGLEQCGSLDLPRGAGWCG

SEQ ID NO: 8788 - protein, 63 aa, Homo sapiens
MNCQQLWLGFLLPMTVSGRVLGLAEVAPVDYLSQYGYLQKPLEGSNNFKPEDITEALSLRSAG

SEQ ID NO: 8789 - protein, 252 aa, Homo sapiens
GTTEDYDRDKKYGFCPETGYSLFLVAAHEFGHAMGLEHSQDPGALMAPIYTYTKNFRLSQDDIKGIQELYGASPDIDLGTGPTPTLGPVTPEICKQDIVFDGIAQIRGEIFFFKDRFIWRTVTPRDKPMGPLLVATFWPELPEKIDAVYEAPQEEKAVFFAGNEYWIYSASTLERGYPKPLTSLGLPPDVQRVDAAFNWSKNKKTYIFAGDKFWRYNEVKKKMDPGFPKLIADAWNAIPDNLDAVVDLQGGG

SEQ ID NO: 8790 - protein, 660 aa, Homo sapiens
MEALMARGALTGPLRALCLLGCLLSHAAAAPSPIIKFPGDVAPKTDKELAVQYLNTFYGCPKESCNLFVLKDTLKKMQKFFGLPQTGDLDQNTIETMRKPRCGNPDVANYNFFPRKPKWDKNQITYRIIGYTPDLDPETVDDAFARAFQVWSDVTPLRFSRIHDGEADIMINFGRWEHGDGYPFDGKDGLLAHAFAPGTGVGGDSHFDDDELWTLGEGQVVRVKYGNADGEYCKFPFLFNGKEYNSCTDTGRSDGFLWCSTTYNFEKDGKYGFCPHEALFTMGGNAEGQPCKFPFRFQGTSYDSCTTEGRTDGYRWCGTTEDYDRDKKYGFCPETAMSTVGGNSEGAPCVFPFTFLGNKYESCTSAGRSDGKMWCATTANYDDDRKWGFCPDQGYSLFLVAAHEFGHAMGLEHSQDPGALMAPIYTYTKNFRLSQDDIKGIQELYGASPDIDLGTGPTPTLGPVTPEICKQDIVFDGIAQIRGEIFFFKDRFIWRTVTPRDKPMGPLLVATFWPELPEKIDAVYEAPQEEKAVFFAGNEYWIYSASTLERGYPKPLTSLGLPPDVQRVDAAFNWSKNKKTYIFAGDKFWRYNEVKKKMDPGFPKLIADAWNAIPDNLDAVVDLQGGGHSYFFKGAYYLKLENQSLKSVKFGSIKSDWLGC

SEQ ID NO: 8791 - protein, 118 aa, Homo sapiens
MQKFFGLPQTGDLDQNTIETMRKPRCGNPDVANYNFFPRKPKWDKNQITYRIIGYTPDLDPETVDDAFARAFQVWSDVTPLRFSRIHDGEADIMINFGRWEHGDGYPFDGKDGLLAHA

SEQ ID NO: 8792 - protein, 201 aa, Homo sapiens
MQKFFGLPQTGDLDQNTIETMRKPRCGNPDVANYNFFPRKPKWDKNQITYRIIGYTPDLDPETVDDAFARAFQVWSDVTPLRFSRIHDGEADIMINFGRWEHGDGYPFDGKDGLLAHAFAPGTGVGGDSHFDDDELWTLGEGQVVRVKYGNADGEYCKFPFLFNGKEYNSCTDTGRSDGFLWCSTTYNFEKDGKYGFCPHE

SEQ ID NO: 8793 - protein, 584 aa, Homo sapiens
MQKFFGLPQTGDLDQNTIETMRKPRCGNPDVANYNFFPRKPKWDKNQITYRIIGYTPDLDPETVDDAFARAFQVWSDVTPLRFSRIHDGEADIMINFGRWEHGDGYPFDGKDGLLAHAFAPGTGVGGDSHFDDDELWTLGEGQVVRVKYGNADGEYCKFPFLFNGKEYNSCTDTGRSDGFLWCSTTYNFEKDGKYGFCPHEALFTMGGNAEGQPCKFPFRFQGTSYDSCTTEGRTDGYRWCGTTEDYDRDKKYGFCPETAMSTVGGNSEGAPCVFPFTFLGNKYESCTSAGRSDGKMWCATTANYDDDRKWGFCPDQGYSLFLVAAHEFGHAMGLEHSQDPGALMAPIYTYTKNFRLSQDDIKGIQELYGASPDIDLGTGPTPTLGPVTPEICKQDIVFDGIAQIRGEIFFFKDRFIWRTVTPRDKPMGPLLVATFWPELPEKIDAVYEAPQEEKAVFFAGNEYWIYSASTLERGYPKPLTSLGLPPDVQRVDAAFNWSKNKKTYIFAGDKFWRYNEVKKKMDPGFPKLIADAWNAIPDNLDAVVDLQGGGHSYFFKGAYYLKLENQSLKSVKFGSIKSDWLGC

SEQ ID NO: 8794 - protein, 584 aa, Homo sapiens; identical to SEQ ID NO: 8793

SEQ ID NO: 8795 - protein, 610 aa, Homo sapiens
MQYLNTFYGCPKESCNLFVLKDTLKKMQKFFGLPQTGDLDQNTIETMRKPRCGNPDVANYNFFPRKPKWDKNQITYRIIGYTPDLDPETVDDAFARAFQVWSDVTPLRFSRIHDGEADIMINFGRWEHGDGYPFDGKDGLLAHAFAPGTGVGGDSHFDDDELWTLGEGQVVRVKYGNADGEYCKFPFLFNGKEYNSCTDTGRSDGFLWCSTTYNFEKDGKYGFCPHEALFTMGGNAEGQPCKFPFRFQGTSYDSCTTEGRTDGYRWCGTTEDYDRDKKYGFCPETAMSTVGGNSEGAPCVFPFTFLGNKYESCTSAGRSDGKMWCATTANYDDDRKWGFCPDQGYSLFLVAAHEFGHAMGLEHSQDPGALMAPIYTYTKNFRLSQDDIKGIQELYGASPDIDLGTGPTPTLGPVTPEICKQDIVFDGIAQIRGEIFFFKDRFIWRTVTPRDKPMGPLLVATFWPELPEKIDAVYEAPQEEKAVFFAGNEYWIYSASTLERGYPKPLTSLGLPPDVQRVDAAFNWSKNKKTYIFAGDKFWRYNEVKKKMDPGFPKLIADAWNAIPDNLDAVVDLQGGGHSYFFKGAYYLKLENQSLKSVKFGSIKSDWLGC

SEQ ID NO: 8796 - protein, 22 aa, Homo sapiens
  SITE 1: note = misc_feature - Xaa can be any naturally occurring amino acid
XLENQSLKSVKFGSIKSDWLGC

SEQ ID NO: 8797 - protein, 483 aa, Homo sapiens
MKVLPASGLAVFLIMALKFSTAAPSLVAASPRTWRNNYRLAQAYLDKYYTNKEGHQIGEMVARGSNSMIRKIKELQAFFGLQVTGKLDQTTMNVIKKPRCGVPDVANYRLFPGEPKWKKNTLTYRISKYTPSMSSVEVDKAVEMALQAWSSAVPLSFVRINSGEADIMISFENGDHGDSYPFDGPRGTLAHAFAPGEGLGGDTHFDNAEKWTMGTNGFNLFTVAAHEFGHALGLAHSTDPSALMYPTYKYKNPYGFHLPKDDVKGIQALYGPRKVFLGKPTLPHAPHHKPSIPDLCDSSSSFDAVTMLGKELLLFKDRIFWRRQVHLRTGIRPSTITSSFPQLMSNVDAAYEVAERGTAYFFKGPHYWITRGFQMQGPPRTIYDFGFPRHVQQIDAAVYLREPQKTLFFVGDEYYSYDERKRKMEKDYPKNTEEEFSGVNGQIDAAVELNGYIYFFSGPKTYKYDTEKEDVVSVVKSSSWIGC

SEQ ID NO: 8798 - protein, 569 aa, Homo sapiens
MLAASIFRPTLLLCWLAAPWPTQPESLFHSRDRSDLEPSPLRQAKPIADLHAAQRFLSRYGWSGVWAAWGPSPEGPPETPKGAALAEAVRRFQRANALPASGELDAATLAAMNRPRCGVPDMRPPPPSAPPSPPGPPPRARSRRSPRAPLSLSRRGWQPRGYPDGGAAQAFSKRTLSWRLLGEALSSQLSVADQRRIVALAFRMWSEVTPLDFREDLAAPGAAVDIKLGFGRGRHLGCPRAFDGSGQEFAHAWRLGDIHFDDDEHFTPPTSDTGISLLKVAVHEIGHVLGLPHTYRTGSIMQPNYIPQEPAFELDWSDRKAIQKLYGSCEGSFDTAFDWIRKERNQYGEVMVRFSTYFFRNSWYWLYENRNNRTRYGDPIQILTGWPGIPTHNIDAFVHIWTWKRDERYFFQGNQYWRYDSDKDQALTEDEQGKSYPKLISEGFPGIPSPLDTAFYDRRQKLIYFFKESLVFAFDVNRNRVLNSYPKRITEVFPAVIPQNHPFRNIDSAYYSYAYNSIFFFKGNAYWKVVNDKDKQQNSWLPANGLFPKKFISEKWFDVCDVHISTLNM

SEQ ID NO: 8799 - protein, 183 aa, Homo sapiens
MDPGTVATMRKPRCSLPDVLGVAGLVRRRRRYALSGSVWKKRTLTWRVRSFPQSSQLSQETVRVLMSYALMAWGMESGLTFHEVDSPQGQEPDILIDFARAFHQDSYPFDGLGGTLAHAFFPGEHPISGDTHFDDEETWTFGSKASQQLEQELAGGSPVDEELGFSRGWRVNPLGPGSPERLS

SEQ ID NO: 8800 - protein, 562 aa, Homo sapiens
MRLRLRLLALLLLLLAPPARAPKPSAQDVSLGVDWLTRYGYLPPPHPAQAQLQSPEKLRDAIKVMQRFAGLPETGRMDPGTVATMRKPRCSLPDVLGVAGLVRRRRRYALSGSVWKKRTLTWRVRSFPQSSQLSQETVRVLMSYALMAWGMESGLTFHEVDSPQGQEPDILIDFARAFHQDSYPFDGLGGTLAHAFFPGEHPISGDTHFDDEETWTFGSKDGEGTDLFAVAVHEFGHALGLGHSSAPNSIMRPFYQGPVGDPDKYRLSQDDRDGLQQLYGKAPQTPYDKPTRKPLAPPPQPPASPTHSPSFPIPDRCEGNFDAIANIRGETFFFKGPWFWRLQPSGQLVSPRPARLHRFWEGLPAQVRVVQAAYARHRDGRILLFSGPQFWVFQDRQLEGGARPLTELGLPPGEEVDAVFSWPQNGKTYLVRGRQYWRYDEAAARPDPGYPRDLSLWEGAPPSPDDVTVSNAGDTYFFKGAHYWRFPKNSIKTEPDAPQPMGPNWLDCPAPSSGPRAPRPPKATPVSETCDCQCELNQAAGRWPAPIPLLLLPLLVGGVASR

SEQ ID NO: 8801 - protein, 261 aa, Homo sapiens
MQLVILRVTIFLPWCFAVPVPPAADHKGWDFVEGYFHQFFLTKKESPLLTQETQTQLLQQFHRNGTDLLDMQMHALLHQPHCGVPDGSDTSISPGRCKWNKHTLTYRIINYPHDMKPSAVKDSIYNAVSIWSNVTPLIFQQVQNGDADIKVSFWQWAHEDGWPFDGPGGILGHAFLPNSGNPGVVHFDKNEHWSASDTGYNLFLVATHEIGHSLGLQHSGNQSSIMYPTYWYHDPRTFQLSADDIQRIQHLYGEKCSSDIP

SEQ ID NO: 8802 - protein, 261 aa, Homo sapiens; identical to SEQ ID NO: 8801

SEQ ID NO: 8803 - protein, 513 aa, Homo sapiens
MKRLLLLFLFFITFSSAFPLVRMTENEENMQLAQAYLNQFYSLEIEGNHLVQSKNRSLIDDKIREMQAFFGLTVTGKLDSNTLEIMKTPRCGVPDVGQYGYTLPGWRKYNLTYRIINYTPDMARAAVDEAIQEGLEVWSKVTPLKFTKISKGIADIMIAFRTRVHGRCPRYFDGPLGVLGHAFPPGPGLGGDTHFDEDENWTKDGAGFNLFLVAAHEFGHALGLSHSNDQTALMFPNYVSLDPRKYPLSQDDINGIQSIYGGLPKEPAKPKEPTIPHACDPDLTFDAITTFRREVMFFKGRHLWRIYYDITDVEFELIASFWPSLPADLQAAYENPRDKILVFKDENFWMIRGYAVLPDYPKSIHTLGFPGRVKKIDAAVCDKTTRKTYFFVGIWCWRFDEMTQTMDKGFPQRVVKHFPGISIRVDAAFQYKGFFFFSRGSKQFEYDIKTKNITRIMRTNTWFQCKEPKNSSFGFDINKEKAHSGGIKILYHKSLSLFIFGIVHLLKNTSIYQ

SEQ ID NO: 8804 - protein, 89 aa, Homo sapiens
DFETWDSYSPQGRRPETQGPKYCHSSFDAITVDRQQQLYIFKGSHFWEVAADGNVSEPRPLQERWVGLPPNIEAAAVSLNDGDFYFFKA

SEQ ID NO: 8805 - protein, 189 aa, Homo sapiens
KYGYLNEQVPKAPTSTRFSDAIRAFQWVSQLPVSGVLDRATLRQMTRPRCGVTDTNSYAAWAERISDLFARHRTKMRRKKRFAKQGGALAHAFLPRRGEAHFDQDERWSLSRRRGRNLFVVLAHEIGHTLGLTHSPAPRALMAPYYKRLGRDALLSWDDVLAVQSLYGKPLGGSVAVQLPGKLFTDFET

SEQ ID NO: 8806 - protein, 130 aa, Homo sapiens
MVARVGLLLRALQLLLWGHLDAQPAERGGQELRKEAEAFLEKYGYLNEQVPKAPTSTRFSDAIRAFQWVSQLPVSGVLDRATLRQMTRPRCGVTDTNSYAAWAERISDLFARHRTKMRRKKRFAKQGEHC

SEQ ID NO: 8807 - protein, 510 aa, Homo sapiens
MVARVGLLLRALQLLLWGHLDAQPAERGGQELRKEAEAFLEKYGYLNEQVPKAPTSTRFSDAIRAFQWVSQLPVSGVLDRATLRQMTRPRCGVTDTNSYAAWAERISDLFARHRTKMRRKKRFAKQGNKWYKQHLSYRLVNWPEHLPEPAVRGAVRAAFQLWSNVSALEFWEAPATGPADIRLTFFQGDHNDGLGNAFDGPGGALAHAFLPRRGEAHFDQDERWSLSRRRGRNLFVVLAHEIGHTLGLTHSPAPRALMAPYYKRLGRDALLSWDDVLAVQSLYGKPLGGSVAVQLPGKLFTDFETWDSYSPQGRRPETQGPKYCHSSFDAITVGSHFWEVAADGNVSEPRPLQERWVGLPPNIEAAAVSLNDGDFYFFKGGRCWRFRGPKPVWGLPQLCRAGGLPRHPDAALFFPPLRRLILFKGARYYVLARGGLQVEPYYPRSLQDWGGIPEEVSGALPRPDGSIIFFRDDRYWRLDQAKLQATTSGRWATELPWMGCWHANSGSALF

SEQ ID NO: 8808 - protein, 393 aa, Homo sapiens
MVARVGLLLRALQLLLWGHLDAQPAERGGQELRKEAEAFLEKYGYLNEQVPKAPTSTRFSDAIRAFQWVSQLPVSGVLDRATLRQMTRPRCGVTDTNSYAAWAERISDLFARHRTKMRRKKRFAKQGNKWYKQHLSYRLVNWPEHLPEPAVRGAVRAAFQLWSNVSALEFWEAPATGPADIRLTFFQGDHNDGLGNAFDGPGGALAHAFLPRRGEAHFDQDERWSLSRRRGRNLFVVLAHEIGHTLGLTHSPAPRALMAPYYKRLGRDALLSWDDVLAVQSLYGKPLGGSVAVQLPGKLFTDFETWDSYSPQGRRPETQGPKYCHSSFDAITVDRQQQLYIFKGSHFWEVAADGNVSEPRPLQERWVGLPPNIEAAAVSLNDGDFYFFKVQSV

SEQ ID NO: 8809 - protein, 520 aa, Homo sapiens
MVARVGLLLRALQLLLWGHLDAQPAERGGQELRKEAEAFLEKYGYLNEQVPKAPTSTRFSDAIRAFQWVSQLPVSGVLDRATLRQMTRPRCGVTDTNSYAAWAERISDLFARHRTKMRRKKRFAKQGNKWYKQHLSYRLVNWPEHLPEPAVRGAVRAAFQLWSNVSALEFWEAPATGPADIRLTFFQGDHNDGLGNAFDGPGGALAHAFLPRRGEAHFDQDERWSLSRRRGRNLFVVLAHEIGHTLGLTHSPAPRALMAPYYKRLGRDALLSWDDVLAVQSLYGKPLGGSVAVQLPGKLFTDFETWDSYSPQGRRPETQGPKYCHSSFDAITVDRQQQLYIFKGSHFWEVAADGNVSEPRPLQERWVGLPPNIEAAAVSLNDGDFYFFKGGRCWRFRGPKPVWGLPQLCRAGGLPRHPDAALFFPPLRRLILFKGARYYVLARGGLQVEPYYPRSLQDWGGIPEEVSGALPRPDGSIIFFRDDRYWRLDQAKLQATTSGRWATELPWMGCWHANSGSALF

SEQ ID NO: 8810 - protein, 42 aa, Homo sapiens
MKSLPILLLLCVAVCSAYPLDGAAREISRKLLRPQKRCETVC

SEQ ID NO: 8811 - protein, 477 aa, Homo sapiens
MKSLPILLLLCVAVCSAYPLDGAARGEDTSMNLVQKYLENYYDLKKDVKQFVRRKDSGPVVKKIREMQKFLGLEVTGKLDSDTLEVMRKPRCGVPDVGHFRTFPGIPKWRKTHLTYRIVNYTPDLPKDAVDSAVEKALKVWEEVTPLTFSRLYEGEADIMISFAVREHGDFYPFDGPGNVLAHAYAPGPGINGDAHFDDDEQWTKDTTGTNLFLVAAHEIGHSLGLFHSANTEALMYPLYHSLTDLTRFRLSQDDINGIQSLYGPPPDSPETPLVPTEPVPPEPGTPANCDPALSFDAVSTLRGEILIFKDRHFWRKSLRKLEPELHLISSFWPSLPSGVDAAYEVTSKDLVFIFKGNQFWAIRGNEVRAGYPRGIHTLGFPPTVRKIDAAISDKEKNKTYFFVEDKYWRFDEKRNSMEPGFPKQIAEDFPGIDSKIDAVFEEFGFFYFFTGSSQLEFDPNAKKVTHTLKSNSWLNC

SEQ ID NO: 8812 - protein, 99 aa, Homo sapiens
  SITE 1: note = misc_feature - Xaa can be any naturally occurring amino acid
XNQFWAIRGNEVRAGYPRGIHTLGFPPTVRKIDAAISDKEKNKTYFFVEDKYWRFDEKRNSMEPGFPKQIAEDFPGIDSKIDAVFEEFDRAGTECCLHS

SEQ ID NO: 8813 - protein, 267 aa, Homo sapiens
MRLTVLCAVCLLPGSLALPLPQEAGGMSELQWEQAQDYLKRFYLYDSETKNANSLEAKLKEMQKFFGLPITGMLNSRVIEIMQKPRCGVPDVAEYSLFPNSPKWTSKVVTYRIVSYTRDLPHITVDRLVSKALNMWGKEIPLHFRKVVWGTADIMIGFARGAHGDSYPFDGPGNTLAHAFAPGTGLGGDAHFDEDERWTDGSSLGINFLYAATHELGHSLGMGHSSDPNAVMYPTYGNGDPQNFKLSQDDIKGIQKLYGKRSNSRKK

SEQ ID NO: 8814 - protein, 467 aa, Homo sapiens [sequence omitted]

SEQ ID NO: 8815 - protein, 56 aa, Homo sapiens
MFSLKTLPFLLLLHVQISKAFPVSSKEKNTKTVQHKAISEANQMQPPDLGLPSLQN

SEQ ID NO: 8816 - protein, 56 aa, Homo sapiens; identical to SEQ ID NO: 8815

SEQ ID NO: 8817 - protein, 36 aa, Homo sapiens
MFSLKTLPFLLLLHVQISKAFPVSSKEKNTKTVQNK

SEQ ID NO: 8818 - protein, 43 aa, Homo sapiens
MFSLKTLPFLLLLHVQISKAFPVSSKEKNTKTVQRQKYLKSDK

SEQ ID NO: 8819 - protein, 344 aa, Homo sapiens
  SITE 1: note = misc_feature - Xaa can be any naturally occurring amino acid
XKEKNTKTVQDYLEKFYQLPSNQYQSTRKNGTNVIVEKLKEMQRFFGLNVTGKPNEETLDMMKKPRCGVPDSGGFMLTPGNPKWERTNLTYRIRNYTPQLSEAEVERAIKDAFELWSVASPLIFTRISQGEADINIAFYQRDHGDNSPFDGPNGILAHAFQPGQGIGGDAHFDAEETWTNTSANYNLFLVAAHEFGHSLGLAHSSDPGALMYPNYAFRETSNYSLPQDDIDGIQAIYGLSSNPIQPTGPSTPKPCDPSLTFDAITTLRGEILFFKDRYFWRRHPQLQRVEMNFISLFWPSLPTGIQAAYEDFDRDLIFLFKDMITKDNSWSQVIPKAYQVPFQE

SEQ ID NO: 8820 - protein, 707 aa, Homo sapiens
MSLWQPLVLVLLVLGCCFAAPRQRQSTLVLFPGDLRTNLTDRQLAEEYLYRYGYTRVAEMRGESKSLGPALLLLQKQLSLPETGELDSATLKAMRTPRCGVPDLGRFQTFEGDLKWHHHNITYWIQNYSEDLPRAVIDDAFARAFALWSAVTPLTFTRVYSRDADIVIQFGVAEHGDGYPFDGKDGLLAHAFPPGPGIQGDAHFDDDELWSLGKGVVVPTRFGNADGAACHFPFIFEGRSYSACTTDGRSDGLPWCSTTANYDTDDRFGFCPSERLYTQDGNADGKPCQFPFIFQGQSYSACTTDGRSDGYRWCATTANYDRDKLFGFCPTRADSTVMGGNSAGELCVFPFTFLGKEYSTCTSEGRGDGRLWCATTSNFDSDKKWGFCPDQGYSLFLVAAHEFGHALGLDHSSVPEALMYPMYRFTEGPPLHKDDVNGIRHLYGPRPEPEPRPPTTTTPQPTAPPTVCPTGPPTVHPSERPTAGPTGPPSAGPTGPPTAGPSTATTVPLSPVDDACNVNIFDAIAEIGNQLYLFKDGKYWRFSEGRGSRPQGPFLIADKWPALPRKLDSVFEERLSKKLFFFSGRQVWVYTGASVLGPRRLDKLGLGADVAQVTGALRSGRGKMLLFSGRRLWRFDVKAQMVDPRSASEVDRMFPGVPLDTHDVFQYREKAYFCQDRFYWRVSSRSELNQVDQVGYVTYDILQCPED

SEQ ID NO: 8821 - protein, 1228 aa, Homo sapiens
MKGARLFVLLSSLWSGGIGLNNSKHSWTIPEDGNSQKTMPSASVPPNKIQSLQILPTTRVMSAEIATTPEARTSEDSLLKSTLPPSETSAPAEGVRNQTLTSTEKAEGVVKLQNLTLPTNASIKFNPGAESVVLSNSTLKFLQSFARKSNEQATSLNTVGGTGGIGGVGGTGGVGNRAPRETYLSRGDSSSSQRTDYQKSNFETTRGKNWCAYVHTRLSPTVILDNQVTYVPGGKGPCGWTGGSCPQRSQKISNPVYRMQHKIVTSLDWRCCPGYSGPKCQLRAQEQQSLIHTNQAESHTAVGRGVAEQQQQQGCGDPEVMQKMTDQVNYQAMKLTLLQKKIDNISLTVNDVRNTYSSLEGKVSEDKSREFQSLLKGLKSKSINVLIRDIVREQFKIFQNDMQETVAQLFKTVSSLSEDLESTRQIIQKVNESVVSIAAQQKFVLVQENRPTLTDIVELRNHIVNVRQEMTLTCEKPIKELEVKQTHLEGALEQEHSRSILYYESLNKTLSKLKEVHEQLLSTEQVSDQKNAPAAESVSNNVTEYMSTLHENIKKQSLMMLQMFEDLHIQESKINNLTVSLEMEKESLRGECEDMLSKCRNDFKFQLKDTEENLHVLNQTLAEVLFPMDNKMDKMSEQLNDLTYDMEILQPLLEQGASLRQTMTYEQPKEAIVIRKKIENLTSAVNSLNFIIKELTKRHNLLRNEVQGRDDALERRINEYALEMEDGLNKTMTIINNAIDFIQDNYALKETLSTIKDNSEIHHKCTSDMETILTFIPQFHRLNDSIQTLVNDNQRYNFVLQVAKTLAGIPRDEKLNQSNFQKMYQMFNETTSQVRKYQQNMSHLEEKLLLTTKISKNFETRLQDIESKVTQTLIPYYISVKKGSVVTNERDQALQLQVLNSRFKALEAKSIHLSINFFSLNKTLHEVLTMCHNASTSVSELNATIPKWIKHSLPDIQLLQKGLTEFVEPIIQIKTQAALSNLTCCIDRSLPGSLANVVKSQKQVKSLPKKINALKKPTVNLTTVLIGRTQRNTDNIIYPEEYSSCSRHPCQNGGTCINGRTSFTCACRHPFTGDNCTIKLVEENALAPDFSKGSYRYAPMVAFFASHTYGMTIPGPILFNNLDVNYGASYTPRTGKFRIPYLGVYVFKYTIESFSAHISGFLVVDGIDKLAFESENINSEIHCDRVLTGDALLELNYGQEVWLRLAKGTIPAKFPPVTTFSGYLLYRT

SEQ ID NO: 8822 - protein, 1228 aa, Homo sapiens; identical to SEQ ID NO: 8821

SEQ ID NO: 8823 - protein, 970 aa, Homo sapiens
MQHKIVTSLDWRCCPGYSGPKCQLRAQEQQSLIHTNQAESHTAVGRGVAEQQQQQGCGDPEVMQKMTDQVNYQAMKLTLLQKKIDNISLTVNDVRNTYSSLEGKVSEDKSREFQSLLKGLKSKSINVLIRDIVREQFKIFQNDMQETVAQLFKTVSSLSEDLESTRQIIQKVNESVVSIAAQQKFVLVQENRPTLTDIVELRNHIVNVRQEMTLTCEKPIKELEVKQTHLEGALEQEHSRSILYYESLNKTLSKLKEVHEQLLSTEQVSDQKNAPAAESVSNNVTEYMSTLHENIKKQSLMMLQMFEDLHIQESKINNLTVSLEMEKESLRGECEDMLSKCRNDFKFQLKDTEENLHVLNQTLAEVLFPMDNKMDKMSEQLNDLTYDMEILQPLLEQGASLRQTMTYEQPKEAIVIRKKIENLTSAVNSLNFIIKELTKRHNLLRNEVQGRDDALERRINEYALEMEDGLNKTMTIINNAIDFIQDNYALKETLSTIKDNSEIHHKCTSDMETILTFIPQFHRLNDSIQTLVNDNQRYNFVLQVAKTLAGIPRDEKLNQSNFQKMYQMFNETTSQVRKYQQNMSHLEEKLLLTTKISKNFETRLQDIESKVTQTLIPYYISVKKGSVVTNERDQALQLQVLNSRFKALEAKSIHLSINFFSLNKTLHEVLTMCHNASTSVSELNATIPKWIKHSLPDIQLLQKGLTEFVEPIIQIKTQAALSNLTCCIDRSLPGSLANVVKSQKQVKSLPKKINALKKPTVNLTTVLIGRTQRNTDNIIYPEEYSSCSRHPCQNGGTCINGRTSFTCACRHPFTGDNCTIKLVEENALAPDFSKGSYRYAPMVAFFASHTYGMTIPGPILFNNLDVNYGASYTPRTGKFRIPYLGVYVFKYTIESFSAHISGFLVVDGIDKLAFESENINSEIHCDRVLTGDALLELNYGQEVWLRLAKGTIPAKFPPVTTFSGYLLYRT

SEQ ID NO: 8824 - protein, 204 aa, Homo sapiens
MAHKPVYQVKQKVLTSLAWRCCPGYTGPNCEHHDSMAIPEPADPGDSHQEPQDGPVSFKPGHLAAVINEVEVQQEQQEHLLGDLQNDVHRVADSLPGLWKALPGNLTAAVMEANQTGHEFPDRSLEQVLLPHVDTFLQVHFSPIWRSFNQSLHSLTQAIRNLSLDVEANRQAISRVQDSAVARADFQELGAKFEAKVQENTQRV

SEQ ID NO: 8825 - protein, 295 aa, Homo sapiens
MGTSASWAGGMGIKGQPEAAKSWRKPKQSNWCPYPMSKLVTLLALCKTEKFLIHSQQPCPQGAPDCQKVKVMYRMAHKPVYQVKQKVLTSLAWRCCPGYTGPNCEHHDSMAIPEPADPGDSHQEPQDGPVSFKPGHLAAVINEVEVQQEQQEHLLGDLQNDVHRVADSLPGLWKALPGNLTAAVMEANQTGHEFPDRSLEQVLLPHVDTFLQVHFSPIWRSFNQSLHSLTQAIRNLSLDVEANRQAISRVQDSAVARADFQELGAKFEAKVQENTQRVGQLRQDVEDRLHAQHFT

SEQ ID NO: 8826 - protein, 109 aa, Homo sapiens
MILSLLFSLGGPLGWGLLGAWAQASSTSLSDLQSSRTPGVWKAEAEDTGKDPVGRIMDSRIPALLRQEARTGGSALAPPVDLGVAQQPSPLACFPVTGAPTQCPSWSPY

SEQ ID NO: 8827 - protein, 949 aa, Homo sapiens
MILSLLFSLGGPLGWGLLGAWAQASSTSLSDLQSSRTPGVWKAEAEDTGKDPVGRNWCPYPMSKLVTLLALCKTEKFLIHSQQPCPQGAPDCQKVKVMYRMAHKPVYQVKQKVLTSLAWRCCPGYTGPNCEHHDSMAIPEPADPGDSHQEPQDGPVSFKPGHLAAVINEVEVQQEQQEHLLGDLQNDVHRVADSLPGLWKALPGNLTAAVMEANQTGHEFPDRSLEQVLLPHVDTFLQVHFSPIWRSFNQSLHSLTQAIRNLSLDVEANRQAISRVQDSAVARADFQELGAKFEAKVQENTQRVGQLRQDVEDRLHAQHFTLHRSISELQADVDTKLKRLHKAQEAPGTNGSLVLATPGAGARPEPDSLQARLGQLQRNLSELHMTTARREEELQYTLEDMRATLTRHVDEIKELYSESDETFDQISKVERQVEELQVNHTALRELRVILMEKSLIMEENKEEVERQLLELNLTLQHLQGGHADLIKYVKDCNCQKLYLDLDVIREGQRDATRALEETQVSLDERRQLDGSSLQALQNAVDAVSLAVDAHKAEGERARAATSRLRSQVQALDDEVGALKAAAAEARHEVRQLHSAFAALLEDALRHEAVLAALFGEEVLEEMSEQTPGPLPLSYEQIRVALQDAASGLQEQALGWDELAARVTALEQASEPPRPAEHLEPSHDAGREEAATTALAGLARELQSLSNDVKNVGRCCEAEAGAGAASLNASLHGLHNALFATQRSLEQHQRLFHSLFGNFQGLMEANVSLDLGKLQTMLSRKGKKQQKDLEAPRKRDKKEAEPLVDIRVTGPVPGALGAALWEAGSPVAFYASFSEGTAALQTVKFNTTYINIGSSYFPEHGYFRAPERGVYLFAVSVEFGPGPGTGQLVFGGHHRTPVCTTGQGSGSTATVFAMAELQKGERVWFELTQGSITKRSLSGTAFGGFLMFKT

SEQ ID NO: 8828 - protein, 123 aa, Homo sapiens
MSKLVTLLALCKTEKFLIHSQQPCPQGAPDCQKVKVMYRMAHKPVYQVKQKVLTSLAWRCCPGYTGPNCEHHDSMAIPEPADPGDSHQEPQDGPVSFKPGHLAAVINEVEVQQEQQEHLLGDL

SEQ ID NO: 8829 - protein, 613 aa, Homo sapiens
MCCWPLLLLWGLLPGTAAGGSGRTYPHRTLLDSEGKYWLGWSQRGSQIAFRLQVRTAGYVGFGFSPTGAMASADIVVGGVAHGRPYLQDYFTNANRELKKDAQQDYHLEYAMENSTHTIIEFTRELHTCDINDKSITDSTVRVIWAYHHEDAGEAGPKYHDSNRGTKSLRLLNPEKTSVLSTALPYFDLVNQDVPIPNKDTTYWCQMFKIPVFQEKHHVIKVEPVIQRGHESLVHHILLYQCSNNFNDSVLESGHECYHPNMPDAFLTCETVIFAWAIGGEGFSYPPHVGLSLGTPLDPHYVLLEVHYDNPTYEEGLIDNSGLRLFYTMDIRKYDAGVIEAGLWVSLFHTIPPGMPEFQSEGHCTLECLEEALEAEKPSGIHVFAVLLHAHLAGRGIRLRHFRKGKEMKLLAYDDDFDFNFQEFQYLKEEQTILPGDNLITECRYNTKDRAEMTWGGLSTRSEMCLSYLLYYPRINLTRCASIPDIMEQLQFIGVKEIYRPVTTWPFIIKSPKQYKNLSFMDAMNKFKWTKKEGLSFNKLVLSLPVNVRCSKTDNAEWSIQGMTALPPDIERPYKAEPLVCGTSSSSSLHRDFSINLLVCLLLLSCTLSTKSL

SEQ ID NO: 8830 - protein, 115 aa, Homo sapiens
MCCWPLLLLWGLLPGTAAGGSGRTYPHRTLLDSEGKYWLGWSQRGSQIAFRLQVRTAGYVGFGFSPTGAMASADIVVGGVAHGRPYLQPCLLVSKTEACDAKCLQQQGNCCRATC

SEQ ID NO: 8831 - protein, 545 aa, Homo sapiens
MNSFLSVFRYPDFSFPYFPQDYFTNANRELKKDAQQDYHLEYAMENSTHTIIEFTRELHTCDINDKSITDSTVRVIWAYHHEDAGEAGPKYHDSNRGTKSLRLLNPEKTSVLSTALPYFDLVNQDVPIPNKDTTYWCQMFKIPVFQEKHHVIKVEPVIQRGHESLVHHILLYQCSNNFNDSVLESGHECYHPNMPDAFLTCETVIFAWAIGGEGFSYPPHVGLSLGTPLDPHYVLLEVHYDNPTYEEGLIDNSGLRLFYTMDIRKYDAGVIEAGLWVSLFHTIPPGMPEFQSEGHCTLECLEEALEAEKPSGIHVFAVLLHAHLAGRGIRLRHFRKGKEMKLLAYDDDFDFNFQEFQYLKEEQTILPGDNLITECRYNTKDRAEMTWGGLSTRSEMCLSYLLYYPRINLTRCASIPDIMEQLQFIGVKEIYRPVTTWPFIIKSPKQYKNLSFMDAMNKFKWTKKEGLSFNKLVLSLPVNVRCSKTDNAEWSIQGMTALPPDIERPYKAEPLVCGTSSSSSLHRDFSINLLVCLLLLSCTLSTKSL

SEQ ID NO: 8832 - protein, 125 aa, Homo sapiens
MAVFLQLLPLLLSRAQGNPGASLDGRPGDRVNLSCGGVSHPIRWVWAPSFPACKGLSKGRRPILWASSSGTPTVPPLQPFVGRLRSLDSAPDPAAGRWVGARTGSFGPGLVAAQAPAPATDSTTP

SEQ ID NO: 8833 - protein, 193 aa, Homo sapiens
MAVFLQLLPLLLSRAQGNPGASLDGRPGDRVNLSCGGVSHPIRWVWAPSFPACKGLSKGRRPILWASSSGTPTVPPLQPFVGRLRSLDSGIRRLELLLSAGDSGTFFCKGRHEDESRTVLHVLGDRTYCKAPGPTHALSPPHSSTCENRAPEASKGGRAQDSRGPGPGTEPALCGSGPSSPQQAPPAVHSGPC

SEQ ID NO: 8834 - protein, 197 aa, Homo sapiens
MAVFLQLLPLLLSRAQGNPGASLDGRPGDRVNLSCGGVSHPIRWVWAPSFPACKGLSKGRRPILWASSSGTPTVPPLQPFVGRLRSLDSGIRRLELLLSAGDSGTFFCKGRHEDESRTVLHVLGDRTYCKAPGPTHAPLVKTEPQRPVKEEEPKIPGDLDQEPSLLYADLDHLALSRPRRLSTADPADASTIYAVVV

SEQ ID NO: 8835 - protein, 217 aa, Homo sapiens
MAVFLQLLPLLLSRAQGNPGASLDGRPGDRVNLSCGGVSHPIRWVWAPSFPACKGLSKGRRPILWASSSGTPTVPPLQPFVGRLRSLDSGIRRLELLLSAGDSGTFFCKGRHEDESRTVLHVLGDRTYCKAPGPTHGACPRNRFDHSLDLLCPPHIAPLVKTEPQRPVKEEEPKIPGDLDQEPSLLYADLDHLALSRPRRLSTADPADASTIYAVVV

SEQ ID NO: 8836 - protein, 237 aa, Homo sapiens
MAVFLQLLPLLLSRAQGNPGASLDGRPGDRVNLSCGGVSHPIRWVWAPSFPACKGLSKGRRPILWASSSGTPTVPPLQPFVGRLRSLDSGIRRLELLLSAGDSGTFFCKGRHEDESRTVLHVLGDRTYCKAPGPTHGSVYPQLLIPLLGAGLVLGLGALGLVWWLHRRLPPQPIRPLPRFALSPPHSSTCENRAPEASKGGRAQDSRGPGPGTEPALCGSGPSSPQQAPPAVHSGPC

SEQ ID NO: 8837 - protein, 222 aa, Homo sapiens
MAVFLQLLPLLLSRAQGNPGASLDGRPGDRVNLSCGGVSHPIRWVWAPSFPACKGLSKGRRPILWASSSGTPTVPPLQPFVGRLRSLDSGIRRLELLLSAGDSGTFFCKGRHEDESRTVLHVLGDRTYCKAPGPTHGSVYPQLLIPLLGAGLVLGLGALGLVWWLHRRLPPQPIRPLPRFALSPPHSSTCENRAPEASKGGRAQDSRGPGPGTGKGMGMGRG

SEQ ID NO: 8838 - protein, 241 aa, Homo sapiens
MAVFLQLLPLLLSRAQGNPGASLDGRPGDRVNLSCGGVSHPIRWVWAPSFPACKGLSKGRRPILWASSSGTPTVPPLQPFVGRLRSLDSGIRRLELLLSAGDSGTFFCKGRHEDESRTVLHVLGDRTYCKAPGPTHGSVYPQLLIPLLGAGLVLGLGALGLVWWLHRRLPPQPIRPLPRFAPLVKTEPQRPVKEEEPKIPGDLDQEPSLLYADLDHLALSRPRRLSTADPADASTIYAVVV

SEQ ID NO: 8839 - protein, 220 aa, Homo sapiens
MAVFLQLLPLLLSRAQGNPGASLDGRPGDRVNLSCGGVSHPIRWVWAPSFPACKGLSKGRRPILWASSSGTPTVPPLQPFVGRLRSLDSGIRRLELLLSAGDSGTFFCKGRHEDESRTVLHVLGDRTYCKAPGPTHGSVYPQLLIPLLGAGLVLGLGALGLVWWLHRRLPPQPIRPLPRFAPLVKTEPQRPVKEEEPKIPGDLDQEPVRAWGWEGDSQNL

SEQ ID NO: 8840 - protein, 745 aa, Homo sapiens
MGVPFFSSLRCMVDLGPCWAGGLTAEMKLLLALAGLLAILATPQPSEGAAPAVLGEVDTSLVLSSMEEAKQLVDKAYKERRESIKQRLRSGSASPMELLSYFKQPVAATRTAVRAADYLHVALDLLERKLRSLWRRPFNVTDVLTPAQLNVLSKSSGCAYQDVGVTCPEQDKYRTITGMCNNRRSPTLGASNRAFVRWLPAEYEDGFSLPYGWTPGVKRNGFPVALARAVSNEIVRFPTDQLTPDQERSLMFMQWGQLLDHDLDFTPEPAARASFVTGVNCETSCVQQPPCFPLKIPPNDPRIKNQADCIPFFRSCPACPGSNITIRNQINALTSFVDASMVYGSEEPLARNLRNMSNQLGLLAVNQRFQDNGRALLPFDNLHDDPCLLTNRSARIPCFLAGDTRSSEMPELTSMHTLLLREHNRLATELKSLNPRWDGERLYQEARKIVGAMVQIITYRDYLPLVLGPTAMRKYLPTYRSYNDSVDPRIANVFTNAFRYGHTLIQPFMFRLDNRYQPMEPNPRVPLSRVFFASWRVVLEGGIDPILRGLMATPAKLNRQNQIAVDEIRERLFEQVMRIGLDLPALNMQRSRDHGLPGYNAWRRFCGLPQPETVGQLGTVLRNLKLARKLMEQYGTPNNIDIWMGGVSEPLKRKGRVGPLLACIIGTQFRKLRDGDRFWWENEGVFSMQQRQALAQISLPRIICDNTGITTVSKNNIFMSNSYPRDFVNCSTLPALNLASWREAS

SEQ ID NO: 8841 - protein, 87 aa, Homo sapiens [sequence omitted]

SEQ ID NO: 8842 - protein, 74 aa, Homo sapiens
MWRSRWDASVLKAEALALLPCGLGMAFSQSHVMAARRHQHSRLIIEVDEYSSNPTQAFTFYNINQGRFQPPHVQ

SEQ ID NO: 8843 - protein, 119 aa, Homo sapiens
MWRSRWDASVLKAEALALLPCGLGMAFSQSHVMAARRHQHSRLIIEVDEYSSNPTQAFTFYNINQGRFQPPHVQMVDPVPHDAPKPPGYTRFVCVSDTHSRTDPIQMPYGDVLIHAGDF

SEQ ID NO: 8844 - protein, 326 aa, Homo sapiens
MWRSRWDASVLKAEALALLPCGLGMAFSQSHVMAARRHQHSRLIIEVDEYSSNPTQAFTFYNINQGRFQPPHVQMVDPVPHDAPKPPGYTRFVCVSDTHSRTDPIQMPYGDVLIHAGDFTELGLPSEVKKFNEWLGSLPYEYKIVIAGNHELTFDQEFMADLIKQDFYYFPSVSKLKPENYENVQSLLTNCIYLQDSEVTVRGFRIYGSPWQPWFYGWGFNLPRGQALLEKWNLIPEGVDILITHGPPLGFLDWVPKKMQRVGCVELLNTVQRRVQPRLHVFGHIHEGYGVMADGTTTYVNASVCTVNYQPVNPPIVIDLPTPRNS

SEQ ID NO: 8845 - protein, 326 aa, Homo sapiens; identical to SEQ ID NO: 8844

SEQ ID NO: 8846 - protein, 209 aa, Homo sapiens
MAASAGAGAVIAAPDSRRWLWSVLAAALGLLTAGVSALEVYTPKEIFVANGTQGKLTCKFKSTSTTGGLTSVSWSFQPEGADTTVSFFHYSQGQVYLGNYPPFKDRISWAGDLDKKDASINIENMQFIHNGTYICDVKNPPDIVVQPGHIRLYVVEKENLPVFPVWVVVGIVTAVVLGLTLLISMILAVLYRRKNSKRDYTGAQSYMHS

SEQ ID NO: 8847 - protein, 269 aa, Homo sapiens
MAASAGAGAVIAAPDSRRWLWSVLAAALGLLTAGVSALEVYTPKEIFVANGTQGKLTCKFKSTSTTGGLTSVSWSFQPEGADTTVSFFHYSQGQVYLGNYPPFKDRISWAGDLDKKDASINIENMQFIHNGTYICDVKNPPDIVVQPGHIRLYVVEKENLPVFPVWVVVGIVTAVVLGLTLLISMILAVLYRRKNSKRDYTGCSTSESLSPVKQAPRKSPSDTEGLVKSLPSGSHQGPVIYAQLDHSGGHHSDKINKSESVVYADIRKN

SEQ ID NO: 8848 - protein, 119 aa, Homo sapiens
MAASAGAGAVIAAPDSRRWLWSVLAAALGLLTAGVSALEVYTPKEIFVANGTQGKLTCKFKSTSTTGGLTSVSWSFQPEGADTTVSGPVIYAQLDHSGGHHSDKINKSESVVYADIRKN

SEQ ID NO: 8849 - protein, 95 aa, Homo sapiens
MAASAGAGAVIAAPDSRRWLWSVLAAALGLLTAGVSALEVYTPKEIFVANGTQGKLTCKFKSTSTTGGLTSVSWSFQPEGADTTVSRICLCFQFG

SEQ ID NO: 8850 - protein, 183 aa, Homo sapiens
PFSSVTAGVSALEVYTPKEIFVANGTQGKLTCKFKSTSTTGGLTSVSWSFQPEGADTTVSFFHYSQGQVYLGNYPPFKDRISWAGDLDKKDASINIENMQFIHNGTYICDVKNPPDIVVQPGHIRLYVVEKENLPVFPVWVVVGIVTAVVLGLTLLISMILAVLYRRKNSKRDYTGAQSYMHS

SEQ ID NO: 8851 - protein, 296 aa, Homo sapiens
MGELMAFLLPLIIVLMVKHSDSRTHSLRYFRLGVSDPIHGVPEFISVGYVDSHPITTYDSVTRQKEPRAPWMAENLAPDHWERYTQLLRGWQQMFKVELKRLQRHYNHSDNVAHTIKQAWEANQHELLYQKNWLEEECIAWLKRFLEYGKDTLQRTEPPLVRVNRKETFPGVTALFCKAHGFYPPEIYMTWMKNGEEIVQEIDYGDILPSGDGTYQAWASIELDPQSSNLYSCHVEHCGVHMVLQVPQESETIPLVMKAVSGSIVLVIVLAGVGVLVWRRRPREQNGAIYLPTPDR

SEQ ID NO: 8852 - protein, 341 aa, Homo sapiens
MGELMAFLLPLIIVLMVKHSDSRTHSLRYFRLGVSDPIHGVPEFISVGYVDSHPITTYDSVTRQKEPRAPWMAENLAPDHWERYTQLLRGWQQMFKVELKRLQRHYNHSGSHTYQRMIGCELLEDGSTTGFLQYAYDGQDFLIFNKDTLSWLAVDNVAHTIKQAWEANQHELLYQKNWLEEECIAWLKRFLEYGKDTLQRTEPPLVRVNRKETFPGVTALFCKAHGFYPPEIYMTWMKNGEEIVQEIDYGDILPSGDGTYQAWASIELDPQSSNLYSCHVEHCGVHMVLQVPQESETIPLVMKAVSGSIVLVIVLAGVGVLVWRRRPREQNGAIYLPTPDR

SEQ ID NO: 8853 - protein, 341 aa, Homo sapiens; identical to SEQ ID NO: 8852

SEQ ID NO: 8854 - protein, 214 aa, Homo sapiens
MGELMAFLLPLIIVLMVKHSDSRTHSLRYFRLGVSDPIHGVPEFISVGYVDSHPITTYDSVTRQKEPRAPWMAENLAPDHWERYTQLLRGWQQMFKVELKRLQRHYNHSGSHTYQRMIGCELLEDGSTTGFLQYAYDGQDFLIFNKDTLSWLAVDNVAHTIKQAWEANQHELLYQKNWLEEECIAWLKRFLEYGKDTLQRTEQNGAIYLPTPDR

SEQ ID NO: 8855 - protein, 249 aa, Homo sapiens
MGELMAFLLPLIIVLMVKHSDSRTHSLRYFRLGVSDPIHGVPEFISVGYVDSHPITTYDSVTRQKEPRAPWMAENLAPDHWERYTQLLRGWQQMFKVELKRLQRHYNHSGSHTYQRMIGCELLEDGSTTGFLQYAYDGQDFLIFNKDTLSWLAVDNVAHTIKQAWEANQHELLYQKNWLEEECIAWLKRFLEYGKDTLQRTESETIPLVMKAVSGSIVLVIVLAGVGVLVWRRRPREQNGAIYLPTPDR

SEQ ID NO: 8856 - protein, 249 aa, Homo sapiens; identical to SEQ ID NO: 8855

SEQ ID NO: 8857 - protein, 103 aa, Homo sapiens
MALCALTRALRSLNLAPPTVAAPAPSLFPAAQMMNNGLLQQPSALMLLPCRPVLTSVALNANFVSWKSRTKYTITPVKMRKSGGRDHTGAGNVRSNSRPSIQR

SEQ ID NO: 8858 - protein, 96 aa, Homo sapiens
MALCALTRALRSLNLAPPTVAAPAPSLFPAAQMMNNGLLQQPSALMLLPCRPVLTSVALNANFVSWKSRTKYTITPVKMRKSGGRDHTGGNKDRGI

SEQ ID NO: 8859 - protein, 225 aa, Homo sapiens
MALCALTRALRSLNLAPPTVAAPAPSLFPAAQMMNNGLLQQPSALMLLPCRPVLTSVALNANFVSWKSRTKYTITPVKMRKSGGRDHTGRIRVHGIGGGHKQRYRMIDFLRFRPEETKSGPFEEKVIQVRYDPCRSADIALVAGGSRKRWIIATENMQAGDTILNSNHIGRMAVAAREGDAHPLGALPVGTLINNVESEPGRGAQYIRAAGAGNVRSNSRPSIQR

SEQ ID NO: 8860 - protein, 305 aa, Homo sapiens [sequence omitted]

SEQ ID NO: 8861 - protein, 94 aa, Homo sapiens
MALCALTRALRSLNLAPPTVAAPAPSLFPAAQVIHLTREEGCFHSGCRRWGLRACEAGVASLVRSHADDEQWPPPTALCLDVAPLPPSSYFCGP

SEQ ID NO: 8862 - protein, 49 aa, Homo sapiens
MAASSLTVTLGRLASACSHSILRPSGPGAASLWSASRRFNSQSTSYLPG

SEQ ID NO: 8863 - protein, 49 aa, Homo sapiens; identical to SEQ ID NO: 8862

SEQ ID NO: 8864 - protein, 150 aa, Homo sapiens
MAASSLTVTLGRLASACSHSILRPSGPGAASLWSASRRFNSQSTSYLPGYVPKTSLSSPPWPEVVLPDPVEETRHHAEVVKKVNEMIVTGQYGRLFAVVHFASRQWKVTSEDLILIGNELDLACGERIRLEKVLLVGADNFTLLGKPLLG

SEQ ID NO: 8865 - protein, 205 aa, Homo sapiens
MAASSLTVTLGRLASACSHSILRPSGPGAASLWSASRRFNSQSTSYLPGYVPKTSLSSPPWPEVVLPDPVEETRHHAEVVKKVNEMIVTGQYGRLFAVVHFASRQWKVTSEDLILIGNELDLACGERIRLEKVLLVGADNFTLLGKPLLGKDLVRVEATVIEKTESWPRIIMRFRKRKNFKKKRIVTTPQTVLRINSIEIAPCLL

SEQ ID NO: 8866 - protein, 36 aa, Homo sapiens
MAASSLTVTLGRLASACSHSILRPSGPGADMFLKHP

SEQ ID NO: 8867 - protein, 120 aa, Homo sapiens
MIVTGQYGRLFAVVHFASRQWKVTSEDLILIGNELDLACGERIRLEKVLLVGADNFTLLGKPLLGKDLVRVEATVIEKTESWPRIIMRFRKRKNFKKKRIVTTPQTVLRINSIEIAPCLL

SEQ ID NO: 8868 - protein, 195 aa, Homo sapiens
MIVTGQYGRLFAVVHFASRQWKVTSEDLILIGNELDLACGERIRLEKVLLVGADNFTLLGKPLLGKDLVRVEATVIEKTESWPRIIMRFRKRKNFKKKRSKLEKVPLGPVARCWLPRRMRTEGVGHVGLGTGSPGRSQPGCHCPLATLILEGAPRGSSLAPLLLHAPRVTPPRSPSPPRSARDPTSLPFSSTLRA

SEQ ID NO: 8869 - protein, 38 aa, Homo sapiens
EMESELTACVDVAGALWIHNLRSRGKLALGKSTTVEDK

SEQ ID NO: 8870 - protein, 212 aa, Homo sapiens
MAAAVLGQLGALWIHNLRSRGKLALGLLSFHSVLPQSYIHTSASLDISRKWEKKNKIVYPPQLPGEPRRPAEIYHCRRQIKYSKDKMWYLAKLIRGMSIDQALAQLEFNDKKGAKIIKEVLLEAQDMAVRDHNVEFRSNLYIAESTSGRGQCLKRIRYHGRGRFGIMEKVYCHYFVKLVEGPPPPPEPPKTAVAHAKEYIQQLRSRTIVHTL

SEQ ID NO: 8871 - protein, 206 aa, Homo sapiens
MAAAVLGQLGALWIHNLRSRGKLALGVLPQSYIHTSASLDISRKWEKKNKIVYPPQLPGEPRRPAEIYHCRRQIKYSKDKMWYLAKLIRGMSIDQALAQLEFNDKKGAKIIKEVLLEAQDMAVRDHNVEFRSNLYIAESTSGRGQCLKRIRYHGRGRFGIMEKVYCHYFVKLVEGPPPPPEPPKTAVAHAKEYIQQLRSRTIVHTL

SEQ ID NO: 8872 - protein, 232 aa, Homo sapiens
MAAAVLGQLGKDFLVVKRQKGVEMESELTACVDVAGALWIHNLRSRGKLALGVLPQSYIHTSASLDISRKWEKKNKIVYPPQLPGEPRRPAEIYHCRRQIKYSKDKMWYLAKLIRGMSIDQALAQLEFNDKKGAKIIKEVLLEAQDMAVRDHNVEFRSNLYIAESTSGRGQCLKRIRYHGRGRFGIMEKVYCHYFVKLVEGPPPPPEPPKTAVAHAKEYIQQLRSRTIVHTL

SEQ ID NO: 8873 - protein, 126 aa, Homo sapiens
MWYLAKLIRGMSIDQALAQLEFNDKKGAKIIKEVLLEAQDMAVRDHNVEFRSNLYIAESTSGRGQCLKRIRYHGRGRFGIMEKVYCHYFVKLVEGPPPPPEPPKTAVAHAKEYIQQLRSRTIVHTL

SEQ ID NO: 8874 - protein, 68 aa, Homo sapiens
MRLSALLALASKVTLPPHYRYGMSPPGSVADKRKNPPWIRRRPVVVEPISDEDWYLFCGDTVEILEGK

SEQ ID NO: 8875 - protein, 99 aa, Homo sapiens
MRLSALLALASKVTLPPHYRYGMSPPGSVADKRKNPPWIRRRPVVVEPISDEDWYLFCGDTVEILEGKDAGKQGKVVQVIRQRNWVVVGGLNTHYRYIG

SEQ ID NO: 8876 - protein, 173 aa, Homo sapiens
MRLSALLALASKVTLPPHYRYGMSPPGSVADKRKNPPWIRRRPVVVEPISDEDWYLFCGDTVEILEGKDAGKQGKVVQVIRQRNWVVVGGLNTHYRYIGKTMDYRGTMIPSEAPLLHRQVKLVDPMDRKPTEIEWRFTEAGERVRVSTRSGRIIPKPEFPRADGIVPETWIDG

SEQ ID NO: 8877 - protein, 216 aa, Homo sapiens
MRLSALLALASKVTLPPHYRYGMSPPGSVADKRKNPPWIRRRPVVVEPISDEDWYLFCGDTVEILEGKDAGKQGKVVQVIRQRNWVVVGGLNTHYRYIGKTMDYRGTMIPSEAPLLHRQVKLVDPMDRKPTEIEWRFTEAGERVRVSTRSGRIIPKPEFPRADGIVPETWIDGPKDTSVEDALERTYVPCLKTLQEEVMEAMGIKETRKYKKVYWY

SEQ ID NO: 8878 - protein, 216 aa, Homo sapiens; identical to SEQ ID NO: 8877

SEQ ID NO: 8879 - protein, 148 aa, Homo sapiens
MASVVLALRTRTAVTSLLSPTPATALAVRYASKKSGGSSKNLGGKSSGRRQGIKKMEGHYVHAGNIIATQRHFRWHPGAHVGVGKNKCLYALEEGIVRYTKEVYVPHPRNTEAVDLITRLPKGAVLYKTFVHVVPAKPEGTFKLVAML

SEQ ID NO: 8880 - protein, 94 aa, Homo sapiens
MASVVLALRTRTAVTSLLSPTPATALAVRYASKKSGGSSKNLGGKSSGRRQGIKKMEGHYVHAGNIIATQRHFRWHPGAHVSCSVAAPLFPFLG

SEQ ID NO: 8881 - protein, 84 aa, Homo sapiens
MASVVLALRTRTAVTSLLSPTPATALAVRYASKKSGGSSKNLGGKSSGRRQGIKKMEGHYVHAGNIIATQRHFRWHPGAHWRWK

SEQ ID NO: 8882 - protein, 93 aa, Homo sapiens
MEGHYVHAGNIIATQRHFRWHPGAHVGVGKNKCLYALEEGIVRYTKEVYVPHPRNTEAVDLITRLPKGAVLYKTFVHVVPAKPEGTFKLVAML

SEQ ID NO: 8883 - protein, 93 aa, Homo sapiens; identical to SEQ ID NO: 8882

SEQ ID NO: 8884 - protein, 136 aa, Homo sapiens
  SITE 1: note = misc_feature - Xaa can be any naturally occurring amino acid
XSPTPATALAVRYASKKSGGSSKNLGGKSSGRRQGIKKMEGHYVHAGNIIATQRHFRWHPGAHVCVLQVGVGKNKCLYALEEGIVRYTKEVYVPHPRNTEAVDLITRLPKGAVLYKTFVHVVPAKPEGTFKLVAML

SEQ ID NO: 8885 - protein, 188 aa, Homo sapiens [sequence omitted]

SEQ ID NO: 8886 - protein, 107 aa, Homo sapiens
MALAMLVLVVSPWSAARGVLRNYWERLLRKLPQSRPGFPSPPWGPALAVQGPAMFTEPANDTSGSKENSSLLDSIFWMAAPKNRRTIEVNRCRRRNPQKLIKVKVMH

SEQ ID NO: 8887 - protein, 42 aa, Homo sapiens
  SITE 1: note = misc_feature - Xaa can be any naturally occurring amino acid
XENSSLLDSIFWMAAPKNRRTIEVNRCRRRNPQKLIKVKSSC

SEQ ID NO: 8888 - protein, 36 aa, Homo sapiens
MAVLAGSLLGPTSRLAGMSISRATSNARTSTAGSGA

SEQ ID NO: 8889 - protein, 92 aa, Homo sapiens [sequence omitted]

SEQ ID NO: 8890 - protein, 92 aa, Homo sapiens [sequence omitted]

SEQ ID NO: 8891 - protein, 92 aa, Homo sapiens [sequence omitted]

SEQ ID NO: 8892 - protein, 184 aa, Homo sapiens
MPRRPSGYFLSSGGAGSGSGRALGEGSGSQSRNSWSSVLTVSGHSSITMWLPSSMSFRNARSRICRRRRAQGLERLWAPESPAAGTAGPTADMAVLAGSLLGPTSRSAALLGGRWLQPRAWLGFPDAWGLPTPQQARGKARGNEYQPSNIKRKNKHGWVRRLSTPAGVQVILRRMLKGRKSLSH

SEQ ID NO: 8893 - protein, 95 aa, Homo sapiens
MAASAFAGAVRAASGILRPLNILASSTYRNCVKNASLISALSTGRFSHIQTPVVSSTPRLTTSERNLTCGHTSVILNRLAIRKNYGKRHLQGRSD

SEQ ID NO: 8894 - protein, 170 aa, Homo sapiens
MAASAFAGAVRAASGILRPLNILASSTYRNCVKNASLISALSTGRFSHIQTPVVSSTPRLTTSERNLTCGHTSVILNRMAPVLPSVLKLPVRSLTYFSARKGKRKTVKAVIDRFLRLHCGLWVRRKAGYKKKLWKKTPARKKRLREFVFCNKTQSKLLDKMTTSFWKRRN

SEQ ID NO: 8895 - protein, 177 aa, Homo sapiens
MAASAFAGAVRAASGILRPLNILASSTYRNCVKNASLISALSTGRFSHIQTPVVSSTPRLTTSERNLTCGHTSVILNRMAPVLPSVLKLPVRSLTYFSARKGKRKTVKAVIDRFLRLHCGLWVRRKAGYKKKLWKKTPARKKRLREFVFCNKTQSKLLDKMTTSFWKRRNWHSPICR

SEQ ID NO: 8896 - protein, 188 aa, Homo sapiens [sequence omitted]

SEQ ID NO: 8897 - protein, 122 aa, Homo sapiens
MAALGTVLFSVRRLHCSVAAWAGGQWRLQQGLAANPSGYGPLTELPDWSYADGRPAPPMKGQLRRKAERETFARRVVLLSQEMDAGLQAWQLRQQKLQEEQRKQENALKPKGASLKSPLPSQ

SEQ ID NO: 8898 - protein, 110 aa, Homo sapiens
MAALGTVLFSVRRLHCSVAAWAGGQWRLQQGLAANPSGYGPLTELPDWSYADGRPAPPMKGQLRRKAERETFAVSETSCTAVTGNGRWITSMAAQAAEVAGRTKEAGKCS

SEQ ID NO: 8899 - protein, 72 aa, Homo sapiens
MAALGTVLFSVRRLHCSVAAWAGGQWRLQQGLAANPSGYGPLTELPDWSYAETSCTAVTGNGRWITSMAAQA

SEQ ID NO: 8900 - protein, 123 aa, Homo sapiens
MAALGTVLFTGVRRLHCSVAAWAGGQWRLQQGLAANPSGYGPLTELPDWSYADGRPAPPMKGQLRRKAERETFARRVVLLSQEMDAGLQAWQLRQQKLQEEQRKQENALKPKGASLKSPLPSQ

SEQ ID NO: 8901 - protein, 87 aa, Homo sapiens
MAALGTVLFTGVRRLHCSVAAWAGGQWRLQQGLAANPSGYGPLTELPDWSYAETSCTAVTGNGRWITSMAAQAAEVAGRTKEAGKCS

SEQ ID NO: 8902 - protein, 64 aa, Homo sapiens
MKGQLRRKAERETFARRVVLLSQEMDAGLQAWQLRQQKLQEEQRKQENALKPKGASLKSPLPSQ

SEQ ID NO: 8903 - protein, 64 aa, Homo sapiens; identical to SEQ ID NO: 8902

SEQ ID NO: 8904 - protein, 64 aa, Homo sapiens; identical to SEQ ID NO: 8902

SEQ ID NO: 8905 - protein, 52 aa, Homo sapiens
MKGQLRRKAERETFAVSETSCTAVTGNGRWITSMAAQAAEVAGRTKEAGKCS

SEQ ID NO: 8906 - protein, 51 aa, Homo sapiens
MRRRVVLLSQEMDAGLQAWQLRQQKLQEEQRKQENALKPKGASLKSPLPSQ

SEQ ID NO: 8907 - protein, 52 aa, Homo sapiens
MVKIFSTCYLLDELYCCHRKWTLDYKHGSSGSRSCRKNKGSRKMLLNPKGLH

SEQ ID NO: 8908 - protein, 5 aa, Homo sapiens
MAAVG

SEQ ID NO: 8909 - protein, 9 aa, Homo sapiens
MAAVGSLLG

SEQ ID NO: 8910 - protein, 164 aa, Homo sapiens
MAAVGSLLGLAASSWLGGQNASDHSLWLLRKPRGSSCPGTGHQLCRLRQSTVKATGPALRRLHTSSWRADSSRASLTRVHRQAYARLYPVLLVKQDGSTIHIRYREPRRMLAMPIDLDTLSPEERRARLRKREAQLQSRKEYEQELSDDLHVERYRQFWTRTKK

SEQ ID NO: 8911 - protein, 164 aa, Homo sapiens; identical to SEQ ID NO: 8910

SEQ ID NO: 8912 - protein, 24 aa, Homo sapiens
MAAVGSLLGRLRQSTVKATGPALR

SEQ ID NO: 8913 - protein, 43 aa, Homo sapiens
MAAVGSLLGRLRQSTVKATGPALRRLHTSSWRADSSRASLTRV

SEQ ID NO: 8914 - protein, 76 aa, Homo sapiens
MAAVGSLLGRLRQSTVKATGPALRRLHTSSWRADSSRASLTRVHRQAYARLYPVLLVKQDGSTIHIRYREPRRMLA

SEQ ID NO: 8915 - protein, 128 aa, Homo sapiens
MAAVGSLLGRLRQSTVKATGPALRRLHTSSWRADSSRASLTRVHRQAYARLYPVLLVKQDGSTIHIRYREPRRMLAMPIDLDTLSPEERRARLRKREAQLQSRKEYEQELSDDLHVERYRQFWTRTKK

SEQ ID NO: 8916 - protein, 128 aa, Homo sapiens; identical to SEQ ID NO: 8915

SEQ ID NO: 8917 - protein, 128 aa, Homo sapiens; identical to SEQ ID NO: 8915

SEQ ID NO: 8918 - protein, 128 aa, Homo sapiens; identical to SEQ ID NO: 8915

SEQ ID NO: 8919 - protein, 128 aa, Homo sapiens; identical to SEQ ID NO: 8915

SEQ ID NO: 8920 - protein, 128 aa, Homo sapiens; identical to SEQ ID NO: 8915

SEQ ID NO: 8921 - protein, 128 aa, Homo sapiens; identical to SEQ ID NO: 8915

SEQ ID NO: 8922 - protein, 128 aa, Homo sapiens; identical to SEQ ID NO: 8915

SEQ ID NO: 8923 - protein, 128 aa, Homo sapiens; identical to SEQ ID NO: 8915

SEQ ID NO: 8924 - protein, 128 aa, Homo sapiens; identical to SEQ ID NO: 8915

SEQ ID NO: 8925 - protein, 128 aa, Homo sapiens; identical to SEQ ID NO: 8915

SEQ ID NO: 8926 - protein, 128 aa, Homo sapiens; identical to SEQ ID NO: 8915

SEQ ID NO: 8927 - protein, 128 aa, Homo sapiens; identical to SEQ ID NO: 8915

SEQ ID NO: 8928 - protein, 128 aa, Homo sapiens; identical to SEQ ID NO: 8915

SEQ ID NO: 8929 - protein, 128 aa, Homo sapiens; identical to SEQ ID NO: 8915

SEQ ID NO: 8930 - protein, 128 aa, Homo sapiens; identical to SEQ ID NO: 8915

SEQ ID NO: 8931 - protein, 55 aa, Homo sapiens
MLAMPIDLDTLSPEERRARLRKREAQLQSRKEYEQELSDDLHVERYRQFWTRTKK

SEQ ID NO: 8932 - protein, 55 aa, Homo sapiens; identical to SEQ ID NO: 8931

SEQ ID NO: 8933 - protein, 55 aa, Homo sapiens; identical to SEQ ID NO: 8931

SEQ ID NO: 8934 - protein, 128 aa, Homo sapiens
MAAFMLGSLLRTFKQMVPSSASGQVRSHYVDWRMWRDVKRRKMAYEYADERLRINSLRKNTILPKILQDVADEEIAALPRDSCPVRIRNRCVMTSRPRGVKRRWRLSRIVFRHLADHGQLSGIQRATW

SEQ ID NO: 8935 - protein, 60 aa, Homo sapiens
MAAFMLGSLLRTFKQVRPLLLSTPLPLTAESHNPRVPHGSATCSARWFLHQLQAKFEVTM

SEQ ID NO: 8936 - protein, 200 aa, Homo sapiens
GTTVLLWSLLRSSPGVERVCFRARIQPWHGGLLQPLPCSFEMGLPRRRFSSEAASYLLKSILAESGSPETKKPTFMDEEVQSILTKMTGLNLQKTFKPAIQELKPPTYKLMTQAQLEEATRQAVEAAKVRLKMPPVLEERVPINDVLAEDKILEGTETTKYVFTDISYSIPHRERFIVVREPSGTLRKASWEERDRMIQV

SEQ ID NO: 8937 - protein, 360 aa, Homo sapiens
MAPLGTTVLLWSLLRSSPGVERVCFRARIQPWHGGLLQPLPCSFEMGLPRRRFSSEAAESGSPETKKPTFMDEEVQSILTKMTGLNLQKTFKPAIQELKPPTYKLMTQAQLEEATRQAVEAAKVRLKMPPVLEERVPINDVLAEDKILEGTETTKYVFTDISYSIPHRERFIVVREPSGTLRKASWEERDRMIQVYFPKEGRKILTPIIFKEENLRTMYSQDRHVDVLNLCFAQFEPDSTEYIKVHHKTYEDIDKRGKYDLLRSTRYFGGMVWYFVNNKKIDGLLIDQIQRDLIDDATNLVQLYHVLHPDGQSAQGAKDQAAEGINLIKVFAKTEAQKGAYIELTLQTYQEALSRHSAAS

SEQ ID NO: 8938 - protein, 360 aa, Homo sapiens; identical to SEQ ID NO: 8937

SEQ ID NO: 8939 - protein, 168 aa, Homo sapiens
MAPLGTTVLLWSLLRSSPGVERVCFRARIQPWHGGLLQPLPCSFEMGLPRRRFSSEAESGSPETKKPTFMDEEVQSILTKMTGLNLQKTFKPAIQELKPPTYKLMTQAQLEEATRQAVEAAKVRLKMPPVLEERVPINDVLAEDKILEGTETTKYVFTDISYSIPHRC

SEQ ID NO: 8940 - protein, 359 aa, Homo sapiens
MAPLGTTVLLWSLLRSSPGVERVCFRARIQPWHGGLLQPLPCSFEMGLPRRRFSSEAESGSPETKKPTFMDEEVQSILTKMTGLNLQKTFKPAIQELKPPTYKLMTQAQLEEATRQAVEAAKVRLKMPPVLEERVPINDVLAEDKILEGTETTKYVFTDISYSIPHRERFIVVREPSGTLRKASWEERDRMIQVYFPKEGRKILTPIIFKEENLRTMYSQDRHVDVLNLCFAQFEPDSTEYIKVHHKTYEDIDKRGKYDLLRSTRYFGGMVWYFVNNKKIDGLLIDQIQRDLIDDATNLVQLYHVLHPDGQSAQGAKDQAAEGINLIKVFAKTEAQKGAYIELTLQTYQEALSRHSAAS

SEQ ID NO: 8941 - protein, 319 aa, Homo sapiens
MSRNETEHRYLGTHFGAESGSPETKKPTFMDEEVQSILTKMTGLNLQKTFKPAIQELKPPTYKLMTQAQLEEATRQAVEAAKVRLKMPPVLEERVPINDVLAEDKILEGTETTKYVFTDISYSIPHRERFIVVREPSGTLRKASWEERDRMIQVYFPKEGRKILTPIIFKEENLRTMYSQDRHVDVLNLCFAQFEPDSTEYIKVHHKTYEDIDKRGKYDLLRSTRYFGGMVWYFVNNKKIDGLLIDQIQRDLIDDATNLVQLYHVLHPDGQSAQGAKDQAAEGINLIKVFAKTEAQKGAYIELTLQTYQEALSRHSAAS

SEQ ID NO: 8942 - protein, 51 aa, Homo sapiens
MVQTGRSEGIPGWEQSMSKGREIPGSDSESGSPETKKPTFMDEEVQSILTK

SEQ ID NO: 8943 - protein, 121 aa, Homo sapiens
  SITE 1: note = misc_feature - Xaa can be any naturally occurring amino acid
XKYVFTDISYSIPHRERFIVVREPSGTLRKASWEERDRMIQVYFPKEGRKILTPIIFKEENLRFEPDSTEYIKVHHKTYEDIDKRGKYDLLRSTRYFGGMVWYFVNNKKIDGLLIDQIQRD

SEQ ID NO: 8944 - protein, 165 aa, Homo sapiens
  SITE 1: note = misc_feature - Xaa can be any naturally occurring amino acid
XTTVLLWSLLRSSPGVERVCFRARIQPWHGGLLQPLPCSFEMGLPRRRFSSEAAESGSPETKKPTFMDEEVQSILTKMTGLNLQKTFKPAIQELKPPTYKLMTQAQLEEATRQAVEAAKVRLKMPPVLEERVPINDVLAEDKILEGTETTKYVFTDISYSIPHRC

SEQ ID NO: 8945 - protein, 86 aa, Homo sapiens
MAALCRTRAVAAESHFLRVFLFFRPFRGVGTESGSESGSSNAKEPKTRAGGFASALERHSELLQKVEPLQKEIPERNQGPVAAIRS

SEQ ID NO: 8946 - protein, 187 aa, Homo sapiens
MAALCRTRAVAAESHFLRVFLFFRPFRGVGTESGSESGSSNAKEPKTRAGGFASALERHSELLQKVEPLQKGSPKNVESFASMLRHSPLTQMGPAKDKLVIGRIFHIVENDLYIDFGGKFHCVCRRPEVDGEKYQKGTRVRLRLLDLELTSRFLGATTDTTVLEANAVLLGIQESKDSRSKEEHHEK

SEQ ID NO: 8947 - protein, 109 aa, Homo sapiens
MLPRLVLNSWVQVILLRWPPKVLGLQMTDMGPAKDKLVIGRIFHIVENDLYIDFGGKFHCVCRRPEVDGEKYQKGTRVRLRLLDLELTSRFLGATTDTTVLEANAVLLG

SEQ ID NO: 8948 - protein, 125 aa, Homo sapiens
MLPRLVLNSWVQVILLRWPPKVLGLQMTDMGPAKDKLVIGRIFHIVENDLYIDFGGKFHCVCRRPEVDGEKYQKGTRVRLRLLDLELTSRFLGATTDTTVLEANAVLLGIQESKDSRSKEEHHEK

SEQ ID NO: 8949 - protein, 103 aa, Homo sapiens
MLRHSPLTQMGPAKDKLVIGRIFHIVENDLYIDFGGKFHCVCRRPEVDGEKYQKGTRVRLRLLDLELTSRFLGATTDTTVLEANAVLLGIQESKDSRSKEEHH

SEQ ID NO: 8950 - protein, 143 aa, Homo sapiens
  SITE 1: note = misc_feature - Xaa can be any naturally occurring amino acid
XFCVAFAYWAGSVHTALVFLGLNAGGKGSPKNVESFASMLRHSPLTQMGPAKDKLVIGRIFHIVENDLYIDFGGKFHCVCRRPEVDGEKYQKGTRVRLRLLDLELTSRFLGATTDTTVLEANAVLLGIQESKDSRSKEEHHEK

SEQ ID NO: 8951 - protein, 83 aa, Homo sapiens
  SITE 1: note = misc_feature - Xaa can be any naturally occurring amino acid
XMLRHSPLTQMGPAKDKLVIGRIFHIVENDLYIDFGGKFHCVCRRPEVDGESPISWYAVWRRFSQVMITCFSSNSDFGKHRKR

SEQ ID NO: 8952 - protein, 163 aa, Homo sapiens
  SITE 1: note = misc_feature - Xaa can be any naturally occurring amino acid
XTRAVAAESHFLRVFLFFRPFRGVGTESGSESGSSNAKEPKTRAGGFASALERHSELLQKRWGFAMLPRLVLNSWVQVILLRWPPKVLGLQMTDGSPKNVESFASMLRHSPLTQMGPAKDKLVIGRIFHIVENDLYIDFGGKFHCVCRRPEVDGEKYQKGTRV

SEQ ID NO: 8953 - protein, 170 aa, Homo sapiens
MESTSQDRRATHVITIKPNETVLTAFPYRPHSSLLDFLKGEPRVLGATQILLALIIVGFGTIFALNYIGFSQRLPLVVLTGYPFWGALIFILTGYLTVTDKKSKLLGQGVTGMNVISSLVAITGITFTILSYRHQDKYCQMPSFEEICVFSRTLFIDFILLTPPHSSHFL

SEQ ID NO: 8954 - protein, 712 aa, Homo sapiens
MESTSQDRRATHVITIKPNETVLTAFPYRPHSSLLDFLKGEPRVLGATQILLALIIVGFGTIFALNYIGFSQRLPLVVLTGYPFWGALIFILTGYLTVTDKKSKLLGQGVTGMNVISSLVAITGITFTILSYRHQDKYCQMPSFEEICVFSRTLFIGILLILLIISIAELSISVTIASFRSKCWTQSDEVLFFLPSDVTQNSEQPAPEENDQLQFVLQEEFSSDDSTTNAQSVIFGGYAFFKLTLSRSPLVSQPGNKGREFVPDEQKQSILPSPKFSEEEIEPLPPTLEKKPSENMSIQLDSTFKQMKDEDLQSAIVQPSQMQTKLLQDQAASLQVFPSHSALKLEDISPEDLPSQALPVEGLSEQTMPSKSTSSHVKQSSNLTANDLPPQGILSQDTSSQDMLFHDMTSQDMQSLDMLSQDTPSHAMPPQDIPSQDMLSQALSAHAILPEASTSHIVQFPEIQHLLQQPPDLQPENTEPQNQQILQMSYQDIRSEVMEETKEWKSEEELHRRKSSRRHSLNQQTKALQYLRRHSLDVQAKGQKSSKRHSLDQQSKGWQSPKQKSLDQQIKDWLSPKRHSVDKQAQLNQTKEQLPDQQAEDQQAKGEQYPEGQSKDGQVKDQQTDKEQNSKKQTQDQQTEDQPAQEKKSPKGQFQNVQAEGQQAQVEKVPKLLCQDSESQIQQYQFWQFHKGNLQAGQPRTVNLLAKNPLTG

SEQ ID NO: 8955 - protein, 679 aa, Homo sapiens
MESTSQDRRATHVITIKPNETVLTAFPYRPHSSLLDFLKGEPRVLGATQILLALIIVGFGTIFALNYIGFSQRLPLVVLTGYPFWGALIFILTGYLTVTDKKSKLLGQGVTGMNVISSLVAITGITFTILSYRHQDKYCQMPSFEEICVFSRTLFIVLFFLPSDVTQNSEQPAPEENDQLQFVLQEEFSSDDSTTNAQSVIFGGYAFFKLTLSRSPLVSQPGNKGREFVPDEQKQSILPSPKFSEEEIEPLPPTLEKKPSENMSIQLDSTFKQMKDEDLQSAIVQPSQMQTKLLQDQAASLQVFPSHSALKLEDISPEDLPSQALPVEGLSEQTMPSKSTSSHVKQSSNLTANDLPPQGILSQDTSSQDMLFHDMTSQDMQSLDMLSQDTPSHAMPPQDIPSQDMLSQALSAHAILPEASTSHIVQFPEIQHLLQQPPDLQPENTEPQNQQILQMSYQDIRSEVMEETKEWKSEEELHRRKSSRRHSLNQQTKALQYLRRHSLDVQAKGQKSSKRHSLDQQSKGWQSPKQKSLDQQIKDWLSPKRHSVDKQAQLNQTKEQLPDQQAEDQQAKGEQYPEGQSKDGQVKDQQTDKEQNSKKQTQDQQTEDQPAQEKKSPKGQFQNVQAEGQQAQVEKVPKLLCQDSESQIQQYQFWQFHKGNLQAGQPRTVNLLAKNPLTG

SEQ ID NO: 8956 - protein, 153 aa, Homo sapiens
MESTSQDRRATHVITIKPNETVLTAFPYRPHSSLLDFLKGEPRVLGATQILLALIIVGFGTIFALNYIGFSQRLPLVVLTGYPFWGALIGQGVTGMNVISSLVAITGITFTILSYRHQDKYCQMPSFEEICVFSRTLFIDFILLTPPHSSHFL

SEQ ID NO: 8957 - protein, 153 aa, Homo sapiens; identical to SEQ ID NO: 8956

SEQ ID NO: 8958 - protein, 148 aa, Homo sapiens
MESTSQDRRATHVITIKPNETVLTAFPYRPHSSLLDFLKGEPRVLGATQILLALIIVGFGTIFALNYIGFSQRLPLVVLTGYPFWGALIGQGVTGMNVISSLVAITGITFTILSYRHQDKYCQMPSFEEICVFSRTLFIGILLILLII

SEQ ID NO: 8959 - protein, 695 aa, Homo sapiens
MESTSQDRRATHVITIKPNETVLTAFPYRPHSSLLDFLKGEPRVLGATQILLALIIVGFGTIFALNYIGFSQRLPLVVLTGYPFWGALIGQGVTGMNVISSLVAITGITFTILSYRHQDKYCQMPSFEEICVFSRTLFIGILLILLIISIAELSISVTIASFRSKCWTQSDEVLFFLPSDVTQNSEQPAPEENDQLQFVLQEEFSSDDSTTNAQSVIFGGYAFFKLTLSRSPLVSQPGNKGREFVPDEQKQSILPSPKFSEEEIEPLPPTLEKKPSENMSIQLDSTFKQMKDEDLQSAIVQPSQMQTKLLQDQAASLQVFPSHSALKLEDISPEDLPSQALPVEGLSEQTMPSKSTSSHVKQSSNLTANDLPPQGILSQDTSSQDMLFHDMTSQDMQSLDMLSQDTPSHAMPPQDIPSQDMLSQALSAHAILPEASTSHIVQFPEIQHLLQQPPDLQPENTEPQNQQILQMSYQDIRSEVMEETKEWKSEEELHRRKSSRRHSLNQQTKALQYLRRHSLDVQAKGQKSSKRHSLDQQSKGWQSPKQKSLDQQIKDWLSPKRHSVDKQAQLNQTKEQLPDQQAEDQQAKGEQYPEGQSKDGQVKDQQTDKEQNSKKQTQDQQTEDQPAQEKKSPKGQFQNVQAEGQQAQVEKVPKLLCQDSESQIQQYQFWQFHKGNLQAGQPRTVNLLAKNPLTG

SEQ ID NO: 8960 - protein, 662 aa, Homo sapiens
MESTSQDRRATHVITIKPNETVLTAFPYRPHSSLLDFLKGEPRVLGATQILLALIIVGFGTIFALNYIGFSQRLPLVVLTGYPFWGALIGQGVTGMNVISSLVAITGITFTILSYRHQDKYCQMPSFEEICVFSRTLFIVLFFLPSDVTQNSEQPAPEENDQLQFVLQEEFSSDDSTTNAQSVIFGGYAFFKLTLSRSPLVSQPGNKGREFVPDEQKQSILPSPKFSEEEIEPLPPTLEKKPSENMSIQLDSTFKQMKDEDLQSAIVQPSQMQTKLLQDQAASLQVFPSHSALKLEDISPEDLPSQALPVEGLSEQTMPSKSTSSHVKQSSNLTANDLPPQGILSQDTSSQDMLFHDMTSQDMQSLDMLSQDTPSHAMPPQDIPSQDMLSQALSAHAILPEASTSHIVQFPEIQHLLQQPPDLQPENTEPQNQQILQMSYQDIRSEVMEETKEWKSEEELHRRKSSRRHSLNQQTKALQYLRRHSLDVQAKGQKSSKRHSLDQQSKGWQSPKQKSLDQQIKDWLSPKRHSVDKQAQLNQTKEQLPDQQAEDQQAKGEQYPEGQSKDGQVKDQQTDKEQNSKKQTQDQQTEDQPAQEKKSPKGQFQNVQAEGQQAQVEKVPKLLCQDSESQIQQYQFWQFHKGNLQAGQPRTVNLLAKNPLTG

SEQ ID NO: 8961 - protein, 94 aa, Homo sapiens
MESTSQDRRATHVITIKPNETVLTAFPYRPHSSLLDFLKGEPRVLGATQILLALIIVGFGTIFALNYIGFSQRLPLVVLTGYPFWGALIVSTVD

SEQ ID NO: 8962 - protein, 567 aa, Homo sapiens
MNVISSLVAITGITFTILSYRHQDKYCQMPSFEEICVFSRTLFIVLFFLPSDVTQNSEQPAPEENDQLQFVLQEEFSSDDSTTNAQSVIFGGYAFFKLTLSRSPLVSQPGNKGREFVPDEQKQSILPSPKFSEEEIEPLPPTLEKKPSENMSIQLDSTFKQMKDEDLQSAIVQPSQMQTKLLQDQAASLQVFPSHSALKLEDISPEDLPSQALPVEGLSEQTMPSKSTSSHVKQSSNLTANDLPPQGILSQDTSSQDMLFHDMTSQDMQSLDMLSQDTPSHAMPPQDIPSQDMLSQALSAHAILPEASTSHIVQFPEIQHLLQQPPDLQPENTEPQNQQILQMSYQDIRSEVMEETKEWKSEEELHRRKSSRRHSLNQQTKALQYLRRHSLDVQAKGQKSSKRHSLDQQSKGWQSPKQKSLDQQIKDWLSPKRHSVDKQAQLNQTKEQLPDQQAEDQQAKGEQYPEGQSKDGQVKDQQTDKEQNSKKQTQDQQTEDQPAQEKKSPKGQFQNVQAEGQQAQVEKVPKLLCQDSESQIQQYQFWQFHKGNLQAGQPRTVNLLAKNPLTG

SEQ ID NO: 8963 - protein, 139 aa, Homo sapiens
  SITE 1: note = misc_feature - Xaa can be any naturally occurring amino acid
XRVLGATQILLALIIVGFGTIFALNYIGFSQRLPLVVLTGYPFWGALIFILTGYLTVTDKKSKLLGQGVTGMNVISSLVAITGITFTILSYRHQDKYCQMPSFEEICVFSRTLFIVSGLILHEESLKSSLNCVHDVMIH

SEQ ID NO: 8964 - protein, 214 aa, Homo sapiens
MASHEVDNAELGSASAHGTPGSEAGPEELNTSVYQPIDGSPDYQKAKLQVLGAIQILNAAMILALGVFLGSLQYPYHFQKHFFFFTFYTGYPIWGAVFFCSSGTLSVVAGIKPTRTWIQNSFGMNIASATIALVGTAFLSLNIAVNIQSLRSCHSSSESPDLCNYMGSISNGMVSLLLILTLLELCVTISTIAMWCNANCCNSREEISSPPNSV

SEQ ID NO: 8965 - protein, 168 aa, Homo sapiens
MASHEVDNAELGSASAHGTPGSEAGPEELNTSVYQPIDGSPDYQKAKLQVLGFCSSGTLSVVAGIKPTRTWIQNSFGMNIASATIALVGTAFLSLNIAVNIQSLRSCHSSSESPDLCNYMGSISNGMVSLLLILTLLELCVTISTIAMWCNANCCNSREEISSPPNSV

SEQ ID NO: 8966 - protein, 168 aa, Homo sapiens; identical to SEQ ID NO: 8965

SEQ ID NO: 8967 - protein, 83 aa, Homo sapiens
MASHEVDNAELGSASAHGTPGSEAGPEELNTSVYQPIDGSPDYQKAKLQVLGSIQREEDEDEDLYDNLLPLNEYSVVQEPCLL

SEQ ID NO: 8968 - protein, 91 aa, Homo sapiens
MNIASATIALVGTAFLSLNIAVNIQSLRSCHSSSESPDLCNYMGSISNGMVSLLLILTLLELCVTISTIAMWCNANCCNSREEISSPPNSV

SEQ ID NO: 8969 - protein, 1137 aa, Homo sapiens
MSRRKPASGGLAASSSAPARQAVLSRFFQSTGSLKSTSSSTGAADQVDPGAAAAAAAAAAAAPPAPPAPAFPPQLPPHIATEIDRRKKRPLENDGPVKKKVKKVQQKEGGSDLGMSGNSEPKKCLRTRNVSKSLEKLKEFCCDSALPQSRVQTESLQERFAVLPKCTDFDDISLLHAKNAVSSEDSKRQINQKDTTLFDLSQFGSSNTSHENLQKTASKSANKRSKSIYTPLELQYIEMKQQHKDAVLCVECGYKYRFFGEDAEIAARELNIYCHLDHNFMTASIPTHRLFVHVRRLVAKGYKVGVVKQTETAALKAIGDNRSSLFSRKLTALYTKSTLIGEDVNPLIKLDDAVNVDEIMTDTSTSYLLCISENKENVRDKKKGNIFIGIVGVQPATGEVVFDSFQDSASRSELETRMSSLQPVELLLPSALSEQTEALIHRATSVSVQDDRIRVERMDNIYFEYSHAFQAVTEFYAKDTVDIKGSQIISGIVNLEKPVICSLAAIIKYLKEFNLEKMLSKPENFKQLSSKMEFMTINGTTLRNLEILQNQTDMKTKGSLLWVLDHTKTSFGRRKLKKWVTQPLLKLREINARLDAVSEVLHSESSVFGQIENHLRKLPDIERGLCSIYHKKCSTQEFFLIVKTLYHLKSEFQAIIPAVNSHIQSDLLRTVILEIPELLSPVEHYLKILNEQAAKVGDKTELFKDLSDFPLIKKRKDEIQGVIDEIRMHLQEIRKILKNPSAQYVTVSGQEFMIEIKNSAVSCIPTDWVKVGSTKAVSRFHSPFIVENYRHLNQLREQLVLDCSAEWLDFLEKFSEHYHSLCKAVHHLATVDCIFSLAKVAKQGDYCRPTVQEERKIVIKNGRHPVIDVLLGEQDQYVPNNTDLSEDSERVMIITGPNMGGKSSYIKQVALITIMAQIGSYVPAEEATIGIVDGIFTRMGAADNIYKGQSTFMEELTDTAEIIRKATSQSLVILDELGRGTSTHDGIAIAYATLEYFIRDVKSLTLFVTHYPPVCELEKNYSHQVGNYHMGFLVSEDESKLDPGAAEQVPDFVTFLYQITRGIAARSYGLNVAKLADVPGEILKKAAHKSKELEGLINTKRKRLKYFAKLWTMHNAQDLQKWTEEFNMEETQTSLLH

SEQ ID NO: 8970 - protein, 166 aa, Homo sapiens
GYSRPRYSPQVLGVRIQNGRHPLMELCARTFVPNSTECGGDKGRVKVITGPNSSGKSIYLKQVAKAVNNATAQSLVLIDEFGKGTNTVDGLALLAAVLRHWLARGPTCPHIFVATNFLSLVQLQLLPQGPLVQYLDWPRVSGQEGGLRRCCEGQPCLPHSCPGWAS

SEQ ID NO: 8971 - protein, 333 aa, Homo sapiens
KILFLSSIIPFDCLLTVRALGGLLKFLGRRRIGVELEDYNVSVPILGFKKFMLTHLVNIDQDTYSVLQIFKSESHPSVYKVASGLKEGLSLFGILNRCHCKWGEKLLRLWFTRPTHDLGELSSRLDVIQFFLLPQNLDMAQMLHRLLGHIKNVPLILKRMKLSHTKVSDWQVLYKTVYSALGLRDACRSLPQSIQLFRDIAQEFSDDLHHIASLIGKVYLSPQVDFEGSLAENRFTVLPNIDPEIDEKKRRLMGLPSFLTEVARKELENLDSRIPSCSVIYIPLIGFLLSIPRLPSMVEASDFEINGLDFMFLSEEKLHYRSARTKELDALLG

SEQ ID NO: 8972 - protein, 822 aa, Homo sapiens
MASLGANPRRTPQGPRPGAASSGFPSPAPVPGPREAEEEEVEEEEELAEIHLCVLWNSGYLGIAYYDTSDSTIHFMPDAPDHESLKLLQRVLDEINPQSVVTSAKQDENMTRFLGKLASQEHREPKRPEIIFLPSVDFGLEISKQRLLSGNYSFIPDAMTATEKILFLSSIIPFDCLLTPPGDLRFTPIPLLIPSQVRALGGLLKFLGRRRIGVELEDYNVSVPILGFKKFMLTHLVNIDQDTYSVLQIFKSESHPSVYKVASGLKEGLSLFGILNRCHCKWGEKLLRLWFTRPTHDLGELSSRLDVIQFFLLPQNLDMAQMLHRLLGHIKNVPLILKRMKLSHTKVSDWQVLYKTVYSALGLRDACRSLPQSIQLFRDIAQEFSDDLHHIASLIGKVVDFEGSLAENRFTVLPNIDPEIDEKKRRLMGLPSFLTEVARKELENLDSRIPSCSVIYIPLIGFLLSIPRLPSMVEASDFEINGLDFMFLSEEKLHYRSARTKELDALLGDLHCEIRDQETLLMYQLQCQVLARAAVLTRVLDLASRLDVLLALASAARDYGYSRPRYSPQVLGVRIQNGRHPLMELCARTFVPNSTECGGDKGRVKVITGPNSSGKSIYLKQVGLITFMALVGSFVPAEEAEIGAVDAIFTRIHSCESISLGLSTFMIDLNQQVAKAVNNATAQSLVLIDEFGKGTNTVDGLALLAAVLRHWLARGPTCPHIFVATNFLSLVQLQLLPQGPLVQYLTMETCEDGNDLVFFYQVSDLIRSGKPIKPVKDLLKKNQMENCQTLVDKFMKLDLEDPNLDLNVFMSQEVLPAATSIL

SEQ ID NO: 8973 - protein, 194 aa, Homo sapiens
MASLGANPRRTPQGPRPGAASSGFPSPAPVPGPREAEEEEVEEEEELAEIHLCVLWNSGYLGIAYYDTSDSTIHFMPDAPDHESLKLLQRVLDEINPQSVVTSAKQDENMTRFLGKLASQEHREPKRPEIIFLPSVDFGLEISKQRLLSGNYSFIPDAMTATEKILFLSSIIPFDCLLTVRALGGLLKFLGRRR

SEQ ID NO: 8974 - protein, 834 aa, Homo sapiens
MASLGANPRRTPQGPRPGAASSGFPSPAPVPGPREAEEEEVEEEEELAEIHLCVLWNSGYLGIAYYDTSDSTIHFMPDAPDHESLKLLQRVLDEINPQSVVTSAKQDENMTRFLGKLASQEHREPKRPEIIFLPSVDFGLEISKQRLLSGNYSFIPDAMTATEKILFLSSIIPFDCLLTVRALGGLLKFLGRRRIGVELEDYNVSVPILGFKKFMLTHLVNIDQDTYSVLQIFKSESHPSVYKVASGLKEGLSLFGILNRCHCKWGEKLLRLWFTRPTHDLGELSSRLDVIQFFLLPQNLDMAQMLHRLLGHIKNVPLILKRMKLSHTKVSDWQVLYKTVYSALGLRDACRSLPQSIQLFRDIAQEFSDDLHHIASLIGKVVDFEGSLAENRFTVLPNIDPEIDEKKRRLMGLPSFLTEVARKELENLDSRIPSCSVIYIPLIGFLLSIPRLPSMVEASDFEINGLDFMFLSEEKLHYRSARTKELDALLGDLHCEIRDQETLLMYQLQCQVLARAAVLTRVLDLASRLDVLLALASAARDYGYSRPRYSPQVLGVRIQNGRHPLMELCARTFVPNSTECGGDKGRVKVITGPNSSGKSIYLKQVGLITFMALVGSFVPAEEAEIGAVDAIFTRIHSCESISLGLSTFMIDLNQVAKAVNNATAQSLVLIDEFGKGTNTVDGLALLAAVLRHWLARGPTCPHIFVATNFLSLVQLQLLPQGPLVQYLTMETCEDGNDLVFFYQVCEGVAKASHASHTAAQAGLPDKLVARGKEVSDLIRSGKPIKPVKDLLKKNQMENCQTLVDKFMKLDLEDPNLDLNVFMSQEVLPAATSIL

SEQ ID NO: 8975 - protein, 835 aa, Homo sapiens
MASLGANPRRTPQGPRPGAASSGFPSPAPVPGPREAEEEEVEEEEELAEIHLCVLWNSGYLGIAYYDTSDSTIHFMPDAPDHESLKLLQRVLDEINPQSVVTSAKQDENMTRFLGKLASQEHREPKRPEIIFLPSVDFGLEISKQRLLSGNYSFIPDAMTATEKILFLSSIIPFDCLLTVRALGGLLKFLGRRRIGVELEDYNVSVPILGFKKFMLTHLVNIDQDTYSVLQIFKSESHPSVYKVASGLKEGLSLFGILNRCHCKWGEKLLRLWFTRPTHDLGELSSRLDVIQFFLLPQNLDMAQMLHRLLGHIKNVPLILKRMKLSHTKVSDWQVLYKTVYSALGLRDACRSLPQSIQLFRDIAQEFSDDLHHIASLIGKVVDFEGSLAENRFTVLPNIDPEIDEKKRRLMGLPSFLTEVARKELENLDSRIPSCSVIYIPLIGFLLSIPRLPSMVEASDFEINGLDFMFLSEEKLHYRSARTKELDALLGDLHCEIRDQETLLMYQLQCQVLARAAVLTRVLDLASRLDVLLALASAARDYGYSRPRYSPQVLGVRIQNGRHPLMELCARTFVPNSTECGGDKGRVKVITGPNSSGKSIYLKQVGLITFMALVGSFVPAEEAEIGAVDAIFTRIHSCESISLGLSTFMIDLNQQVAKAVNNATAQSLVLIDEFGKGTNTVDGLALLAAVLRHWLARGPTCPHIFVATNFLSLVQLQLLPQGPLVQYLTMETCEDGNDLVFFYQVCEGVAKASHASHTAAQAGLPDKLVARGKEVSDLIRSGKPIKPVKDLLKKNQMENCQTLVDKFMKLDLEDPNLDLNVFMSQEVLPAATSIL

SEQ ID NO: 8976 - protein, 834 aa, Homo sapiens; identical to SEQ ID NO: 8974

SEQ ID NO: 8977 - protein, 637 aa, Homo sapiens
MASLGANPRRTPQGPRPGAASSGFPSPAPVPGPREAEEEEVEEEEELAEIHLCVLWNSGYLGIAYYDTSDSTIHFMPDAPDHESLKLLQRVLDEINPQSVVTSAKQDENMTRFLGKLASQEHREPKRPEIIFLPSVDFGLEISKQRLLSGNYSFIPDAMTATEKILFLSSIIPFDCLLTVRALGGLLKFLGRRRIGVELEDYNVSVPILGFKKFMLTHLVNIDQDTYSVLQIFKSESHPSVYKVASGLKEGLSLFGILNRCHCKWGEKLLRLWFTRPTHDLGELSSRLDVIQFFLLPQNLDMAQMLHRLLGHIKNVPLILKRMKLSHTKVSDWQVLYKTVYSALGLRDACRSLPQSIQLFRDIAQEFSDDLHHIASLIGKVVDFEGSLAENRFTVLPNIDPEIDEKKRRLMGLPSFLTEVARKELENLDSRIPSCSVIYIPLIGFLLSIPRLPSMVEASDFEINGLDFMFLSEEKLHYRSARTKELDALLGDLHCEIRDQETLLMYQLQCQVLARAAVLTRVLDLASRLDVLLALASAARDYGYSRPRYSPQVLGVRIQNGRHPLMELCARTFVPNSTECGGDKGRVKVITGPNSSGKSIYLKQLRIHLPWPLHLHDRPQPGGESSEQCHCTVAGPY

SEQ ID NO: 8978 - protein, 508 aa, Homo sapiens
MWPVLLFVFLSQTVYSALGLRDACRSLPQSIQLFRDIAQEFSDDLHHIASLIGKVVDFEGSLAENRFTVLPNIDPEIDEKKRRLMGLPSFLTEVARKELENLDSRIPSCSVIYIPLIGFLLSIPRLPSMVEASDFEINGLDFMFLSEEKLHYRSARTKELDALLGDLHCEIRDQETLLMYQLQCQVLARAAVLTRVLDLASRLDVLLALASAARDYGYSRPRYSPQVLGVRIQNGRHPLMELCARTFVPNSTECGGDKGRVKVITGPNSSGKSIYLKQVGLITFMALVGSFVPAEEAEIGAVDAIFTRIHSCESISLGLSTFMIDLNQVAKAVNNATAQSLVLIDEFGKGTNTVDGLALLAAVLRHWLARGPTCPHIFVATNFLSLVQLQLLPQGPLVQYLTMETCEDGNDLVFFYQVCEGVAKASHASHTAAQAGLPDKLVARGKEVSDLIRSGKPIKPVKDLLKKNQMENCQTLVDKFMKLDLEDPNLDLNVFMSQEVLPAATSIL

SEQ ID NO: 8979 - protein, 156 aa, Homo sapiens
TAQSLVLIDEFGKGTNTVDGLALLAAVLRHWLARGPTCPHIFVATNFLSLVQLQLLPQGPLVQYLVCEGVAKASHASHTAAQAGLPDKLVARGKEVSDLIRSGKPIKPVKDLLKKNQMENCQTLVDKFMKLDLEDPNLDLNVFMSQEVLPAATSIL

SEQ ID NO: 8980 - protein, 159 aa, Homo sapiens
  SITE 1: note = misc_feature - Xaa can be any naturally occurring amino acid
XDAPDHESLKLLQRVLDEINPQSVVTSAKQDENMTRFLGKLASQEHREPKRPEIIFLPSVDFGLEISKQRLLSGNYSFIPDAMTATEKILFLSSIIPFDCLLTVRALGGLLKFLGRRRIGVELEDYNVSVPILGFKKFMLTHLVNIDQDTYRNPQQMPL

SEQ ID NO: 8981 - protein, 43 aa, Homo sapiens
  SITE 1: note = misc_feature - Xaa can be any naturally occurring amino acid
XRIGVELEDYNVSVPILGFKKFMLTHLVNIDQDTYRNPQQMPL

SEQ ID NO: 8982 - protein, 170 aa, Homo sapiens
MALPTARPLLGSCGTPALGSLLFLLFSLGWVQPSRTLAGETGQEAAPLDGVLANPPNISSLSPRQLLGFPCAEVSGLSTERVRELAVALAQKNVKLSTEQLRCLAHRLSEPPEDLDALPLDLLLFLNPDAFSGPQACTRFFSRITKANVDLLPRGAPERQRLLPAALACW

SEQ ID NO: 8983 - protein, 333 aa, Homo sapiens [sequence omitted]

SEQ ID NO: 8984 - protein, 630 aa, Homo sapiens
MALPTARPLLGSCGTPALGSLLFLLFSLGWVQPSRTLAGETGQEAAPLDGVLANPPNISSLSPRQLLGFPCAEVSGLSTERVRELAVALAQKNVKLSTEQLRCLAHRLSEPPEDLDALPLDLLLFLNPDAFSGPQACTRFFSRITKANVDLLPRGAPERQRLLPAALACWGVRGSLLSEADVRALGGLACDLPGRFVAESAEVLLPRLVSCPGPLDQDQQEAARAALQGGGPPYGPPSTWSVSTMDALRGLLPVLGQPIIRSIPQGIVAAWRQRSSRDPSWRQPERTILRPRFRREVEKTACPSGKKAREIDESLIFYKKWELEACVDAALLATQMDRVNAIPFTYEQLDVLKHKLDELYPQGYPESVIQHLGYLFLKMSPEDIRKWNVTSLETLKALLEVNKGHEMSPQAPRRPLPQVATLIDRFVKGRGQLDKDTLDTLTAFYPGYLCSLSPEELSSVPPSSIWAVRPQDLDTCDPRQLDVLYPKARLAFQNMNGSEYFVKIQSFLGGAPTEDLKALSQQNVSMDLATFMKLRTDAVLPLTVAEVQKLLGPHVEGLKAEERHRPVRDWILRQRQDDLDTLGLGLQGGIPNGYLVLDLSMQEALSGTPCLLGPGPVLTVLALLLASTLA

SEQ ID NO: 8985 - protein, 622 aa, Homo sapiens
MALPTARPLLGSCGTPALGSLLFLLFSLGWVQPSRTLAGETGQEAAPLDGVLANPPNISSLSPRQLLGFPCAEVSGLSTERVRELAVALAQKNVKLSTEQLRCLAHRLSEPPEDLDALPLDLLLFLNPDAFSGPQACTRFFSRITKANVDLLPRGAPERQRLLPAALACWGVRGSLLSEADVRALGGLACDLPGRFVAESAEVLLPRLVSCPGPLDQDQQEAARAALQGGGPPYGPPSTWSVSTMDALRGLLPVLGQPIIRSIPQGIVAAWRQRSSRDPSWRQPERTILRPRFRREVEKTACPSGKKAREIDESLIFYKKWELEACVDAALLATQMDRVNAIPFTYEQLDVLKHKLDELYPQGYPESVIQHLGYLFLKMSPEDIRKWNVTSLETLKALLEVNKGHEMSPQVATLIDRFVKGRGQLDKDTLDTLTAFYPGYLCSLSPEELSSVPPSSIWAVRPQDLDTCDPRQLDVLYPKARLAFQNMNGSEYFVKIQSFLGGAPTEDLKALSQQNVSMDLATFMKLRTDAVLPLTVAEVQKLLGPHVEGLKAEERHRPVRDWILRQRQDDLDTLGLGLQGGIPNGYLVLDLSMQEALSGTPCLLGPGPVLTVLALLLASTLA

SEQ ID NO: 8986 - protein, 622 aa, Homo sapiens; identical to SEQ ID NO: 8985

SEQ ID NO: 8987 - protein, 622 aa, Homo sapiens; identical to SEQ ID NO: 8985

SEQ ID NO: 8988 - protein, 398 aa, Homo sapiens
VEKTACPSGKKAREIDESLIFYKKWELEACVDAALLATQMDRVNAIPFTYEQLDVLKHKLDELYPQGYPESVIQHLGYLFLKMSPEDIRKWNVTSLETLKALLEVNKGHEMSPQVATLIDRFVKGRGQLDKDTLDTLTAFYPGYLCSLSPEELSSVPPSSIWAVRPQDLDTCDPRQLDVLYPKARLAFQNMNGSEYFVKIQSFLGGAPTEDLKALSQQNVSMDLATFMKLRTDAVLPLTVAEVQKLLGPHVEGLKAEERHRPVRDWILRQRQDDLDTLGLGLQGGIPNGYLVLDLSMQGGRGGQARAGGRAGGVEVGALSHPSLCRGPLGDALPPRTWTCSHRPGTAPSLHPGLRAPLPCWPQPCWGSPPGQEQARVVPVPPQENSRSVNGNMPPADT

SEQ ID NO: 8989 - protein, 334 aa, Homo sapiens
  SITE 1: note = misc_feature - Xaa can be any naturally occurring amino acid
XSWRQPERTILRPRFRREVEKTACPSGKKAREIDESLIFYKKWELEACVDAALLATQMDRVNAIPFTYEQLDVLKHKLDELYPQGYPESVIQHLGYLFLKMSPEDIRKWNVTSLETLKALLEVNKGHEMSPQVATLIDRFVKGRGQLDKDTLDTLTAFYPGYLCSLSPEELSSVPPSSIWAVRPQDLDTCDPRQLDVLYPKARLAFQNMNGSEYFVKIQSFLGGAPTEDLKALSQQNVSMDLATFMKLRTDAVLPLTVAEVQKLLGPHVEGLKAEERHRPVRDWILRQRQDDLDTLGLGLQGGIPNGYLVLDLSMQGPGPVLTVLALLLASTLA

SEQ ID NO: 8990 - protein, 114 aa, Homo sapiens
MNVLLGSVVIFATFVTLCNASCYFIPNEGVPGDSTRKCMDLKGNKHPINSEWQTDNCETCTCYETEISCCTLVSTPVGYDKDNCQRIFKKEDCKYIVVEKKDPKKTCSVSEWII

SEQ ID NO: 8991 - protein, 77 aa, Homo sapiens
MNVLLGSVVIFATFVTLCNASCYFIPNEGVPGDSTRMFLHLWVMTKTTAKESSRRRTASISWWRRRTQKRPVLSVNG

SEQ ID NO: 8992 - protein, 59 aa, Homo sapiens
MAVFGMGCFWGAERKFWVLKGVYSTQVGFAGGYTSNPTYKEVCSDVQNNSMFISLFKSF

SEQ ID NO: 8993 - protein, 82 aa, Homo sapiens
MAVFGMGCFWGAERKFWVLKGVYSTQVGFAGGYTSNPTYKEVCSEKTGHAEVVRVVYQPEHMSFEELLKVFWENHDPTQGMR

SEQ ID NO: 8994 - protein, 169 aa, Homo sapiens
MAVFGMGCFWGAERKFWVLKGVYSTQVGFAGGYTSNPTYKEVCSEKTGHAEVVRVVYQPEHMSFEELLKVFWENHDPTQGMRQGNDHGTQYRSAIYPTSAKQMEAALSSKENYQKVLSEHGFGPITTDIREGQTFYYAEDYHQQYLSKNPNGYCGLGGTGVSCPVGIKK

SEQ ID NO: 8995 - protein, 192 aa, Homo sapiens
MCSEPKHHVNGNRTVEPFPEGTQMAVFGMGCFWGAERKFWVLKGVYSTQVGFAGGYTSNPTYKEVCSEKTGHAEVVRVVYQPEHMSFEELLKVFWENHDPTQGMRQGNDHGTQYRSAIYPTSAKQMEAALSSKENYQKVLSEHGFGPITTDIREGQTFYYAEDYHQQYLSKNPNGYCGLGGTGVSCPVGIKK

SEQ ID NO: 8996 - protein, 195 aa, Homo sapiens
MLSATRRACQLLLLHSLFPVPRMGNSASNIVSPQEALPGRKEQTPVAAKHHVNGNRTVEPFPEGTQMAVFEKTGHAEVVRVVYQPEHMSFEELLKVFWENHDPTQGMRQGNDHGTQYRSAIYPTSAKQMEAALSSKENYQKVLSEHGFGPITTDIREGQTFYYAEDYHQQYLSKNPNGYCGLGGTGVSCPVGIKK

SEQ ID NO: 8997 - protein, 213 aa, Homo sapiens
MLSATRRACQLLLLHSLFPVPRMGNSASNIVSPQEALPGRKEQTPVAAKHHVNGNRTVEPFPEGTQMAVFGMGCFWGAERKFWVLKGVYSTQVGFAGGYTSNPTYKEVCSEKTGHAEVVRVVYQPEHMSFEELLKVFWENHDPTQGMRQGNDHGTQYRSAIYPTSAKQMEAALSSKENYQKLVLPCSSSAMLGLTAASSAQLAWVQPSSRKHY

SEQ ID NO: 8998 - protein, 235 aa, Homo sapiens
MLSATRRACQLLLLHSLFPVPRMGNSASNIVSPQEALPGRKEQTPVAAKHHVNGNRTVEPFPEGTQMAVFGMGCFWGAERKFWVLKGVYSTQVGFAGGYTSNPTYKEVCSEKTGHAEVVRVVYQPEHMSFEELLKVFWENHDPTQGMRQGNDHGTQYRSAIYPTSAKQMEAALSSKENYQKVLSEHGFGPITTDIREGQTFYYAEDYHQQYLSKNPNGYCGLGGTGVSCPVGIKK

SEQ ID NO: 8999 - protein, 91 aa, Homo sapiens
  SITE 1: note = misc_feature - Xaa can be any naturally occurring amino acid
XKTGHAEVVRVVYQPEHMSFEELLKVFWENHDPTQGMRQGNDHGTQYRSAIYPTSAKQMEAALSSKENYQKVPKHVHWKKRTQTGLQTEGR

SEQ ID NO: 9000 - protein, 182 aa, Homo sapiens
MARLLWLLRGLTLGTAPRRAVRGQAGGGGPGTGPGLGEAGSLATCELPLAKSEWQKKLTPEQFYVTREKGTEPPFSGIYLNNKEAGMYHCVCCDSPLFSSEKKYCSGTGWPSFSEAHGTSGSDESHTGILRRLDTSLGSARTEVVCKQCEAHLGHVFPDGPGPNGQRFCINSVALKFKPRKH

SEQ ID NO: 9001 - protein, 120 aa, Homo sapiens
  SITE 1: note = misc_feature - Xaa can be any naturally occurring amino acid
XSLATCELPLAKSEWQKKLTPEQFYVTREKGTEPPFSGIYLNNKEAGMYHCVCCDSPLFRSLLDIQKEVFSIKGSRSPSTSRGNGFDSEVLRKSTALALGGLRFPRLMVRLALMKATQGS

SEQ ID NO: 9002 - protein, 84 aa, Homo sapiens
GEYTHHKDPGIYKCVVCGTPLFKSETKFDSGSGWPSFHDVINSEAITFTDDFSYGMHRVETSCSQQEGPHQMLPLNLGFPGLQN

SEQ ID NO: 9003 - protein, 117 aa, Homo sapiens
MSAFNLLHLVTKSQPVALRACGLPSGSCRDKKNCKVVFSQQELRKRLTPLQYHVTQEKGTESAFEGEYTHHKDPGIYKCVVCGTPLFKSETKFDSGSGWPSFHDVINSEAITFTDDF

SEQ ID NO: 9004 - protein, 164 aa, Homo sapiens
MSAFNLLHLVTKSQPVALRACGLPSGSCRDKKNCKVVFSQQELRKRLTPLQYHVTQEKGTESAFEGEYTHHKDPGIYKCVVCGTPLFKSETKFDSGSGWPSFHDVINSEAITFTDDFSYGMHRVETSCSQCGAHLGHIFDDGPRPTGKRYCINSAALSFTPADS

SEQ ID NO: 9005 - protein, 185 aa, Homo sapiens
MSAFNLLHLVTKSQPVALRACGLPSGSCRDKKNCKVVFSQQELRKRLTPLQYHVTQEKGTESAFEGEYTHHKDPGIYKCVVCGTPLFKSETKFDSGSGWPSFHDVINSEAITFTDDFSYGMHRVETSCSQCGAHLGHIFDDGPRPTGKRYCINSAALSFTPADSSGTAEGGSGVASPAQADKAEL

SEQ ID NO: 9006 - protein, 185 aa, Homo sapiens; identical to SEQ ID NO: 9005

SEQ ID NO: 9007 - protein, 185 aa, Homo sapiens; identical to SEQ ID NO: 9005

SEQ ID NO: 9008 - protein, 185 aa, Homo sapiens; identical to SEQ ID NO: 9005

SEQ ID NO: 9009 - protein, 185 aa, Homo sapiens; identical to SEQ ID NO: 9005

SEQ ID NO: 9010 - protein, 185 aa, Homo sapiens; identical to SEQ ID NO: 9005

SEQ ID NO: 9011 - protein, 44 aa, Homo sapiens
MSPRRTLPRPLSLCLSLCLCLCLAAALGSAQSALAPVLCFSFCW

SEQ ID NO: 9012 - protein, 192 aa, Homo sapiens
MSPRRTLPRPLSLCLSLCLCLCLAAALGSAQSGSCRDKKNCKVVFSQQELRKRLTPLQYHVTQEKGTESAFEGEYTHHKDPGIYKCVVCGTPLFKSETKFDSGSGWPSFHDVINSEAITFTDDFSYGMHRVETSCSQCGAHLGHIFDDGPRPTGKRYCINSAALSFTPADSSGTAEGGSGVASPAQADKAEL

SEQ ID NO: 9013 - protein, 160 aa, Homo sapiens
MSPRRTLPRPLSLCLSLCLCLCLAAALGSAQSGSCRDKKNCKVVFSQQELRKRLTPLQYHVTQEKGTESAFEGEYTHHKDPGIYKCVVCGTPLFKSETKFDSGSGWPSFHDVINSEAITFTDDFSYGMHRVETSCSQVSSSFLKTQYIAFRTPGCAKYSN

SEQ ID NO: 9014 - protein, 117 aa, Homo sapiens
  SITE 1: note = misc_feature - Xaa can be any naturally occurring amino acid
XLRKRLTPLQYHVTQEKGTESAFEGEYTHHKDPGIYKCVVCGTPLFKSETKFDSGSGWPSFHDVINSEAITFTDDFSYGMHRVETSCSQQEGPHQMLPLNLGFPGLQNCEPINFYSF

SEQ ID NO: 9015 - protein, 174 aa, Homo sapiens
  SITE 1: note = misc_feature - Xaa can be any naturally occurring amino acid
XRRRLPGLSMSPRRTLPRPLSLCLSLCLCLCLAAALGSAQSGSCRDKKNCKVVFSQQELRKRLTPLQYHVTQEKGTESAFEGEYTHHKDPGIYKCVVCGTPLFKSETKFDSGSGWPSFHDVINSEAITFTDDFSYGMHRVETSCSQQEGPHQMLPLNLGFPGLQNCEPINFYSF

SEQ ID NO: 9016 - protein, 725 aa, Homo sapiens
MGLWWVTVQPPARRMGWLPLLLLLTQCLGVPGQRSPLNDFQVLRGTELQHLLHAVVPGPWQEDVADAEECAGRCGPLMDCRAFHYNVSSHGCQLLPWTQHSPHTRLRRSGRCDLFQKKDYVRTCIMNNGVGYRGTMATTVGGLPCQAWSHKFPNDHKYTPTLRNGLEENFCRNPDGDPGGPWCYTTDPAVRFQSCGIKSCREAACVWCNGEEYRGAVDRTESGRECQRWDLQHPHQHPFEPGKFLDQGLDDNYCRNPDGSERPWCYTTDPQIEREFCDLPRCGSEAQPRQEATTVSCFRGKGEGYRGTANTTTAGVPCQRWDAQIPHQHRFTPEKYACKDLRENFCRNPDGSEAPWCFTLRPGMRAAFCYQIRRCTDDVRPQDCYHGAGEQYRGTVSKTRKGVQCQRWSAETPHKPQFTFTSEPHAQLEENFCRNPDGDSHGPWCYTMDPRTPFDYCALRRCADDQPPSILDPPDQVQFEKCGKRVDRLDQRRSKLRVVGGHPGNSPWTVSLRNRQGQHFCGGSLVKEQWILTARQCFSSCHMPLTGYEVWLGTLFQNPQHGEPSLQRVPVAKMVCGPSGSQLVLLKLERSVTLNQRVALICLPPEWYVVPPGTKCEIAGWGETKGTGNDTVLNVALLNVISNQECNIKHRGRVRESEMCTEGLLAPVGACEGDYGGPLACFTHNCWVLEGIIIPNRVCARSRWPAVFTRVSVFVDWIHKVMRLG

SEQ ID NO: 9017 - protein, 195 aa, Homo sapiens
  SITE 1: note = misc_feature - Xaa can be any naturally occurring amino acid
XAGPAFLRGVSSEGAVDTDCPAVLLLLNPQHGEPSLQRVPVAKMVCGPSGSQLVLLKLERSVTLNQRVALICLPPEWYVVPPGTKCEIAGWGETKGTGNDTVLNVALLNVISNQECNIKHRGRVRESEMCTEGLLAPVGACEGDYGGPLACFTHNCWVLEGIIIPNRVCARSRWPAVFTRVSVFVDWIHKVMRLG

SEQ ID NO: 9018 - protein, 375 aa, Homo sapiens
MQKLQLCVYIYLFMLIVAGPVDLNENSEQKENVEKEGLCNACTWRQNTKSSRIEAIKIQILSKLRLETAPNISKDVIRQLLPKAPPLRELIDQYDVQRDDSSDGSLEDDDYHATTETIITMPTESDFLMQVDGKPKCCFFKFSSKIQYNKVVKAQLWIYLRPVETPTTVFVQILRLIKPMKDGTRYTGIRSLKLDMNPGTGIWQSIDVKTVLQNWLKQPESNLGIEIKALDENGHDLAVTFPGPGEDGLNPFLEVKVTDTPKRSRRDFGLDCDEHSTESRCCRYPLTVDFEAFGWDWIIAPKRYKANYCSGECEFVFLQKYPHTHLVHQANPRGSAGPCCTPTKMSPINMLYFNGKEQIIYGKIPAMVVDRCGCS

SEQ ID NO: 9019 - protein, 62 aa, Homo sapiens
MDPNCSCAAAGVSCTCASSCKCKECKCTSCKKSCCSCCPVGCAKCAQGCICKGASEKCSCCA

SEQ ID NO: 9020 - protein, 39 aa, Homo sapiens
MDPNCSCAAGCCSCCPVGCAKCAQGCICKGASEKCSCCA

SEQ ID NO: 9021 - protein, 61 aa, Homo sapiens
MDPNCSCAAGVSCTCASSCKCKECKCTSCKKSCCSCCPVGCAKCAQGCICKGASEKCSCCA

SEQ ID NO: 9022 - protein, 68 aa, Homo sapiens
MDPNCSCAAGVSCTCASSCKCKECKCTSCKKSECGAISRNLGLWLRLGGNPRLSLSACFWGTGLPLSL

SEQ ID NO: 9023 - protein, 36 aa, Homo sapiens
MAATSLMSALAARLLQPAHSCSLRLRPFHLAAVRAY

SEQ ID NO: 9024 - protein, 267 aa, Homo sapiens
MAATSLMSALAARLLQPAHSCSLRLRPFHLAAVRNEAVVISGRKLAQQIKQEVRQEVEEWVASGNKRPHLSVILVGENPASHSYVLNKTRAAAVVEHIDERRICNAVSPDKDVDGFHVINVGRMCLDQYSMLPATPWGVWEIIKRTGIPTLGKNVVVAGRSKNVGMPIAMLLHTDGAHERPGGDATVTISHRYTPKEQLKKHTILADIVISAAGVRQKAGYITPVPGGVGPMTVAMLMKNTIIAAKKVLRLEEREVLKSKELGVATN

SEQ ID NO: 9025 - protein, 222 aa, Homo sapiens
MAATSLMSALAARLLQPAHSCSLRLRPFHLAAVRNEAVVISGRKLAQQIKQEVRQEVEEWVASGNKRPHLSVILVGENPASHSYVLNKTRAAAVVGDATVTISHRYTPKEQLKKHTILADIVISAAGIPNLITADMIKEGAAVIDVGINRVHDPVTAKPKLVGDVDFEGVRQKAGYITPVPGGVGPMTVAMLMKNTIIAAKKVLRLEEREVLKSKELGVATN

SEQ ID NO: 9026 - protein, 350 aa, Homo sapiens
MAATSLMSALAARLLQPAHSCSLRLRPFHLAAVRNEAVVISGRKLAQQIKQEVRQEVEEWVASGNKRPHLSVILVGENPASHSYVLNKTRAAAVVGINSETIMKPASISEEELLNLINKLNNDDNVDGLLVQLPLPEHIDERRICNAVSPDKDVDGFHVINVGRMCLDQYSMLPATPWGVWEIIKRTGIPTLGKNVVVAGRSKNVGMPIAMLLHTDGAHERPGGDATVTISHRYTPKEQLKKHTILADIVISAAGIPNLITADMIKEGAAVIDVGINRVHDPVTAKPKLVGDVDFEGVRQKAGYITPVPGGVGPMTVAMLMKNTIIAAKKVLRLEEREVLKSKELGVATN

SEQ ID NO: 9027 - protein, 37 aa, Homo sapiens
MAATSLMSALAARLLQPAHSCSLRLRPFHLAAVRNQQ

SEQ ID NO: 9028 - protein, 292 aa, Homo sapiens
MAGARAAAAAASAGSSASSGNQPPQELGLGELLEEFSRTQYRAKDGSGTGGSKCWDLVQQTQNYLKLLLSLVNSDDDSGLLVHCISGWDRTPLFISLLRLSLWADGLIHTSLKPTEILYLTVAYDWFLFGHMLVDRLSKGEEIFFFCFNFLKHITSEEFSALKTQRRKSLPARDGGFTLEDICMLRRKDRGSTTSLGSDFSLVMESSPGATGSFTYEAVELVPAGAPTQAAWLAALSDRETRLQEVRSAFLAAYSSTVGLRAVAPSPSGAIGGLLEQFARGVGLRSISSNAL

SEQ ID NO: 9029 - protein, 71 aa, Homo sapiens
MAGARAAAAAASAGSSASSGNQPPQELGLGELLEEFSRTQYRAKDGSGTGGSKSSYRQTWRASCQLRPSPP

SEQ ID NO: 9030 - protein, 158 aa, Homo sapiens
MAGARAAAAAASAGSSASSGNQPPQELGLGELLEEFSRTQYRAKDGSGTGGSKVERIEKRCLELFGRDYCFSVIPNTNGDICGHYPRHIVFLEYESSEKEKDTFESTVQGVQMMPGQMWRTSRRRTVLFEVVTRIFLIRSEAMTSSCFDTCQSNTSVT

SEQ ID NO: 9031 - protein, 188 aa, Homo sapiens
MAGARAAAAAASAGSSASSGNQPPQELGLGELLEEFSRTQYRAKDGSGTGGSKVERIEKRCLELFGRDYCFSVIPNTNGDICGHYPRHIVFLEYESSEKEKDTFESTVQVSKLQDLIHRSKMARCRGRFVCPVILFKGKGVQMMPGQMWRTSRRRTVLFEVVTRIFLIRSEAMTSSCFDTCQSNTSVT

SEQ ID NO: 9032 - protein, 650 aa, Homo sapiens
MAGARAAAAAASAGSSASSGNQPPQELGLGELLEEFSRTQYRAKDGSGTGGSKVERIEKRCLELFGRDYCFSVIPNTNGDICGHYPRHIVFLEYESSEKEKDTFESTVQVSKLQDLIHRSKMARCRGRFVCPVILFKGKHICRSATLAGWGELYGRSGYNYFFSGGADDAWADVEDVTEEDCALRSGDTHLFDKVRGYDIKLLRYLSVKYICDLMVENKKVKFGMNVTSSEKVDKAQRYADFTLLSIPYPGCEFFKEYKDRDYMAEGLIFNWKQDYVDAPLSIPDFLTHSLNIDWSQYQCWDLVQQTQNYLKLLLSLVNSDDDSGLLVHCISGWDRTPLFISLLRLSLWADGLIHTSLKPTEILYLTVAYDWFLFGHMLVDRLSKGEEIFFFCFNFLKHITSEEFSALKTQRRKSLPARDGGFTLEDICMLRRKDRGSTTSLGSDFSLVMESSPGATGSFTYEAVELVPAGAPTQAAWRKSHSSSPQSVLWNRPQPSEDRLPSQQGLAEARSSSSSSSNHSDNFFRMGSSPLEVPKPRSVDHPLPGSSLSTDYGSWQMVTGCGSIQERAVLHTDSSLPFSFPDELPNSCLLAALSDRETRLQEVRSAFLAAYSSTVGLRAVAPSPSGAIGGLLEQFARGVGLRSISSNAL

SEQ ID NO: 9033 - protein, 598 aa, Homo sapiens
MAGARAAAAAASAGSSASSGNQPPQELGLGELLEEFSRTQYRAKDGSGTGGSKVERIEKRCLELFGRDYCFSVIPNTNGDICGHYPRHIVFLEYESSEKEKDTFESTVQVSKLQDLIHRSKMARCRGRFVCPVILFKGKHICRSATLAGWGELYGRSGYNYFFSGGADDAWADVEDVTEEDCALRSGDTHLFDKVRGYDIKLLRYLSVKYICDLMVENKKVKFGMNVTSSEKVDKAQRYADFTLLSIPYPGCEFFKEYKDRDYMAEGLIFNWKQDYVDAPLSIPDFLTHSLNIDWSQYQCWDLVQQTQNYLKLLLSLVNSDDDSGLLVHCISGWDRTPLFISLLRLSLWADGLIHTSLKPTEILYLTVAYDWFLFGHMLVDRLSKGEEIFFFCFNFLKHITSEEFSALKTQRRKSLPARDGGFTLEDICMLRRKDRGSTTSLGSDFSLVMESSPGATGSFTYEAVELVPAGAPTQAAWRKSHSSSPQSVLWNRPQPSEDRLPSQQGLAEARSSSSSSSNHSDNFFRMGSSPLEVPKPRLAALSDRETRLQEVRSAFLAAYSSTVGLRAVAPSPSGAIGGLLEQFARGVGLRSISSNAL

SEQ ID NO: 9034 - protein, 538 aa, Homo sapiens
MAGARAAAAAASAGSSASSGNQPPQELGLGELLEEFSRTQYRAKDGSGTGGSKVERIEKRCLELFGRDYCFSVIPNTNGDICGHYPRHIVFLEYESSEKEKDTFESTVQVSKLQDLIHRSKMARCRGRFVCPVILFKGKHICRSATLAGWGELYGRSGYNYFFSGGADDAWADVEDVTEEDCALRSGDTHLFDKVRGYDIKLLRYLSVKYICDLMVENKKVKFGMNVTSSEKVDKAQRYADFTLLSIPYPGCEFFKEYKDRDYMAEGLIFNWKQDYVDAPLSIPDFLTHSLNIDWSQYQCWDLVQQTQNYLKLLLSLVNSDDDSGLLVHCISGWDRTPLFISLLRLSLWADGLIHTSLKPTEILYLTVAYDWFLFGHMLVDRLSKGEEIFFFCFNFLKHITSEEFSALKTQRRKSLPARDGGFTLEDICMLRRKDRGSTTSLGSDFSLVMESSPGATGSFTYEAVELVPAGAPTQAAWLAALSDRETRLQEVRSAFLAAYSSTVGLRAVAPSPSGAIGGLLEQFARGVGLRSISSNAL

SEQ ID NO: 9035 - protein, 187 aa, Homo sapiens
MAGARAAAAAASAGSSASSGNQPPQELGLGELLEEFSRTQYRAKDGSGTGGSKVERIEKRCLELFGRDYCFSVIPNTNGDICGHYPRHIVFLEYESSEKEKDTSGDTHLFDKVRGYDIKLLRYLSVKYICDLMVENKKVKFGMNVTSSEKVDKAQRYADFTLLSIPYPVLGSGATNTKLPEAAAFLS

SEQ ID NO: 9036 - protein, 154 aa, Homo sapiens
MALLILLLVPLLLPDSGSEAYSGCEFFKEYKDRDYMAEGLIFNWKQDYVDAPLSIPDFLTHSLNIDWSQYQCWDLVQQTQNYLKLLLSLVNSDDDSGLLVHCISGWDRTPLFISLLRLSLWADGLIHTSLKPTEILYLTVAYDWFLFGHMLVDR

SEQ ID NO: 9037 - protein, 60 aa, Homo sapiens
MDAQATTIFSQGVQMMPGQMWRTSRRRTVLFEVVTRIFLIRSEAMTSSCFDTCQSNTSVT

SEQ ID NO: 9038 - protein, 36 aa, Homo sapiens
MSHCAWPETELELDVGEPVKEPLADLTRKGLRVPYR

SEQ ID NO: 9039 - protein, 24 aa, Homo sapiens
MATRGFSCLLLVISEIDLSVKRWV

SEQ ID NO: 9040 - protein, 725 aa, Homo sapiens
MGAASVRAGARLVEVALCSFTVTCLEVMRRFLLLYATQQGQAKAIAEEICEQAVVHGFSADLHCISESDKYDLKTETAPLVVVVSTTGTGDPPDTARKFVKEIQNQTLPVDFFAHLRYGLLGLGDSEYTYFCNGGKIIDKRLQELGARHFYDTGHADDCVGLELVVEPWIAGLWPALRKHFRSSRGQEEISGALPVASPASSRTDLVKSELLHIESQVELLRFDDSGRKDSEVLKQNAVNSNQSNVVIEDFESSLTRSVPPLSQASLNIPGLPPEYLQVHLQESLGQEESQVSVTSADPVFQVPISKAVQLTTNDAIKTTLLVELDISNTDFSYQPGDAFSVICPNSDSEVQSLLQRLQLEDKREHCVLLKIKADTKKKGATLPQHIPAGCSLQFIFTWCLEIRAIPKKAFLRALVDYTSDSAEKRRLQELCSKQGAADYSRFVRDACACLLDLLLAFPSCQPPLSLLLEHLPKLQPRPYSCASSSLFHPGKLHFVFNIVEFLSTATTEVLRKGVCTGWLALLVASVLQPNIHASHEDSGKALAPKISISPRTTNSFHLPDDPSIPIIMVGPGTGIAPFIGFLQHREKLQEQHPDGNFGAMWLFFGCRHKDRDYLFRKELRHFLKHGILTHLKVSFSRDAPVGEEEAPAKYVQDNIQLHGQQVARILLQENGHIYVCGDAKNMAKDVHDALVQIISKEVGVEKLEAMKTLATLKEEKRYLQDIWS

SEQ ID NO: 9041 - protein, 41 aa, Homo sapiens
MRRFLLLYATQQGQAKAIAEEICEQAVVHGFSADLHCISES

SEQ ID NO: 9042 - protein, 46 aa, Homo sapiens
MRRFLLLYATQQGQAKAIAEEICEQAVVHGFSADLHCISESDKCEK

SEQ ID NO: 9043 - protein, 58 aa, Homo sapiens
MRRFLLLYATQQGQAKAIAEEICEQAVVHGFSADLHCISESDKVSVIQNTPTFAMGGR

SEQ ID NO: 9044 - protein, 58 aa, Homo sapiens; identical to SEQ ID NO: 9043

SEQ ID NO: 9045 - protein, 92 aa, Homo sapiens
MRRFLLLYATQQGQAKAIAEEICEQAVVHGFSADLHCISESDKYDLKTETAPLVVVVSTTGTGDPPDTARKFVKEIQNQTLPVDFFAHLRSR

SEQ ID NO: 9046 - protein, 112 aa, Homo sapiens
MRRFLLLYATQQGQAKAIAEEICEQAVVHGFSADLHCISESDKYDLKTETAPLVVVVSTTGTGDPPDTARKFVKEIQNQTLPVDFFAHLRYGLLGLGDSEYTYFCNGGKIID

SEQ ID NO: 9047 - protein, 156 aa, Homo sapiens
MRRFLLLYATQQGQAKAIAEEICEQAVVHGFSADLHCISESDKYDLKTETAPLVVVVSTTGTGDPPDTARKFVKEIQNQTLPVDFFAHLRYGLLGLGDSEYTYFCNGGKIIDKRLQELGARHFYDTGHADDCVGLELVVEPWIAGLWPALRKHFRS

SEQ ID NO: 9048 - protein, 698 aa, Homo sapiens
MRRFLLLYATQQGQAKAIAEEICEQAVVHGFSADLHCISESDKYDLKTETAPLVVVVSTTGTGDPPDTARKFVKEIQNQTLPVDFFAHLRYGLLGLGDSEYTYFCNGGKIIDKRLQELGARHFYDTGHADDCVGLELVVEPWIAGLWPALRKHFRSSRGQEEISGALPVASPASSRTDLVKSELLHIESQVELLRFDDSGRKDSEVLKQNAVNSNQSNVVIEDFESSLTRSVPPLSQASLNIPGLPPEYLQVHLQESLGQEESQVSVTSADPVFQVPISKAVQLTTNDAIKTTLLVELDISNTDFSYQPGDAFSVICPNSDSEVQSLLQRLQLEDKREHCVLLKIKADTKKKGATLPQHIPAGCSLQFIFTWCLEIRAIPKKAFLRALVDYTSDSAEKRRLQELCSKQGAADYSRFVRDACACLLDLLLAFPSCQPPLSLLLEHLPKLQPRPYSCASSSLFHPGKLHFVFNIVEFLSTATTEVLRKGVCTGWLALLVASVLQPNIHASHEDSGKALAPKISISPRTTNSFHLPDDPSIPIIMVGPGTGIAPFIGFLQHREKLQEQHPDGNFGAMWLFFGCRHKDRDYLFRKELRHFLKHGILTHLKVSFSRDAPVGEEEAPAKYVQDNIQLHGQQVARILLQENGHIYVCGDAKNMAKDVHDALVQIISKEVGVEKLEAMKTLATLKEEKRYLQDIWS

SEQ ID NO: 9049 - protein, 372 aa, Homo sapiens
  SITE 1: note = misc_feature - Xaa can be any naturally occurring amino acid
XFTVTCLEVMRRFLLLYATQQGQAKAIAEEICEQAVVHGFSADLHCISESDKYDLKTETAPLVVVVSTTGTGDPPDTARKFVKEIQNQTLPVDFFAHLRYGLLGLGDSEYTYFCNGGKIIDKRLQELGARHFYDTGHADDCVGLELVVEPWIAGLWPALRKHFRSSRGQEEISGALPVASPASSRTDLVKSELLHIESQVELLRFDDSGRKDSEVLKQNAVNSNQSNVVIEDFESSLTRSVPPLSQASLNIPGLPPEYLQVHLQESLGQEESQVSVTSADPVFQVPISKAVQLTTNDAIKTTLLVELDISNTDFSYQPGDAFSVICPNSDSEVQSLLQRLQLEDKREHCVLLKIKADTKKKGIFASPCGLYQ

SEQ ID NO: 9050 - protein, 160 aa, Homo sapiens
  SITE 1: note = misc_feature - Xaa can be any naturally occurring amino acid
XVRAGARLVEVALCRFVPGWRGVGLGDSEYTYFCNGGKIIDKRLQELGARHFYDTGHADDCVGLELVVEPWIAGLWPALRKHFRSSRGQEEISGALPVASPASSRTDLVKSELLHIESQVELLRFDDSGRKDSEVLKQNAVNSNQSNVVIEDFESSLTRS

SEQ ID NO: 9051 - protein, 81 aa, Homo sapiens
  SITE 1: note = misc_feature - Xaa can be any naturally occurring amino acid
XVRAGARLVEVALCSFTVTCLEVMRRFLLLYATQQGQAKAIAEEICEQAVVHGFSADLHCISESDKVSVIQNTPTFAMGGR

SEQ ID NO: 9052 - protein, 115 aa, Homo sapiens
  SITE 1: note = misc_feature - Xaa can be any naturally occurring amino acid
XVRAGARLVEVALCSFTVTCLEVMRRFLLLYATQQGQAKAIAEEICEQAVVHGFSADLHCISESDKYDLKTETAPLVVVVSTTGTGDPPDTARKFVKEIQNQTLPVDFFAHLRSR

SEQ ID NO: 9053 - protein, 178 aa, Homo sapiens
MARAPLRPENTIVRGSANQCQDTYRAEELTGHTTGLSLNNDRLYKLTYSTEVLLDRGKGKLQDSVGYRISSNVDVALLWRNPDGDDDQLIQITMKDVNVENVNQQRGEKSIFKGKSPSKIMGKENLEALQRPTLLHLIHGKVKEFYSYQNEAVAIENIKRGLASLFQTQLSSGTTNEV

SEQ ID NO: 9054 - protein, 55 aa, Homo sapiens
MARAPLRPENTIVRGSANQCQDTYRAEELTGRPSIITRIHKTEEGDRRDGQSDMK

SEQ ID NO: 9055 - protein, 42 aa, Homo sapiens
MARAPLRPENTIVRGSANQCQDTYRAEELTGSEEGHSLTGCH

SEQ ID NO: 9056 - protein, 56 aa, Homo sapiens
MEERGGVYAGRGLELVFWEWEVVTVMSVFSRSRIKCVPADVYSFIYSCEYWMKELR

SEQ ID NO: 9057 - protein, 921 aa, Homo sapiens
MEERGGVYAGRGLELVFWEWEVVTVMSVFSRSRIKCVPADVYSFIYSCHTTGLSLNNDRLYKLTYSTEVLLDRGKGKLQDSVGYRISSNVDVALLWRNPDGDDDQLIQITMKDVNVENVNQQRGEKSIFKGKSPSKIMGKENLEALQRPTLLHLIHGKVKEFYSYQNEAVAIENIKRGLASLFQTQLSSGTTNEVDISGNCKVTYQAHQDKVIKIKALDSCKIARSGFTTPNQVLGVSSKATSVTTYKIEDSFVIAVLAEETHNFGLNFLQTIKGKIVSKQKLELKTTEAGPRLMSGKQAAAIIKAVDSKYTAIPIVGQVFQSHCKGCPSLSELWRSTRKYLQPDNLSKAEAVRNFLAFIQHLRTAKKEEILQILKMENKEVLPQLVDAVTSAQTSDSLEAILDFLDFKSDSSIILQERFLYACGFASHPNEELLRALISKFKGSIGSSDIRETVMIITGTLVRKLCQNEGCKLKAVVEAKKLILGGLEKAEKKEDTRMYLLALKNALLPEGIPSLLKYAEAGEGPISHLATTALQRYDLPFITDEVKKTLNRIYHQNRKVHEKTVRTAAAAIILNNNPSYMDVKNILLSIGELPQEMNKYMLAIVQDILRFEMPASKIVRRVLKEMVAHNYDRFSRSGSSSAYTGYIERSPRSASTYSLDILYSGSGILRRSNLNIFQYIGKAGLHGSQVVIEAQGLEALIAATPDEGEENLDSYAGMSAILFDVQLRPVTFFNGYSDLMSKMLSASGDPISVVKGLILLIDHSQELQLQSGLKANIEVQGGLAIDISGAMEFSLWYRESKTRVKNRVTVVITTDITVDSSFVKAGLETSTETEAGLEFISTVQFSQYPFLVCMQMDKDEAPFRQFEKKYERLSTGRGYVSQKRKESVLAGCEFPLHQENSEMCKVVFAPQPDSTSSGWF

SEQ ID NO: 9058 - protein, 50 aa, Homo sapiens
MEERGGVYAGRGLELVFWEWEVVTVMSVFSRSRIKCVPADVYSFIYSCPV

SEQ ID NO: 9059 - protein, 72 aa, Homo sapiens
MEERGGVYAGRGLELVFWEWEVVTVMSVFSRSRIKCVPADVYSFIYSCRPSIITRIHKTEEGDRRDGQSDMK

SEQ ID NO: 9060 - protein, 59 aa, Homo sapiens
MEERGGVYAGRGLELVFWEWEVVTVMSVFSRSRIKCVPADVYSFIYSCSEEGHSLTGCH

SEQ ID NO: 9061 - protein, 894 aa, Homo sapiens
MILLAVLFLCFISSYSASVKGHTTGLSLNNDRLYKLTYSTEVLLDRGKGKLQDSVGYRISSNVDVALLWRNPDGDDDQLIQITMKDVNVENVNQQRGEKSIFKGKSPSKIMGKENLEALQRPTLLHLIHGKVKEFYSYQNEAVAIENIKRGLASLFQTQLSSGTTNEVDISGNCKVTYQAHQDKVIKIKALDSCKIARSGFTTPNQVLGVSSKATSVTTYKIEDSFVIAVLAEETHNFGLNFLQTIKGKIVSKQKLELKTTEAGPRLMSGKQAAAIIKAVDSKYTAIPIVGQVFQSHCKGCPSLSELWRSTRKYLQPDNLSKAEAVRNFLAFIQHLRTAKKEEILQILKMENKEVLPQLVDAVTSAQTSDSLEAILDFLDFKSDSSIILQERFLYACGFASHPNEELLRALISKFKGSIGSSDIRETVMIITGTLVRKLCQNEGCKLKAVVEAKKLILGGLEKAEKKEDTRMYLLALKNALLPEGIPSLLKYAEAGEGPISHLATTALQRYDLPFITDEVKKTLNRIYHQNRKVHEKTVRTAAAAIILNNNPSYMDVKNILLSIGELPQEMNKYMLAIVQDILRFEMPASKIVRRVLKEMVAHNYDRFSRSGSSSAYTGYIERSPRSASTYSLDILYSGSGILRRSNLNIFQYIGKAGLHGSQVVIEAQGLEALIAATPDEGEENLDSYAGMSAILFDVQLRPVTFFNGYSDLMSKMLSASGDPISVVKGLILLIDHSQELQLQSGLKANIEVQGGLAIDISGAMEFSLWYRESKTRVKNRVTVVITTDITVDSSFVKAGLETSTETEAGLEFISTVQFSQYPFLVCMQMDKDEAPFRQFEKKYERLSTGRGYVSQKRKESVLAGCEFPLHQENSEMCKVVFAPQPDSTSSGWF

SEQ ID NO: 9062 - protein, 894 aa, Homo sapiens; identical to SEQ ID NO: 9061

SEQ ID NO: 9063 - protein, 151 aa, Homo sapiens
MILLAVLFLCFISSYSASVKGHTTGLSLNNDRLYKLTYSTEVLLDRGKGKLQDSVGYRISSNVDVALLWRNPDGDDDQLIQITMKDVNVENVNQQRGEKSIFKGKSPSKIMGKENLEALQRPTLLHLIHGKVKGRLDSTTFSPTSYFSSLQ

SEQ ID NO: 9064 - protein, 45 aa, Homo sapiens
MSLVAEAFVSQIAAAEPWPENATLYQQLKGEQILLSDNAASLAVQ

SEQ ID NO: 9065 - protein, 263 aa, Homo sapiens
MSLVAEAFVSQIAAAEPWPENATLYQQLKGEQILLSDNAASLAVQAFLQMCNLPIKVVCRANAEYMSPSGKVPFIHVGNQVVSELGPIVQFVKAKGHSLSDGLEEVQKAEMKAYMELVNNMLLTAELYLQWCDEATVGEITHARYGSPYPWPLNHILAYQKQWEVKRKMKAIGWGKKTLDQVLEDVDQCCQALSQRLGTQPYFFNKQPTELDALVFGHLYTILTTQLTNDELSEKVKNYSNLLAFCRRIEQHYFEDRGKGRLS

SEQ ID NO: 9066 - protein, 229 aa, Homo sapiens
MSLVAEAFVSQIAAAEPWPENATLYQQLKGEQILLSDNAASLAVQAFLQMCNLPIKVVCRANAEYMSPSGKVPFIHVGNQVVSELGPIVQFVKAKGHSLSDGLEEVQKAEMKAYMELVNNMLLTAELYLQWCDEATVGEWEVKRKMKAIGWGKKTLDQVLEDVDQCCQALSQRLGTQPYFFNKQPTELDALVFGHLYTILTTQLTNDELSEKVKNYSNLLAFCRRIEQH

SEQ ID NO: 9067 - protein, 207 aa, Homo sapiens
MSLVAEAFVSQIAGKVPFIHVGNQVVSELGPIVQFVKAKGHSLSDGLEEVQKAEMKAYMELVNNMLLTAELYLQWCDEATVGEITHARYGSPYPWPLNHILAYQKQWEVKRKMKAIGWGKKTLDQVLEDVDQCCQALSQRLGTQPYFFNKQPTELDALVFGHLYTILTTQLTNDELSEKVKNYSNLLAFCRRIEQHYFEDRGKGRLS

SEQ ID NO: 9068 - protein, 37 aa, Homo sapiens
MSLVAEAFVSQIAGWSAVAQPGLTATSASRVQAILLP

SEQ ID NO: 9069 - protein, 228 aa, Homo sapiens
ASSTHHSTVPPLTSSNHSTSPQLSTGVSFFFLSFHISNLQFNSSLEDPSTDYYQELQRDISEMFLQIYKQGGFLGLSNIKFRPGSVVVQLTLAFREGTINVHDVETQFNQYKTEAASRYNLTISDVSVSDVPFPFSAQSGAGVPGWGIALLVLVCVLVALAIVYLIALAVCQCRRKNYGQLDIFPARDTYHPMSEYPTYHTHGRYVPPSSTDRSPYEKEWRVDRERLA

SEQ ID NO: 9070 - protein, 135 aa, Homo sapiens
MTPGTQSPFFLLLLLTVLTATTAPKPATVVTGSGHASSTPGGEKETSATQRSSVPSSTEKNAALHQAQLLLWCTTAPLPGLPQPQPARALHSQFPATTLILLPPLPAIAPRLMPVALTIARSQHRLLPRAAERHF

SEQ ID NO: 9071 - protein, 241 aa, Homo sapiens
MTPGTQSPFFLLLLLTVLTATTAPKPATVVTGSGHASSTPGGEKETSATQRSSVPSSTEKNAFLQIYKQGGFLGLSNIKFRPGSVVVQLTLAFREGTINVHDVETQFNQYKTEAASRYNLTISDVSVSDVPFPFSAQSGAGVPGWGIALLVLVCVLVALAIVYLIALAVCQCRRKNYGQLDIFPARDTYHPMSEYPTYHTHGRYVPPSSTDRSPYEKVSAGNGGSSLSYTNPAVAATSANL

SEQ ID NO: 9072 - protein, 159 aa, Homo sapiens
MTPGTQSPFFLLLLLTVLTATTAPKPATVVTGSGHASSTPGGEKETSATQRSSVPSSTEKNAFNSSLEDPSTDYYQELQRDISEMAVCQCRRKNYGQLDIFPARDTYHPMSEYPTYHTHGRYVPPSSTDRSPYEKVSAGNGGSSLSYTNPAVAATSANL

SEQ ID NO: 9073 - protein, 264 aa, Homo sapiens
MTPGTQSPFFLLLLLTVLTATTAPKPATVVTGSGHASSTPGGEKETSATQRSSVPSSTEKNAFNSSLEDPSTDYYQELQRDISEMFLQIYKQGGFLGLSNIKFRPGSVVVQLTLAFREGTINVHDVETQFNQYKTEAASRYNLTISDVSVSDVPFPFSAQSGAGVPGWGIALLVLVCVLVALAIVYLIALAVCQCRRKNYGQLDIFPARDTYHPMSEYPTYHTHGRYVPPSSTDRSPYEKVSAGNGGSSLSYTNPAVAATSANL

SEQ ID NO: 9074 - protein, 189 aa, Homo sapiens
MTPGTQSPFFLLLLLTVLTATTAPKPATVVTGSGHASSTPGGEKETSATQRSSVPSSTEKNAFNSSLEDPSTDYYQELQRDISEMSGAGVPGWGIALLVLVCVLVALAIVYLIALAVCQCRRKNYGQLDIFPARDTYHPMSEYPTYHTHGRYVPPSSTDRSPYEKVSAGNGGSSLSYTNPAVAATSANL

SEQ ID NO: 9075 - protein, 80 aa, Homo sapiens
MTPGTQSPFFLLLLLTVLTATTAPKPATVVTGSGHASSTPGGEKETSATQRSSVPSSTEKNAIPAPTTTKSCRETFLKCE

SEQ ID NO: 9076 - protein, 239 aa, Homo sapiens
MTPGTQSPFFLLLLLTVLTATTAPKPATVVTGSGHASSTPGGEKETSATQRSSVPSSTEKNAIPAPTTTKSCRETFLKWPGSVVVQLTLAFREGTINVHDVETQFNQYKTEAASRYNLTISDVSVSDVPFPFSAQSGAGVPGWGIALLVLVCVLVALAIVYLIALAVCQCRRKNYGQLDIFPARDTYHPMSEYPTYHTHGRYVPPSSTDRSPYEKVSAGNGGSSLSYTNPAVAATSANL

SEQ ID NO: 9077 - protein, 268 aa, Homo sapiens
MTPGTQSPFFLLLLLTVLTATTAPKPATVVTGSGHASSTPGGEKETSATQRSSVPSSTEKNALSTGVSFFFLSFHISNLQFNSSLEDPSTDYYQELQRDISEMFLQIYKQGGFLGLSNIKFRPGSVVVQLTLAFREGTINVHDVETQFNQYKTEAASRYNLTISDVSVSDVPFPFSAQSGAGVPGWGIALLVLVCVLVALAIVYLIALAVCQCRRKNYGQLDIFPARDTYHPMSEYPTYHTHGRYVPPSSTDRSPYEKEWRVDRERLA

SEQ ID NO: 9078 - protein, 123 aa, Homo sapiens
MTPGTQSPFFLLLLLTVLTATTAPKPATVVTGSGHASSTPGGEKETSATQRSSVPSSTEKNALSTGVSFFFLSFHISNLQFNSSLEDPSTDYYQELQRDISEMFLQIYKQGGFLGLSNIKFSE

SEQ ID NO: 9079 - protein, 166 aa, Homo sapiens
MTPGTQSPFFLLLLLTVLTATTAPKPATVVTGSGHASSTPGGEKETSATQRSSVPSSTEKNASGAGVPGWGIALLVLVCVLVALAIVYLIALAVCQCRRKNYGQLDIFPARDTYHPMSEYPTYHTHGRYVPPSSTDRSPYEKVSAGNGGSSLSYTNPAVAATSANL

SEQ ID NO: 9080 - protein, 484 aa, Homo sapiens
MTPGTQSPFFLLLLLTVLTATTAPKPATVVTGSGHASSTPGGEKETSATQRSSVPSSTEKNAVSMTSSVLSSHSPGSGSSTTQGQDVTLAPATEPASGSAATWGQDVTSVPVTRPALGSTTPPAHDVTSAPDNKPAPGSTAPPAHGVTSAPDTRPAPGSTAPPAHGVTSAPDNRPALGSTAPPVHNVTSASGSASGSASTLVHNGTSARATTTPASKSTPFSIPSHHSDTPTTLASHSTKTDASSTHHSTVPPLTSSNHSTSPQLSTGVSFFFLSFHISNLQFNSSLEDPSTDYYQELQRDISEMFLQIYKQGGFLGLSNIKFRPGSVVVQLTLAFREGTINVHDVETQFNQYKTEAASRYNLTISDVSVSDVPFPFSAQSGAGVPGWGIALLVLVCVLVALAIVYLIALAVCQCRRKNYGQLDIFPARDTYHPMSEYPTYHTHGRYVPPSSTDRSPYEKVSAGNGGSSLSYTNPAVAATSANL

SEQ ID NO: 9081 - protein, 213 aa, Homo sapiens
MTPGTQSPFFLLLLLTVLTGSGHASSTPGGEKETSATQRSSVPSSTEKNAVSMTSSVLSSHSPGSGSSTTQGQDVTLAPATEPASGSAATWGQDVTSVPVTRPALGSTTPPAGVPGWGIALLVLVCVLVALAIVYLIALAVCQCRRKNYGQLDIFPARDTYHPMSEYPTYHTHGRYVPPSSTDRSPYEKVSAGNGGSSLSYTNPAVAATSANL

SEQ ID NO: 9082 - protein, 126 aa, Homo sapiens
MTPGTQSPFFLLLLLTVLTVVTGSGHASSTPGGEKETSATQRSSVPSSTEKNAALHQAQLLLWCTTAPLPGLPQPQPARALHSQFPATTLILLPPLPAIAPRLMPVALTIARSQHRLLPRAAERHF

SEQ ID NO: 9083 - protein, 255 aa, Homo sapiens
MTPGTQSPFFLLLLLTVLTVVTGSGHASSTPGGEKETSATQRSSVPSSTEKNAFNSSLEDPSTDYYQELQRDISEMFLQIYKQGGFLGLSNIKFRPGSVVVQLTLAFREGTINVHDVETQFNQYKTEAASRYNLTISDVSVSDVPFPFSAQSGAGVPGWGIALLVLVCVLVALAIVYLIALAVCQCRRKNYGQLDIFPARDTYHPMSEYPTYHTHGRYVPPSSTDRSPYEKVSAGNGGSSLSYTNPAVAATSANL

SEQ ID NO: 9084 - protein, 96 aa, Homo sapiens
MTPGTQSPFFLLLLLTVLTVVTGSGHASSTPGGEKETSATQRSSVPSSTEKNAFNSSLEDPSTDYYQELQRDISEMFLQIYKQGGFLGLSNIKFSE

SEQ ID NO: 9085 - protein, 149 aa, Homo sapiens
MTPGTQSPFFLLLLLTVLTVVTGSGHASSTPGGEKETSATQRSSVPSSTEKNAFNSSLEDPSTDYYQELQRDISEMFLQIYKQGGFLGLSNIKFSLGLGCQAGASRCWCWSVFWLRWPLSISLPWLSVSAAERTTGSWTSFQPGIPTIL

SEQ ID NO: 9086 - protein, 203 aa, Homo sapiens
MTPGTQSPFFLLLLLTVLTVVTGSGHASSTPGGEKETSATQRSSVPSSTEKNAIPAPTTTKSCRETFLKCFCRFINKGVFWASPILSSVSDVPFPFSAQSGAGVPGWGIALLVLVCVLVALAIVYLIALAVCQCRRKNYGQLDIFPARDTYHPMSEYPTYHTHGRYVPPSSTDRSPYEKVSAGNGGSSLSYTNPAVAATSANL

SEQ ID NO: 9087 - protein, 230 aa, Homo sapiens
MTPGTQSPFFLLLLLTVLTVVTGSGHASSTPGGEKETSATQRSSVPSSTEKNAIPAPTTTKSCRETFLKWPGSVVVQLTLAFREGTINVHDVETQFNQYKTEAASRYNLTISDVSVSDVPFPFSAQSGAGVPGWGIALLVLVCVLVALAIVYLIALAVCQCRRKNYGQLDIFPARDTYHPMSEYPTYHTHGRYVPPSSTDRSPYEKVSAGNGGSSLSYTNPAVAATSANL

SEQ ID NO: 9088 - protein, 229 aa, Homo sapiens
MTPGTQSPFFLLLLLTVLTVVTGSGHASSTPGGEKETSATQRSSVPSSTEKNAIYKQGGFLGLSNIKFRPGSVVVQLTLAFREGTINVHDVETQFNQYKTEAASRYNLTISDVSVSDVPFPFSAQSGAGVPGWGIALLVLVCVLVALAIVYLIALAVCQCRRKNYGQLDIFPARDTYHPMSEYPTYHTHGRYVPPSSTDRSPYEKVSAGNGGSSLSYTNPAVAATSANL

SEQ ID NO: 9089 - protein, 168 aa, Homo sapiens
MTPGTQSPFFLLLLLTVLTVVTGSGHASSTPGGEKETSATQRSSVPSSTEKNALSTGVSFFFLSFHISNLQFNSSLEDPSTDYYQELQRDISEMAVCQCRRKNYGQLDIFPARDTYHPMSEYPTYHTHGRYVPPSSTDRSPYEKVSAGNGGSSLSYTNPAVAATSANL

SEQ ID NO: 9090 - protein, 198 aa, Homo sapiens
MTPGTQSPFFLLLLLTVLTVVTGSGHASSTPGGEKETSATQRSSVPSSTEKNALSTGVSFFFLSFHISNLQFNSSLEDPSTDYYQELQRDISEMFLQIYKQGGFLGLSNIKFRPGSVVVQLTLAFREGTINVHDVETQFNQYKTEAASRYNLTISDVSGCLSVPPKELRAAGHLSSPGYLPSYERVPHLPHPWALCAP

SEQ ID NO: 9091 - protein, 273 aa, Homo sapiens
MTPGTQSPFFLLLLLTVLTVVTGSGHASSTPGGEKETSATQRSSVPSSTEKNALSTGVSFFFLSFHISNLQFNSSLEDPSTDYYQELQRDISEMFLQIYKQGGFLGLSNIKFRPGSVVVQLTLAFREGTINVHDVETQFNQYKTEAASRYNLTISDVSVSDVPFPFSAQSGAGVPGWGIALLVLVCVLVALAIVYLIALAVCQCRRKNYGQLDIFPARDTYHPMSEYPTYHTHGRYVPPSSTDRSPYEKVSAGNGGSSLSYTNPAVAATSANL

SEQ ID NO: 9092 - protein, 475 aa, Homo sapiens
MTPGTQSPFFLLLLLTVLTVVTGSGHASSTPGGEKETSATQRSSVPSSTEKNAVSMTSSVLSSHSPGSGSSTTQGQDVTLAPATEPASGSAATWGQDVTSVPVTRPALGSTTPPAHDVTSAPDNKPAPGSTAPPAHGVTSAPDTRPAPGSTAPPAHGVTSAPDNRPALGSTAPPVHNVTSASGSASGSASTLVHNGTSARATTTPASKSTPFSIPSHHSDTPTTLASHSTKTDASSTHHSTVPPLTSSNHSTSPQLSTGVSFFFLSFHISNLQFNSSLEDPSTDYYQELQRDISEMFLQIYKQGGFLGLSNIKFRPGSVVVQLTLAFREGTINVHDVETQFNQYKTEAASRYNLTISDVSVSDVPFPFSAQSGAGVPGWGIALLVLVCVLVALAIVYLIALAVCQCRRKNYGQLDIFPARDTYHPMSEYPTYHTHGRYVPPSSTDRSPYEKVSAGNGGSSLSYTNPAVAATSANL

SEQ ID NO: 9093 - protein, 1262 aa, Homo sapiens
MTPGTQSPFFLLLLLTVLTVVTGSGHASSTPGGEKETSATQRSSVPSSTEKNAVSMTSSVLSSHSPGSGSSTTQGQDVTLAPATEPASGSAATWGQDVTSVPVTRPALGSTTPPAHDVTSAPDNKPAPGSTAPPAHGVTSAPDTRPAPGSTAPQAHGVTSAPDTRPAPGSTAPPAHGVTSAPDTRPAPGSTAPPAHGVTSAPDTRSAPGSTAPAAHGVTSAPDTRSVPGSTAPQAHGVTSAPDTRPAPGSTAPPAHGVTSAPDTRPVPGSTAPPAHGVTSAPDTRPAPGSTAPPAHGVTSAPDTRPAPGSTAPQAHGVTSAPDTRPAPGSTAPPAHGVTSAPDTRPAPGSTAPPAHGVTSAPDTRPAPGSTAPAAHGVTSAPDTRPAPGSTAPQAHGVTSAPDTRPAPGSTAPPAHGVTSAPDTRPAPGSTAPPAHGVTSAPDTRPAPGSTAPPAHGVTSAPDTRPAPGSTAPAAHGVTSAPDTRPAPGSTAPQAHGVTSAPDTRPAPGSTAPPAHGVTSAPDTRPAPGSTAPPAHGVTSAPDTRPAPGSTAPPTHGVTSAPDTSPAPGSTAPPAHGVTSAPDTRPAPGYTAPAAHGVTSAPDTRPAPGSTAPQAHGVTSAPDTRPAPGSTAPPAHGVTSAPDTRPAPGSTAPPAHGVTSAPDTRPAPGSTAPPAHGVTSAPESRPAPGSTARAAHGVTSAPESRPAPGSTAPPAHGVTSAPDTRPAPGSTAPPAHGVTSAPDTRPAPGSTAPPAHGVTSAPDTRPAPGSTAPPAHGVTSAPDTRPAPGSTAPPAHGVTSAPDTRPSPPGSTAPPAHGVTSAPDTRPAPGSTAPPVHGVTSAPDTRPAPGSTAPPAHGVTSAPDTRPAPGSTAPPAHGVTSAPDTRPAPGSTAPPAHGVTSAPDTRRAPGSTPAPGSTAPPAHGVTSAPDTRPAPGSTAPPAHGVTSAPDNRPALGSTAPPVHNVTSASGSASGSASTLVHNGTSARATTTPASKSTPFSIPSHHSDTPTTLASHSTKTDASSTHHSTVPPLTSSNHSTSPQLSTGVSFFFLSFHISNLQFNSSLEDPSTDYYQELQRDISEMFLQIYKQGGFLGLSNIKFRPGSVVVQLTLAFREGTINVHDVETQFNQYKTEAASRYNLTISDVSVSDVPFPFSAQSGAGVPGWGIALLVLVCVLVALAIVYLIALAVCQCRRKNYGQLDIFPARDTYHPMSEYPTYHTHGRYVPPSSTDRSPYEKVSAGNGGSSLSYTNPAVAATSANL

SEQ ID NO: 9094 - protein, 85 aa, Homo sapiens
TEAASRYNLTISDVSVWGWGARLGHRAAGAGLCSGCAGHCLSHCLGCLSVPPKELRAAGHLSSPGYLPSYERVPHLPHPWALCAP

SEQ ID NO: 9095 - protein, 512 aa, Homo sapiens
MKAIIHLTLLALLSVNTATNQGNSADAVTTTETATSGPTVAAADTTETNFPETASTTANTPSFPTATSPAPPIISTHSSSTIPTPAPPIISTHSSSTIPIPTAADSESTTNVNSLATSDIITASSPNDGLITMVPSETQSNNEMSPTTEDNQSSGPPTGTALLETSTLNSTGPSNPCQDDPCADNSLCVKLHNTSFCLCLEGYYYNSSTCKKGKVFPGKISVTVSETFDPEEKHSMAYQDLHSEITSLFKDVFGTSVYGQTVILTVSTSLSPRSEMRADDKFVNVTIVTILAETTSDNEKTVTEKINKAIRSSSSNFLNYDLTLRCDYYGCNQTADDCLNGLACDCKSDLQRPNPQSPFCVASSLKCPDACNAQHKQCLIKKSGGAPECACVPGYQEDANGNCQKCAFGYSGLDCKDKFQLILTIVGTIAGIVILSMIIALIVTARSNNKTKHIEEENLIDEDFQNLKLRSTGFTNLGAEGSVFPKVRITASRDSQMQNPYSRHSSMPRPDY

SEQ ID NO: 9096 - protein, 184 aa, Homo sapiens
MKAIIHLTLLALLSVNTEDNQSSGPPTGTALLETSTLNSTGPSNPCQDDPCADNSLCVKLHNTSFCLCLEGYYYNSSTCKKGKVFPGKISVTVSETFDPEEKHSMAYQDLHSEITSLFKDVFGTSVYGQTVILTVSTSLSPRSEMRADDKFVNVTIVTILAETTSDNEKTVTEKINKAIRSSSS

SEQ ID NO: 9097 - protein, 709 aa, Homo sapiens
MGCLWGLALPLFFFCWEVGVSGSSAGPSTRRADTAMTTDDTEVPAMTLAPGHAALETQTLSAETSSRASTPAGPIPEAETRGAKRISPARETRSFTKTSPNFMVLIATSVETSAASGSPEGAGMTTVQTITGSDPREAIFDTLCTDDSSEEAKTLTMDILTLAHTSTEAKGLSSESSASSDSPHPVITPSRASESSASSDGPHPVITPSRASESSASSDGPHPVITPSRASESSASSDGPHPVITPSRASESSASSDGPHPVITPSRASESSASSDGPHPVITPSRASESSASSDGPHPVITPSRASESSASSDGPHPVITPSRASESSASSDGPHPVITPSRASESSASSDGLHPVITPSRASESSASSDGPHPVITPSRASESSASSDGPHPVITPSWSPGSDVTLLAEALVTVTNIEVINCSITEIETTTSSIPGASDTDLIPTEGVKASSTSDPPALPDSTEAKPHITEVTASAETLSTAGTTESAAPDATVGTPLPTNSATEREVTAPGATTLSGALVTVSRNPLEETSALSVETPSYVKVSGAAPVSIEAGSAVGKTTSFAGSSASSYSPSEAALKNFTPSETPTMDIATKGPFPTSRDPLPSVPPTTTNSSRGTNSTLAKITTSAKTTMKPPTATPTTARTRPTTDVSAGENGGFLLLRLSVASPEDLTDPRVAERLMQQLHRELHAHAPHFQVSLLRVRRG

SEQ ID NO: 9098 - protein, 723 aa, Homo sapiens
MGCLWGLALPLFFFCWEVGVSGSSAGPSTRRADTAMTTDDTEVPAMTLAPGHAALETQTLSAETSSRASTPAGPIPEAETRGAKRISPARETRSFTKTSPNFMVLIATSVETSAASGSPEGAGMTTVQTITGSDPREAIFDTLCTDDSSEEAKTLTMDILTLAHTSTEAKGLSSESSASSDSPHPVITPSRASESSASSDGPHPVITPSRASESSASSDGPHPVITPSRASESSASSDGPHPVITPSRASESSASSDGPHPVITPSRASESSASSDGPHPVITPSRASESSASSDGPHPVITPSRASESSASSDGPHPVITPSRASESSASSDGPHPVITPSRASESSASSDGLHPVITPSRASESSASSDGPHPVITPSRASESSASSDGPHPVITPSWSPGSDVTLLAEALVTVTNIEVINCSITEIETTTSSIPGASDTDLIPTEGVKASSTSDPPALPDSTEAKPHITEVTASAETLSTAGTTESAAPDATVGTPLPTNSATEREVTAPGATTLSGALVTVSRNPLEETSALSVETPSYVKVSGAAPVSIEAGSAVGKTTSFAGSSASSYSPSEAALKNFTPSETPTMDIATKGPFPTSRDPLPSVPPTTTNSSRGTNSTLAKITTSAKTTMKPPTATPTTARTRPTTDVSAGENGGFLLLRLSVASPEDLTDPRVAERLMQQMERSLALSPRLECSGVISAHCKLHLLGSRDSPASAS

SEQ ID NO: 9099 - protein, 538 aa, Homo sapiens
MGCLWGLALPLFFFCWEVGVSGSSAGPSTRRADTAMTTDDTEVPAMTLAPGHAALETQTLSAETSSRASTPAGPIPEAETRGAKRISPARETRSFTKTSPNFMVLIATSVETSAASGSPEGAGMTTVQTITGSDPREAIFDTLCTDDSSEEAKTLTMDILTLAHTSTEAKGLSSESSASSDSPHPVITPSRASESSASSDGPHPVITPSRASESSASSDGPHPVITPSWSPGSDVTLLAEALVTVTNIEVINCSITEIETTTSSIPGASDTDLIPTEGVKASSTSDPPALPDSTEAKPHITEVTASAETLSTAGTTESAAPDATVGTPLPTNSATEREVTAPGATTLSGALVTVSRNPLEETSALSVETPSYVKVSGAAPVSIEAGSAVGKTTSFAGSSASSYSPSEAALKNFTPSETPTMDIATKGPFPTSRDPLPSVPPTTTNSSRGTNSTLAKITTSAKTTMKPPTATPTTARTRPTTDVSAGENGGFLLLRLSVASPEDLTDPRVAERLMQQLHRELHAHAPHFQVSLLRVRRG

SEQ ID NO: 9100 - protein, 674 aa, Homo sapiens
MTTDDTEVPAMTLAPGHAALETQTLSAETSSRASTPAGPIPEAETRGAKRISPARETRSFTKTSPNFMVLIATSVETSAASGSPEGAGMTTVQTITGSDPREAIFDTLCTDDSSEEAKTLTMDILTLAHTSTEAKGLSSESSASSDSPHPVITPSRASESSASSDGPHPVITPSRASESSASSDGPHPVITPSRASESSASSDGPHPVITPSRASESSASSDGPHPVITPSRASESSASSDGPHPVITPSRASESSASSDGPHPVITPSRASESSASSDGPHPVITPSRASESSASSDGPHPVITPSRASESSASSDGLHPVITPSRASESSASSDGPHPVITPSRASESSASSDGPHPVITPSWSPGSDVTLLAEALVTVTNIEVINCSITEIETTTSSIPGASDTDLIPTEGVKASSTSDPPALPDSTEAKPHITEVTASAETLSTAGTTESAAPDATVGTPLPTNSATEREVTAPGATTLSGALVTVSRNPLEETSALSVETPSYVKVSGAAPVSIEAGSAVGKTTSFAGSSASSYSPSEAALKNFTPSETPTMDIATKGPFPTSRDPLPSVPPTTTNSSRGTNSTLAKITTSAKTTMKPPTATPTTARTRPTTDVSAGENGGFLLLRLSVASPEDLTDPRVAERLMQQLHRELHAHAPHFQVSLLRVRRG

SEQ ID NO: 9101 - protein, 128 aa, Homo sapiens
  SITE 1: note = misc_feature - Xaa can be any naturally occurring amino acid
XPTMDIATKGPFPTSRDPLPSVPPTTTNSSRGTNSTLAKITTSAKTTMKPPTATPTTARTRPTTDVSAGENGGFLLLRLSVASPEDLTDPRVAERLMQQLMTQGTHSAHVPSMVGVNPLPIVPGGFQH

SEQ ID NO: 9102 - protein, 3323 aa, Homo sapiens
MQLLGLLGLLWMLKASPWATGTLSTATSISQVPFPRAEAASAVLSNSPHSRDLAGWPLGVPQLASPAPGHRENAPMTLTTSPHDTLISETLLNSPVSSNTSTTPTSKFAFKVETTPPTVLVYSATTECVYPTSFIITISHPTSICVTTTQVAFTSSYTSTPVTQKPVTTVTSTYSMTTTEKGTSAMTSSPSTTTARETPIVTVTPSSVSATDTTFHTTISSTTRTTERTPLPTGSIHTTTSPTPVFTTLKTAVTSTSPITSSITSTNTVTSMTTTASQPTATNTLSSPTRTILSSTPVLSTETITSGITNTTPLSTLVTTLPTTISRSTPTSETTYTTSPTSTVTDSTTKIAYSTSMTGTLSTETSLPPTSSSLPTTETATTPMTNLVTTTTEISSHSTPSFSSSTIYSTVSTSTTAISSLPPTSGTMVTSTTMTPSSLSTDIPFTTPTTITHHSVGSTGFLTTATDLTSTFTVSSSSAMSTSVIPSSPSIQNTETSSLVSMTSATTPNVRPTFVSTLSTPTSSLLTTFPATYSFSSSMSASSAGTTHTESISSPPASTSTLHTTAESTLAPTTTTSFTTSTTMEPPSTTAATTGTGQTTFTSSTATFPETTTPTPTTDMSTESLTTAMTSPPITSSVTSTNTVTSMTTTTSPPTTTNSFTSLTSMPLSSTPVPSTEVVTSGTINTIPPSILVTTLPTPNASSMTTSETTYPNSPTGPGTNSTTEITYPTTMTETSSTATSLPPTSPLVSTAKTAKTPTTNLVTTTTKTTSHSTTSFTSSTVYSTASTYTTAITSVPTTLGTMVTSTSMISSTVSTGIPTSQPTTITPSSVGISGSLPMMTDLTSVYTVSNMSARPTTVIPSSPTVQNTEISISVSMTSATTPSGGPTFTSTENTPTRSLLTSFPMTHSFSSSMSESSAGTTHTESISSPRGTTSTLHTTVESTPSPTTTTSFTTSTMMEPPSSTVSTTGRGQTTFPSSTATFPETTTLTPTTDISTVSLTTAMTSPPPVSSSITPTNTMTSMRTTTYWPTATNTLSPLTSSILSSTPVPSTEMITSHTTNTTPLSTLVTTLLTTITRSTPTSETTYPTSPTSIVSDSTTEITYSTSITGTLSTATTLPPTSSSLPTTETATMTPTTTLITTTPNTTSLSTPSFTSSTIYSTVSTSTTAISSASPTSGTMVTSTTMTPSSLSTDTPSTTPTTITYPSVGSTGFLTTATDLTSTFTVSSSSAMSTSVIPSSPSIQNTETSSLVSMTSATTPSLRPTITSTDSTLTSSLLTTFPSTYSFSSSMSASSAGTTHTETISSLPASTNTIHTTAESALAPTTTTSFTTSPTMEPPSTTVATTGTGQTTFPSSTATFLETTTLTPTTDFSTESLTTAMTSTPPITSSITPTDTMTSMRTTTSWPTATNTLSPLTSSILSSTPVPSTEVTTSHTTNTNPVSTLVTTLPITITRSTLTSETAYPSSPTSTVTESTTEITYPTTMTETSSTATSLPPTSSLVSTAETAKTPTTNLVTTTTKTTSHSTTSFTSSTIYSTASTPTTAITSVPTTLGTMVTSTSMIPSTVSTGIPTSQPTTITPSSVGISGSLPMMTDLTSVYTVSSMSARPTSVIPSSPTVQNTETSIFVSMMSATTPSGGPTFTSTENTPTRSLLTSFPVTHSFSSSMSASSVGTTHTQSISSPPAITSTLHTTAESTPSPTTTMSFTTFTKMETPSSTVATTGTGQTTFTSSTATSPKTTTLTPTSDISTGSFKTAVSSTPPITSSITSTYTVTSMTTTTPLGPTATNTLPSFTSSVSSSTPVPSTEAITSGTTNTTPLSTLVTTFSNSDTSSTPTSETTYPTSLTSALTDSTTRTTYSTNMTGTLSTVTSLRPTSSSLLTTVTATVPTTNLVTTTTKITSHSTPSFTSSIATTETPSHSTPRFTSSITTTETPSHSTPRFTSSITNTKTTSHSSPSFTSSITTTETTSHNTPSLTSSITTTKTTSHSTPSYTSLITTTTTTSHSTPSFTSSITTTETTSHNTPSLTSSITTTETTSHSTPSFTSSITTETTSHSTPSFTSLITITEITSHSTLSYTTSITTTETPSHSTLSFTSSITTTETTSHSTPSFTSSITTSEMPSHSTPSFTSSITTTENATHSTPNFTSSITTTETTSHSTPSFTSLITTTETTSHRWGTTETTSYSTPSFTSSNTITETTSHSTPSYITSITTTETPSSSTPSFSSSITTTETTSHSTPGFTSSITTTETTSHSTPSFTSSITTTETTSHDTPSFTSSITTSETPSHSTPSSTSLITTTKTTSHSTPSFTSSITTTETTSHSAHSFTSSITTTETTSHNTRSFTSSITTTETNSHSTTSFTSSITTTETTSHSTPSFSSSITTTETPLHSTPGLTSWVTTTKTTSHITPGLTSSITTTETTSHSTPGFTSSITTTETTSESTPSLSSSTIYSTVSTSTTAITSHFTTSETAVTPTPVTPSSLSTDIPTTSLRTLTPSSVGTSTSLTTTTDFPSIPTDISTLPTRTHIISSSPSIQSTETSSLVGTTSPTMSTVRMTLRITENTPISSFSTSIVVIPETPTQTPPVLTSATGTQTSPAPTTVTFGSTDSSTSTLHTLTPSTALSTIVSTSQVPIPSTHSSTLQTTPSTPSLQTSLTSTSEFTTESFTRGSTSTNAILTSFSTIIWSSTPTIIMSSSPSSASITPVFSTTIHSVPSSPYIFSTENVGSASITGFPSLSSSATTSTSSTSSSLTTALTEITPFSYISLPSTTPCPGTITITIVPASPTDPCVEMDPSTEATSPPTTPLTVFPFTTEMVTCPTSISIQTTLTTYMDTSSMMPESESSISPNASSSTGTGTVPTNTVFTSTRLPTSETWLSNSSVIPLPLPGVSTIPLTMKPSSSLPTILRTSSKSTHPSPPTTRTSETPVATTQTPTTLTSRRTTRITSQMTTQSTLTTTAGTCDNGGTWEQGQCACLPGFSGDRCQLQTRCQNGGQWDGLKCQCPSTFYGSSCEFAVEQVDLDVVETEVGMEVSVDQQFSPDLNDNTSQAYRDFNKTFWNQMQKIFADMQGFTFKGVEILSLRNGSIVVDYLVLLEMPFSPQLESEYEQVKTTLKEGLQNASQDVNSCQDSQTLCFKPDSIKVNNNSKTELTPAAICRRAAPTGYEEFYFPLVEATRLRCVTKCTSGVDNAIDCHQGQCVLETSGPTCRCYSTDTHWFSGPRCEVAVHWRALVGGLTAGAALLVLLLLALGVRAVRSGWWGGQRRGRSWDQDRKWFETWDEEVVGTFSNWGFEDDGTDKDTNFYVALENVDTTMKVHIKRPEMTSSSV

SEQ ID NO: 9103 - protein, 3265 aa, Homo sapiens
MQLLGLLGLLWMLKASPWATGTLSTATSISQVPFPRAEAASAVLSNSPHSRDLAGWPLGVPQLASPAPGHRENAPMTLTTSPHDTLISETLLNSPVSSNTSTTPTSKFAFKVETTPPTVLVYSATTECVYPTSFIITISHPTSICVTTTQVAFTSSYTSTPVTQKPVTTVTSTYSMTTTEKGTSAMTSSPSTTTARETPIVTVTPSSVSATDTTFHTTISSTTRTTERTPLPTGSIHTTTSPTPVFTTLKTAVTSTSPITSSITSTNTVTSMTTTASQPTATNTLSSPTRTILSSTPVLSTETITSGITNTTPLSTLVTTLPTTISRSTPTSETTYTTSPTSTVTDSTTKIAYSTSMTGTLSTETSLPPTSSSLPTTETATTPMTNLVTTTTEISSHSTPSFSSSTIYSTVSTSTTAISSLPPTSGTMVTSTTMTPSSLSTDIPFTTPTTITHHSVGSTGFLTTATDLTSTFTVSSSSAMSTSVIPSSPSIQNTETSSLVSMTSATTPNVRPTFVSTLSTPTSSLLTTFPATYSFSSSMSASSAGTTHTESISSPPASTSTLHTTAESTLAPTTTTSFTTSTTMEPPSTTAATTGTGQTTFTSSTATFPETTTPTPTTDMSTESLTTAMTSPPITSSVTSTNTVTSMTTTTSPPTTTNSFTSLTSMPLSSTPVPSTEVVTSGTINTIPPSILVTTLPTPNASSMTTSETTYPNSPTGPGTNSTTEITYPTTMTETSSTATSLPPTSPLVSTAKTAKTPTTNLVTTTTKTTSHSTTSFTSSTVYSTASTYTTAITSVPTTLGTMVTSTSMISSTVSTGIPTSQPTTITPSSVGISGSLPMMTDLTSVYTVSNMSARPTTVIPSSPTVQNTEISISVSMTSATTPSGGPTFTSTENTPTRSLLTSFPMTHSFSSSMSESSAGTTHTESISSPRGTTSTLHTTVESTPSPTTTTSFTTSTMMEPPSSTVSTTGRGQTTFPSSTATFPETTTLTPTTDISTVSLTTAMTSPPPVSSSITPTNTMTSMRTTTYWPTATNTLSPLTSSILSSTPVPSTEMITSHTTNTTPLSTLVTTLLTTITRSTPTSETTYPTSPTSIVSDSTTEITYSTSITGTLSTATTLPPTSSSLPTTETATMTPTTTLITTTPNTTSLSTPSFTSSTIYSTVSTSTTAISSASPTSGTMVTSTTMTPSSLSTDTPSTTPTTITYPSVGSTGFLTTATDLTSTFTVSSSSAMSTSVIPSSPSIQNTETSSLVSMTSATTPSLRPTITSTDSTLTSSLLTTFPSTYSFSSSMSASSAGTTHTETISSLPASTNTIHTTAESALAPTTTTSFTTSPTMEPPSTTVATTGTGQTTFPSSTATFLETTTLTPTTDFSTESLTTAMTSTPPITSSITPTDTMTSMRTTTSWPTATNTLSPLTSSILSSTPVPSTEVTTSHTTNTNPVSTLVTTLPITITRSTLTSETAYPSSPTSTVTESTTEITYPTTMTETSSTATSLPPTSSLVSTAETAKTPTTNLVTTTTKTTSHSTTSFTSSTIYSTASTPTTAITSVPTTLGTMVTSTSMIPSTVSTGIPTSQPTTITPSSVGISGSLPMMTDLTSVYTVSSMSARPTSVIPSSPTVQNTETSIFVSMMSATTPSGGPTFTSTENTPTRSLLTSFPVTHSFSSSMSASSVGTTHTQSISSPPAITSTLHTTAESTPSPTTTMSFTTFTKMETPSSTVATTGTGQTTFTSSTATSPKTTTLTPTSDISTGSFKTAVSSTPPITSSITSTYTVTSMTTTTPLGPTATNTLPSFTSSVSSSTPVPSTEAITSGTTNTTPLSTLVTTFSNSDTSSTPTSETTYPTSLTSALTDSTTRTTYSTNMTGTLSTVTSLRPTSSSLLTTVTATVPTTNLVTTTTKITSHSTPSFTSSIATTETPSHSTPRFTSSITTTETPSHSTPRFTSSITNTKTTSHSSPSFTSSITTTETTSHNTPSLTSSITTTKTTSHSTPSYTSLITTTTTTSHSTPSFTSSITTTETTSHNTPSLTSSITTTETTSHSTPSFTSSITTETTSHSTPSFTSLITITEITSHSTLSYTTSITTTETPSHSTLSFTSSITTTETTSHSTPSFTSSITTSEMPSHSTPSFTSSITTTENATHSTPNFTSSITTTETTSHSTPSFTSLITTTETTSHRWGTTETTSYSTPSFTSSNTITETTSHSTPSYITSITTTETPSSSTPSFSSSITTTETTSHSTPGFTSSITTTETTSHSTPSFTSSITTTETTSHDTPSFTSSITTSETPSHSTPSSTSLITTTKTTSHSTPSFTSSITTTETTSHSAHSFTSSITTTETTSHNTRSFTSSITTTETNSHSTTSFTSSITTTETTSHSTPSFSSSITTTETPLHSTPGLTSWVTTTKTTSHITPGLTSSITTTETTSHSTPGFTSSITTTETTSESTPSLSSSTIYSTVSTSTTAITSHFTTSETAVTPTPVTPSSLSTDIPTTSLRTLTPSSVGTSTSLTTTTDFPSIPTDISTLPTRTHIISSSPSIQSTETSSLVGTTSPTMSTVRMTLRITENTPISSFSTSIVVIPETPTQTPPVLTSATGTQTSPAPTTVTFGSTDSSTSTLHTLTPSTALSTIVSTSQVPIPSTHSSTLQTTPSTPSLQTSLTSTSEFTTESFTRGSTSTNAILTSFSTIIWSSTPTIIMSSSPSSASITPVFSTTIHSVPSSPYIFSTENVGSASITGFPSLSSSATTSTSSTSSSLTTALTEITPFSYISLPSTTPCPGTITITIVPASPTDPCVEMDPSTEATSPPTTPLTVFPFTTEMVTCPTSISIQTTLTTYMDTSSMMPESESSISPNASSSTGTGTVPTNTVFTSTRLPTSETWLSNSSVIPLPLPGVSTIPLTMKPSSSLPTILRTSSKSTHPSPPTTRTSETPVATTQTPTTLTSRRTTRITSQMTTQSTLTTTAGTCDNGGTWEQGQCACLPGFSGDRCQLQTRCQNGGQWDGLKCQCPSTFYGSSCEFAVEQVDLDVVETEVGMEVSVDQQFSPDLNDNTSQAYRDFNKTFWNQMQKIFADMQGFTFKGVEILSLRNGSIVVDYLVLLEMPFSPQLESEYEQVKTTLKEGLQNASQDVNSCQDSQTLCFKPDSIKVNNNSKTELTPAAICRRAAPTGYEEFYFPLVEATRLRCVTKCTSGVDNAIDCHQGQCVLETSGPTCRSWDQDRKWFETWDEEVVGTFSNWGFEDDGTDKDTNFYVALENVDTTMKVHIKRPEMTSSSV

SEQ ID NO: 9104 - protein, 1002 aa, Homo sapiens
  SITE 1: note = misc_feature - Xaa can be any naturally occurring amino acid
XITITEITSHSTLSYTTSITTTETPSHSTLSFTSSITTTETTSHSTPSFTSSITTSEMPSHSTPSFTSSITTTENATHSTPNFTSSITTTETTSHSTPSFTSLITTTETTSHRWGTTETTSYSTPSFTSSNTITETTSHSTPSYITSITTTETPSSSTPSFSSSITTTETTSHSTPGFTSSITTTETTSHSTPSFTSSITTTETTSHDTPSFTSSITTSETPSHSTPSSTSLITTTKTTSHSTPSFTSSITTTETTSHSAHSFTSSITTTETTSHNTRSFTSSITTTETNSHSTTSFTSSITTTETTSHSTPSFSSSITTTETPLHSTPGLTSWVTTTKTTSHITPGLTSSITTTETTSHSTPGFTSSITTTETTSESTPSLSSSTIYSTVSTSTTAITSHFTTSETAVTPTPVTPSSLSTDIPTTSLRTLTPSSVGTSTSLTTTTDFPSIPTDISTLPTRTHIISSSPSIQSTETSSLVGTTSPTMSTVRMTLRITENTPISSFSTSIVVIPETPTQTPPVLTSATGTQTSPAPTTVTFGSTDSSTSTLHTLTPSTALSTIVSTSQVPIPSTHSSTLQTTPSTPSLQTSLTSTSEFTTESFTRGSTSTNAILTSFSTIIWSSTPTIIMSSSPSSASITPVFSTTIHSVPSSPYIFSTENVGSASITGFPSLSSSATTSTSSTSSSLTTALTEITPFSYISLPSTTPCPGTITITIVPASPTDPCVEMDPSTEATSPPTTPLTVFPFTTEMVTCPTSISIQTTLTTYMDTSSMMPESESSISPNASSSTGTGTVPTNTVFTSTRLPTSETWLSNSSVIPLPLPGVSTIPLTMKPSSSLPTILRTSSKSTHPSPPTTRTSETPVATTQTPTTLTSRRTTRITSQMTTQSTLTTTAGTCDNGGTWEQGQCACLPGFSGDRCQLQTRCQNGGQWDGLKCQCPSTFYGSSCEFAVEQVDLDAEDFCRHAGLHLQGCGDPVPEEWQHRGGLPGPAGDALQPPAGERV

SEQ ID NO: 9105 - protein, 5654 aa, Homo sapiens
MSVGRRKLALLWALALALACTRHTGHAQDGSSESSYKHHPALSPIARGPSGVPLRGATVFPSLRTIPVVRASNPAHNGRVCSTWGSFHYKTFDGDVFRFPGLCNYVFSEHCGAAYEDFNIQLRRSQESAAPTLSRVLMKVDGVVIQLTKGSVLVNGHPVLLPFSQSGVLIQQSSSYTKVEARLGLVLMWNHDDSLLLELDTKYANKTCGLCGDFNGMPVVSELLSHNTKLTPMEFGNLQKMDDPTDQCQDPVPEPPRNCSTGFGICEELLHGQLFSGCVALVDVGSYLEACRQDLCFCEDTDLLSCVCHTLAEYSRQCTHAGGLPQDWRGPDFCPQKCPNNMQYHECRSPCADTCSNQEHSRACEDHCVAGCFCPEGTVLDDIGQTGCVPVSKCACVYNGAAYAPGATYSTDCTNCTCSGGRWSCQEVPCPGTCSVLGGAHFSTFDGKQYTVHGDCSYVLTKPCDSSAFTVLAELRRCGLTDSETCLKSVTLSLDGAQTVVVIKASGEVFLNQIYTQLPISAANVTIFRPSTFFIIAQTSLGLQLNLQLVPTMQLFMQLAPKLRGQTCGLCGNFNSIQADDFRTLSGVVEATAAAFFNTFKTQAACPNIRNSFEDPCSLSVENEKYAQHWCSQLTDADGPFGRCHAAVKPGTYYSNCMFDTCNCERSEDCLCAALSSYVHACAAKGVQLGGWRDGVCTKPMTTCPKSMTYHYHVSTCQPTCRSLSEGDITCSVGFIPVDGCICPKGTFLDDTGKCVQASNCPCYHRGSMIPNGESVHDSGAICTCTHGKLSCIGGQAPAPVCAAPMVFFDCRNATPGDTGAGCQKSCHTLDMTCYSPQCVPGCVCPDGLVADGEGGCITAEDCPCVHNEASYRAGQTIRVGCNTCTCDSRMWRCTDDPCLATCAVYGDGHYLTFDGQSYSFNGDCEYTLVQNHCGGKDSTQDSFRVVTENVPCGTTGTTCSKAIKIFLGGFELKLSHGKVEVIGTDESQEVPYTIRQMGIYLVVDTDIGLVLLWDKKTSIFINLSPEFKGRVCGLCGNFDDIAVNDFATRSRSVVGDVLEFGNSWKLSPSCPDALAPKDPCTANPFRKSWAQKQCSILHGPTFAACHAHVEPARYYEACVNDACACDSGGDCECFCTAVAAYAQACHEVGLCVSWRTPSICPLFCDYYNPEGQCEWHYQPCGVPCLRTCRNPRGDCLRDVRGLEGCYPKCPPEAPIFDEDKMQCVATCPTPPLPPRCHVHGKSYRPGAVVPSDKNCQSCLCTERGVECTYKAEACVCTYNGQRFHPGDVIYHTTDGTGGCISARCGANGTIERRVYPCSPTTPVPPTTFSFSTPPLVVSSTHTPSNGPSSAHTGPPSSAWPTTAGTSPRTRLPTASASLPPVCGEKCLWSPWMDVSRPGRGTDSGDFDTLENLRAHGYRVCESPRSVECRAEDAPGVPLRALGQRVQCSPDVGLTCRNREQASGLCYNYQIRVQCCTPLPCSTSSSPAQTTPPTTSKTTETRASGSSAPSSTPGTVSLSTARTTPAPGTATSVKKTFSTPSPPPVPATSTSSMSTTAPGTSVVSSKPTPTEPSTSSCLQELCTWTEWIDGSYPAPGINGGDFDTFQNLRDEGYTFCESPRSVQCRAESFPNTPLADLGQDVICSHTEGLICLNKNQLPPICYNYEIRIQCCETVNVCRDITRLPKTVATTRPTPHPTGAQTQTTFTTHMPSASTEQPTATSRGGPTATSVTQGTHTTLVTRNCHPRCTWTKWFDVDFPSPGPHGGDKETYNNIIRSGEKICRRPEEITRLQCRAKSHPEVSIEHLGQVVQCSREEGLVCRNQDQQGPFKMCLNYEVRVLCCETPRGCHMTSTPGSTSSSPAQTTPSTTSKTTETQASGSSAPSSTPGTVSLSTARTTPAPGTATSVKKTFSTPSPPPVPATSTSSMSTTAPGTSVVSSKPTPTEPSTSSCLQELCTWTEWIDGSYPAPGINGGDFDTFQNLRDEGYTFCESPRSVQCRAESFPNTPLADLGQDVICSHTEGLICLNKNQLPPICYNYEIRIQCCETVNVCRDITRPPKTVATTRPTPHPTGAQTQTTFTTHMPSASTEQPTATSRGGPTATSVTQGTHTTPVTRNCHPRCTWTTWFDVDFPSPGPHGGDKETYNNIIRSGEKICRRPEEITRLQCRAKSHPEVSIEHLGQVVQCSREEGLVCRNQDQQGPFKMCLNYEVRVLCCETPKGCPVTSTPVTAPSTPSGRATSPTQSTSSWQKSRTTTLVTTSTTSTPQTSTTYAHTTSTTSAPTARTTSAPTTRTTSASPASTTSGPGNTPSPVPTTSTISAPTTSITSAPTTSTTSAPTSSTTSGPGTTPSPVPTTSITSAPTTSTTSAPTTSTTSARTSSTTSATTTSRISGPETTPSPVPTTSTTSATTTSTTSAPTTSTTSAPTSSTTSSPQTSTTSAPTTSTTSGPGTTPSPVPTTSTTSAPTTRTTSAPKSSTTSAATTSTTSGPETTPRPVPTTSTTSSPTTSTTSAPTTSTTSASTTSTTSGAGTTPSPVPTTSTTSAPTTSTTSAPISSTTSATTTSTTSGPGTTPSPVPTTSTTSAPTTSTTSGPGTTPSAVPTTSITSAPTTSTNSAPISSTTSATTTSRISGPETTPSPVPTASTTSASTTSTTSGPGTTPSPVPTTSTISVPTTSTTSASTTSTTSASTTSTTSGPGTTPSPVPTTSTTSAPTTSTTSAPTTSTISAPTTSTTSATTTSTTSAPTPRRTSAPTTSTISASTTSTTSATTTSTTSATTTSTISAPTTSTTLSPTTSTTSTTITSTTSAPISSTTSTPQTSTTSAPTTSTTSGPGTTSSPVPTTSTTSAPTTSTTSAPTTRTTSVPTSSTTSTATTSTTSGPGTTPSPVPTTSTTSAPTTRTTSAPTTSTTSAPTTSTTSAPTSSTTSATTTSTISVPTTSTTSVPGTTPSPVPTTSTISVPTTSTTSASTTSTTSGPGTTPSPVPTTSTTSAPTTSTTSAPTTSTISAPTTSTPSAPTTSTTLAPTTSTTSAPTTSTTSTPTSSTTSSPQTSTTSASTTSITSGPGTTPSPVPTTSTTSAPTTSTTSAATTSTISAPTTSTTSAPTTSTTSASTASKTSGLGTTPSPIPTTSTTSPPTTSTTSASTASKTSGPGTTPSPVPTTSTIFAPRTSTTSASTTSTTPGPGTTPSPVPTTSTASVSKTSTSHVSISKTTHSQPVTRDCHLRCTWTKWFDIDFPSPGPHGGDKETYNNIIRSGEKICRRPEEITRLQCRAESHPEVSIEHLGQVVQCSREEGLVCRNQDQQGPFKMCLNYEVRVLCCETPKGCPVTSTPVTAPSTPSGRATSPTQSTSSWQKSRTTTLVTTSTTSTPQTSTTSAPTTSTTSAPTTSTTSAPTTSTTSTPQTSISSAPTSSTTSAPTSSTISARTTSIISAPTTSTTSSPTTSTTSATTTSTTSAPTSSTTSTPQTSKTSAATSSTTSGSGTTPSPVTTTSTASVSKTSTSHVSVSKTTHSQPVTRDCHPRCTWTKWFDVDFPSPGPHGGDKETYNNIIRSGEKICRRPEEITRLQCRAKSHPEVSIEHLGQVVQCSREEGLVCRNQDQQGPFKMCLNYEVRVLCCETPKGCPVTSTSVTAPSTPSGRATSPTQSTSSWQKSRTTTLVTSSITSTTQTSTTSAPTTSTTPASIPSTTSAPTTSTTSAPTTSTTSAPTTSTTSTPQTTTSSAPTSSTTSAPTTSTISAPTTSTISAPTTSTTSAPTASTTSAPTSTSSAPTTNTTSAPTTSTTSAPITSTISAPTTSTTSTPQTSTISSPTTSTTSTPQTSTTSSPTTSTTSAPTTSTTSAPTTSTTSTPQTSISSAPTSSTTSAPTASTISAPTTSTTSFHTTSTTSPPTSSTSSTPQTSKTSAATSSTTSGSGTTPSPVPTTSTASVSKTSTSHVSVSKTTHSQPVTRDCHPRCTWTKWFDVDFPSPGPHGGDKETYNNIIRSGEKICRRPEEITRLQCRAESHPEVSIEHLGQVVQCSREEGLVCRNQDQQGPFKMCLNYEVRVLCCETPKGCPVTSTPVTAPSTPSGRATSPTQSTSSWQKSRTTTLVTTSTTSTPQTSTTSAPTTSTIPASTPSTTSAPTTSTTSAPTTSTTSAPTHRTTSGPTTSTTLAPTTSTTSAPTTSTNSAPTTSTISASTTSTISAPTTSTISSPTSSTTSTPQTSKTSAATSSTTSGSGTTPSPVPTTSTTSASTTSTTSAPTTSTTSGPGTTPSPVPSTSTTSAATTSTTSAPTTRTTSAPTSSMTSGPGTTPSPVPTTSTTSAPTTSTTSGPGTTPSPVPTTSTTSAPITSTTSGPGSTPSPVPTTSTTSAPTTSTTSASTASTTSGPGTTPSPVPTTSTTSAPTTRTTSASTASTTSGPGSTPSPVPTTSTTSAPTTRTTPASTASTTSGPGTTPSPVPTTSTTSASTTSTISLPTTSTTSAPITSMTSGPGTTPSPVPTTSTTSAPTTSTTSASTASTTSGPGTTPSPVPTTSTTSAPTTSTTSASTASTTSGPGTSLSPVPTTSTTSAPTTSTTSGPGTTPSPVPTTSTTSAPTTSTTSGPGTTPSPVPTTSTTPVSKTSTSHLSVSKTTHSQPVTSDCHPLCAWTKWFDVDFPSPGPHGGDKETYNNIIRSGEKICRRPEEITRLQCRAESHPEVNIEHLGQVVQCSREEGLVCRNQDQQGPFKMCLNYEVRVLCCETPRGCPVTSVTPYGTSPTNALYPSLSTSMVSASVASTSVASSSVASSSVAYSTQTCFCNVADRLYPAGSTIYRHRDLAGHCYYALCSQDCQVVRGVDSDCPSTTLPPAPATSPSISTSEPVTELGCPNAVPPRKKGETWATPNCSEATCEGNNVISLRPRTCPRVEKPTCANGYPAVKVADQDGCCHHYQCQCVCSGWGDPHYITFDGTYYTFLDNCTYVLVQQIVPVYGHFRVLVDNYFCGAEDGLSCPRSIILEYHQDRVVLTRKPVHGVMTNEIIFNNKVVSPGFRKNGIVVSRIGVKMYATIPELGVQVMFSGLIFSVEVPFSKFANNTEGQCGTCTNDRKDECRTPRGTVVASCSEMSGLWNVSIPDQPACHRPHPTPTTVGPTTVGSTTVGPTTVGSTTVGPTTPPAPCLPSPICQLILSKVFEPCHTVIPPLLFYEGCVFDRCHMTDLDVVCSSLELYAALCASHDICIDWRGRTGHMCPFTCPADKVYQPCGPSNPSYCYGNDSASLGALPEAGPITEGCFCPEGMTLFSTSAQVCVPTGCPRCLGPHGEPVKVGHTVGMDCQECTCEAATWTLTCRPKLCPLPPACPLPGFVPVPAAPQAGQCCPQYSCACNTSRCPAPVGCPEGARAIPTYQEGACCPVQNCSWTVCSINGTLYQPGAVVSSSLCETCRCELPGGPPSDAFVVSCETQICNTHCPVGFEYQEQSGQCCGTCVQVACVTNTSKSPAHLFYPGETWSDAGNHCVTHQCEKHQDGLVVVTTKKACPPLSCSLDEARMSKDGCCRFCPPPPPPYQNQSTCAVYHRSLIIQQQGCSSSEPVRLAYCRGNCGDSSSMYSLEGNTVEHRCQCCQELRTSLRNVTLHCTDGSSRAFSYTEVEECGCMGRRCPAPGDTQHSEEAEPEPSQEAESGSWERGVPVSPMH

SEQ ID NO: 9106 - protein, 5762 aa, Homo sapiens
MGAPSACRTLVLALAAMLVVPQAETQGPVEPSWENAGHTMDGGAPTSSPTRRVSFVPPVTVFPSLSPLNPAHNGRVCSTWGDFHYKTFDGDVFRFPGLCNYVFSEHCRAAYEDFNVQLRRGLVGSRPVVTRVVIKAQGLVLEASNGSVLINGQREELPYSRTGLLVEQSGDYIKVSIRLVLTFLWNGEDSALLELDPKYANQTCGLCGDFNGLPAFNEFYAHNARLTPLQFGNLQKLDGPTEQCPDPLPLPAGNCTDEEGICHRTLLGPAFAECHALVDSTAYLAACAQDLCRCPTCPCATFVEYSRQCAHAGGQPRNWRCPELCPRTCPLNMQHQECGSPCTDTCSNPQRAQLCEDHCVDGCFCPPGTVLDDITHSGCLPLGQCPCTHGGRTYSPGTSFNTTCSSCTCSGGLWQCQDLPCPGTCSVQGGAHISTYDEKLYDLHGDCSYVLSKKCADSSFTVLAELRKCGLTDNENCLKAVTLSLDGGDTAIRVQADGGVFLNSIYTQLPLSAANITLFTPSSFFIVVQTGLGLQLLVQLVPLMQVFVRLDPAHQGQMCGLCGNFNQNQADDFTALSGVVEATGAAFANTWKAQAACANARNSFEDPCSLSVENENYARHWCSRLTDPNSAFSRCHSIINPKPFHSNCMFDTCNCERSEDCLCAALSSYVHACAAKGVQLSDWRDGVCTKYMQNCPKSQRYAYVVDACQPTCRGLSEADVTCSVSFVPVDGCTCPAGTFLNDAGACVPAQECPCYAHGTVLAPGEVVHDEGAVCSCTGGKLSCLGASLQKSTGCAAPMVYLDCSNSSAGTPGAECLRSCHTLDVGCFSTHCVSGCVCPPGLVSDGSGGCIAEEDCPCVHNEATYKPGETIRVDCNTCTCRNRRWECSHRLCLGTCVAYGDGHFITFDGDRYSFEGSCEYILAQDYCGDNTTHGTFRIVTENIPCGTTGTTCSKAIKLFVESYELILQEGTFKAVARGPGGDPPYKIRYMGIFLVIETHGMAVSWDRKTSVFIRLHQDYKGRVCGLCGNFDDNAINDFATRSRSVVGDALEFGNSWKLSPSCPDALAPKDPCTANPFRKSWAQKQCSILHGPTFAACRSQVDSTKYYEACVNDACACDSGGDCECFCTAVAAYAQACHDAGLCVSWRTPDTCPLFCDFYNPHGGCEWHYQPCGAPCLKTCRNPSGHCLVDLPGLEGCYPKCPPSQPFFNEDQMKCVAQCGCYDKDGNYYDVGARVPTAENCQSCNCTPSGIQCAHSLEACTCTYEDRTYSYQDVIYNTTDGLGACLIAICGSNGTIIRKAVACPGTPATTPFTFTTAWVPHSTTSPALPVSTVCVREVCRWSSWYNGHRPEPGLGGGDFETFENLRQRGYQVCPVLADIECRAAQLPDMPLEELGQQVDCDRMRGLMCANSQQSPPLCHDYELRVLCCEYVPCGPSPAPGTSPQPSLSASTEPAVPTPTQTTATEKTTLWVTPSIRSTAALTSQTGSSSGPVTVTPSAPGTTTCQPRCQWTEWFDEDYPKSEQLGGDVESYDKIRAAGGHLCQQPKDIECQAESFPNWTLAQVGQKVHCDVHFGLVCRNWEQEGVFKMCYNYRIRVLCCSDDHCRGRATTPPPTTELETATTTTTQALFSTPQPTSSPGLTRAPPASTTAVPTLSEGLTSPRYTSTLGTATTGGPTTPAGSTEPTVPGVATSTLPTRSALPGTTGSLGTWRPSQPPTLAPTTMATSRARPTGTASTASKEPLTTSLAPTLTSELSTSQAETSTPRTETTMSPLTNTTTSQGTTRCQPKCEWTEWFDVDFPTSGVAGGDMETFENIRAAGGKMCWAPKSIECRAENYPEVSIDQVGQVLTCSLETGLTCKNEDQTGRFNMCFNYNVRVLCCDDYSHCPSTPATSSTATPSSTPGTTWILTKPTTTATTTASTGSTATPTSTLRTAPPPKVLTTTATTPTVTSSKATPSSSPGTATALPALRSTATTPTATSVTPIPSSSLGTTWTRLSQTTTPTATMSTATPSSTPETAHTSTVLTATATTTGATGSVATPSSTPGTAHTTKVPTTTTTGFTATPSSSPGTALTPPVWISTTTTPTTRGSTVTPSSIPGTTHTATVLTTTTTTVATGSMATPSSSTQTSGTPPSLTTTATTITATGSTTNPSSTPGTTPIPPVLTTTATTPAATSNTVTPSSALGTTHTPPVPNTMATTHGRSLPPSSPHTVRTAWTSATSGILGTTHITEPSTVTSHTLAATTGTTQHSTPALSSPHPSSRTTESPPSPGTTTPGHTTATSRTTATATPSKTRTSTLLPSSPTSAPITTVVTMGCEPQCAWSEWLDYSYPMPGPSGGDFDTYSNIRAAGGAVCEQPLGLECRAQAQPGVPLRELGQVVECSLDFGLVCRNREQVGKFKMCFNYEIRVFCCNYGHCPSTPATSSTAMPSSTPGTTWILTELTTTATTTESTGSTATPSSTPGTTWILTEPSTTATVTVPTGSTATASSTQATAGTPHVSTTATTPTVTSSKATPFSSPGTATALPALRSTATTPTATSFTAIPSSSLGTTWTRLSQTTTPTATMSTATPSSTPETVHTSTVLTTTATTTGATGSVATPSSTPGTAHTTKVLTTTTTGFTATPSSSPGTARTLPVWISTTTTPTTRGSTVTPSSIPGTTHTPTVLTTTTTTVATGSMATPSSSTQTSGTPPSLTTTATTITATGSTTNPSSTPGTTPIPPVLTTTATTPAATSSTVTPSSALGTTHTPPVPNTTATTHGRSLSPSSPHTVRTAWTSATSGTLGTTHITEPSTGTSHTPAATTGTTQHSTPALSSPHPSSRTTESPPSPGTTTPGHTRATSRTTATATPSKTRTSTLLPSSPTSAPITTVVTMGCEPQCAWSEWLDYSYPMPGPSGGDFDTYSNIRAAGGAVCEQPLGLECRAQAQPGVPLRELGQVVECSLDFGLVCRNREQVGKFKMCFNYEIRVFCCNYGHCPSTPATSSTATPSSTPGTTWILTEQTTAATTTATTGSTAIPSSTPGTAPPPKVLTSTATTPTATSSKATSSSSPRTATTLPVLTSTATKSTATSFTPIPSFTLGTTGTLPEQTTTPMATMSTIHPSSTPETTHTSTVLTTKATTTRATSSMSTPSSTPGTTWILTELTTAATTTAATGPTATPSSTPGTTWILTEPSTTATVTVPTGSTATASSTRATAGTLKVLTSTATTPTVISSRATPSSSPGTATALPALRSTATTPTATSVTAIPSSSLGTAWTRLSQTTTPTATMSTATPSSTPETVHTSTVLTTTTTTTRATGSVATPSSTPGTAHTTKVPTTTTTGFTATPSSSPGTALTPPVWISTTTTPTTRGSTVTPSSIPGTTHTATVLTTTTTTVATGSMATPSSSTQTSGTPPSLTTTATTITATGSTTNPSSTPGTTPIPPVLTTTATTPAATSSTVTPSSALGTTHTPPVPNTTATTHGRSLPPSSPHTVRTAWTSATSGILGTTHITEPSTVTSHTPAATTSTTQHSTPALSSPHPSSRTTESPPSPGTTTPGHTRGTSRTTATATPSKTRTSTLLPSSPTSAPITTVVTTGCEPQCAWSEWLDYSYPMPGPSGGDFDTYSNIRAAGGAVCEQPLGLECRAQAQPGVPLRELGQVVECSLDFGLVCRNREQVGKFKMCFNYEIRVFCCNYGHCPSTPATSSTATPSSTPGTTWILTKLTTTATTTESTGSTATPSSTPGTTWILTEPSTTATVTVPTGSTATASSTQATAGTPHVSTTATTPTVTSSKATPFSSPGTATALPALRSTATTPTATSFTAIPSSSLGTTWTRLSQTTTPTATMSTATPSSTPETAHTSTVLTTTATTTRATGSVATPSSTPGTAHTTKVPTTTTTGFTVTPSSSPGTARTPPVWISTTTTPTTSGSTVTPSSVPGTTHTPTVLTTTTTTVATGSMATPSSSTQTSGTPPSLITTATTITATGSTTNPSSTPGTTPIPPVLTTTATTPAATSSTVTPSSALGTTHTPPVPNTTATTHGRSLSPSSPHTVRTAWTSATSGTLGTTHITEPSTGTSHTPAATTGTTQHSTPALSSPHPSSRTTESPPSPGTTTPGHTTATSRTTATATPSKTRTSTLLPSSPTSAPITTVVTTGCEPQCAWSEWLDYSYPMPGPSGGDFDTYSNIRAAGGAVCEQPLGLECRAQAQPGVPLGELGQVVECSLDFGLVCRNREQVGKFKMCFNYEIRVFCCNYGHCPSTPATSSTAMPSSTPGTTWILTELTTTATTTASTGSTATPSSTPGTAPPPKVLTSPATTPTATSSKATSSSSPRTATTLPVLTSTATKSTATSVTPIPSSTLGTTGTLPEQTTTPVATMSTIHPSSTPETTHTSTVLTTKATTTRATSSTSTPSSTPGTTWILTELTTAATTTAATGPTATPSSTPGTTWILTELTTTATTTASTGSTATPSSTPGTTWILTEPSTTATVTVPTGSTATASSTQATAGTPHVSTTATTPTVTSSKATPSSSPGTATALPALRSTATTPTATSFTAIPSSSLGTTWTRLSQTTTPTATMSTATPSSTPETVHTSTVLTATATTTGATGSVATPSSTPGTAHTTKVPTTTTTGFTATPSSSPGTALTPPVWISTTTTPTTTTPTTSGSTVTPSSIPGTTHTARVLTTTTTTVATGSMATPSSSTQTSGTPPSLTTTATTITATGSTTNPSSTPGTTPITPVLTSTATTPAATSSKATSSSSPRTATTLPVLTSTATKSTATSFTPIPSSTLWTTWTVPAQTTTPMSTMSTIHTSSTPETTHTSTVLTTTATMTRATNSTATPSSTLGTTRILTELTTTATTTAATGSTATLSSTPGTTWILTEPSTIATVMVPTGSTATASSTLGTAHTPKVVTTMATMPTATASTVPSSSTVGTTRTPAVLPSSLPTFSVSTVSSSVLTTLRPTGFPSSHFSTPCFCRAFGQFFSPGEVIYNKTDRAGCHFYAVCNQHCDIDRFQGACPTSPPPVSSAPLSSPSPAPGCDNAIPLRQVNETWTLENCTVARCVGDNRVVLLDPKPVANVTCVNKHLPIKVSDPSQPCDFHYECECICSMWGGSHYSTFDGTSYTFRGNCTYVLMREIHARFGNLSLYLDNHYCTASATAAAARCPRALSIHYKSMDIVLTVTMVHGKEEGLILFDQIPVSSGFSKNGVLVSVLGTTTMRVDIPALGVSVTFNGQVFQARLPYSLFHNNTEGQCGTCTNNQRDDCLQRDGTTAASCKDMAKTWLVPDSRKDGCWAPTGTPPTASPAAPVSSTPTPTPCPPQPLCDLMLSQVFAECHNLVPPGPFFNACISDHCRGRLEVPCQSLEAYAELCRARGVCSDWRGATGGLCDLTCPPTKVYKPCGPIQPATCNSRNQSPQLEGMAEGCFCPEDQILFNAHMGICVQACPCVGPDGFPKFPGERWVSNCQSCVCDEGSVSVQCKPLPCDAQGQPPPCNRPGFVTVTRPRAENPCCPETVCVCNTTTCPQSLPVCPPGQESICTQEEGDCCPTFRCRPQLCSYNGTFYGVGATFPGALPCHMCTCLSGDTQDPTVQCQEDACNNTTCPQGFEYKRVAGQCCGECVQTACLTPDGQPVQLNETWVNSHVDNCTVYLCEAEGGVHLLTPQPASCPDVSSCRGSLRKTGCCYSCEEDSCQVRINTTILWHQGCETEVNITFCEGSCPGASKYSAEAQAMQHQCTCCQERRVHEETVPLHCPNGSAILHTYTHVDECGCTPFCVPAPMAPPHTRGFPAQEATAV

SEQ ID NO: 9107 - protein, 154 aa, Homo sapiens [sequence omitted]

SEQ ID NO: 9108 - protein, 181 aa, Homo sapiens
MDTSRTPSVCRETGGAALSRGERRPQGRRGSPTPTAGPVHTGLANTSYTSPGLQRLKDSPQTAPDKGQCSTWGAGHFSTFDHHVYDFSGTCNYIFAATCKDAFPTFSVQLRRGPDGSISRIIVELGASVVTVSEAIISVKDIGVISLPYTSNGLQITPFGQSVRLVAKQLELELEVVWGPD

SEQ ID NO: 9109 - protein, 2439 aa, Homo sapiens
MVQRWLLLSCCGALLSAGLANTSYTSPGLQRLKDSPQTAPDKGQCSTWGAGHFSTFDHHVYDFSGTCNYIFAATCKDAFPTFSVQLRRGPDGSISRIIVELGASVVTVSEAIISVKDIGVISLPYTSNGLQITPFGQSVRLVAKQLELELEVVWGPDSHLMVLVERKYMGQMCGLCGNFDGKVTNEFVSEEGKFLEPHKFAALQKLDDPGEICTFQDIPSTHVRQAQHARICTQLLTLVAPECSVSKEPFVLSCQADVAAAPQPGPQNSSCATLSEYSRQCSMVGQPVRRWRSPGLCSVGQCPANQVYQECGSACVKTCSNPQHSCSSSCTFGCFCPEGTVLNDLSNNHTCVPVTQCPCVLHGAMYAPGEVTIAACQTCRCTLGRWVCTERPCPGHCSLEGGSFVTTFDARPYRFHGTCTYILLQSPQLPEDGALMAVYDKSGVSHSETSLVAVVYLSRQDKIVISQDEVVTNNGEAKWLPYKTRNITVFRQTSTHLQMATSFGLELVVQLRPIFQAYVTVGPQFRGQTRGLCGNFNGDTTDDFTTSMGIAEGTASLFVDSWRAGNCPAALERETDPCSMSQLNKVCAETHCSMLLRTGTVFERCHATVNPAPFYKRCVYQACNYEETFPHICAALGDYVHACSLRGVLLWGWRSSVDNCTIPCTGNTTFSYNSQACERTCLSLSDRATECHHSAVPVDGCNCPDGTYLNQKGECVRKAQCPCILEGYKFILAEQSTVINGITCHCINGRLSCPQRPQMFLASCQAPKTFKSCSQSSENKFGAACAPTCQMLATGVACVPTKCEPGCVCAEGLYENADGQCVPPEECPCEFSGVSYPGGAELHTDCRTCSCSRGRWACQQGTHCPSTCTLYGEGHVITFDGQRFVFDGNCEYILATDVCGVNDSQPTFKILTENVICGNSGVTCSRAIKIFLGGLSVVLADRNYTVTGEEPHVQLGVTPGALSLVVDISIPGRYNLTLIWNRHMTILIRIARASQDPLCGLCGNFNGNMKDDFETRSRYVASSELELVNSWKESPLCGDVSFVTDPCSLNAFRRSWAERKCSVINSQTFATCHSKVYHLPYYEACVRDACGCDSGGDCECLCDAVAAYAQACLDKGVCVDWRTPAFCPIYCGFYNTHTQDGHGEYQYTQEANCTWHYQPCLCPSQPQSVPGSNIEGCYNCSQDEYFDHEEGVCVPCMPPTTPQPPTTPQLPTTGSRPTQVWPMTGTSTTIGLLSSTGPSPSSNHTPASPTQTPLLPATLTSSKPTASSGEPPRPTTAVTPQATSGLPPTATLRSTATKPTVTQATTRATASTASPATTSTAQSTTRTTMTLPTPATSGTSPTLPKSTNQELPGTTATQTTGPRPTPASTTGPTTPQPGQPTRPTATETTQTRTTTEYTTPQTPHTTHSPPTAGSPVPSTGPVTATSFHATTTYPTPSHPETTLPTHVPPFSTSLVTPSTHTVITPTHAQMATSASNHSAPTGTIPPPTTLKATGSTHTAPPITPTTSGTSQAHSSFSTNKTPTSLHSHTSSTHHPEVTPTSTTTITPNPTSTRTRTPVAHTNSATSSRPPPPFTTHSPPTGSSPFSSTGPMTATSFKTTTTYPTPSHPQTTLPTHVPPFSTSLVTPSTHTVITPTHAQMATSASIHSMPTGTIPPPTTLKATGSTHTAPTMTLTTSGTSQALSSLNTAKTSTSLHSHTSSTHHAEATSTSTTNITPNPTSTGTPPMTVTTSGTSQSRSSFSTAKTSTSLHSHTSSTHHPEVTSTSTTSITPNHTSTGTRTPVAHTTSATSSRLPTPFTTHSPPTGTTPISSTGPVTATSFQTTTTYPTPSHPHTTLPTHVPSFSTSLVTPSTHTVIIPTHTQMATSASIHSMPTGTIPPPTTIKATGSTHTAPPMTPTTSGTSQSPSSFSTAKTSTSLPYHTSSTHHPEVTPTSTTNITPKHTSTGTRTPVAHTTSASSSRLPTPFTTHSPPTGSSPFSSTGPMTATSFQTTTTYPTPSHPQTTLPTHVPPFSTSLVTPSTHTVIITTHTQMATSASIHSTPTGTVPPPTTLKATGSTHTAPPMTVTTSGTSQTHSSFSTATASSSFISSSSWLPQNSSSRPPSSPITTQLPHLSSATTPVSTTNQLSSSFSPSPSAPSTVSSYVPSSHSSPQTSSPSVGTSSSFVSAPVHSTTLSSGSHSSLSTHPTTASVSASPLFPSSPAASTTIRATLPHTISSPFTLSALLPISTVTVSPTPSSHLASSTIAFPSTPRTTASTHTAPAFSSQSTTSRSTSLTTRVPTSGFVSLTSGVTGIPTSPVTNLTTRHPGPTLSPTTRFLTSSLTAHGSTPASAPVSSLGTPTPTSPGVCSVREQQEEITFKGCMANVTVTRCEGACISAASFNIITQQVDARCSCCRPLHSYEQQLELPCPDPSTPGRRLVLTLQVFSHCVCSSVACGD

SEQ ID NO: 9110 - protein, 115 aa, Homo sapiens
  SITE 1: note = misc_feature - Xaa can be any naturally occurring amino acid
XPPTTPQPPTTPQLPTTGSRPTQVWPMTGTSTTIGLLSSTGPSPSSNHTPASPTQTPLLPATLTSSKPTASSGGKEPPAEPMERAAAGGPRYTSGVGLGMALLPGSHLPLSRFPA

SEQ ID NO: 9111 - protein, 219 aa, Homo sapiens
  SITE 1: note = misc_feature - Xaa can be any naturally occurring amino acid
XSSPFTLSALLPISTVTVSPTPSSHLASSTIAFPSTPRTTASTHTAPAFSSQSTTSRSTSLTTRVPTSGFVSLTSGVTGIPTSPVTNLTTRHPGPTLSPTTRFLTSSLTAHGSTPASAPVSSLGTPTPTSPGESTGGRPAPRPPRCSQPHPREVRAPHPGACCPISFNIITQQVDARCSCCRPLHSYEQQLELPCPDPSTPGRRLVLTLQVFSHCVCSS

SEQ ID NO: 9112 - protein, 136 aa, Homo sapiens
MKTLPLFVCICALSACFSFSEGRERDHELRHRRHHHQSPKSHFELPHYPGLLAHQKPFIRKSYKCLHKRCRPKLPPSPNNPPKFPNPHQPPKHPDKNSSVVNPTLVATTQIPSVTFPSASTKITTLPNVTFLPQNA

SEQ ID NO: 9113 - protein, 377 aa, Homo sapiens
MKTLPLFVCICALSACFSFSEGRERDHELRHRRHHHQSPKSHFELPHYPGLLAHQKPFIRKSYKCLHKRCRPKLPPSPNNPPKFPNPHQPPKHPDKNSSVVNPTLVATTQIPSVTFPSASTKITTLPNVTFLPQNATTISSRENVNTSSSVATLAPVNSPAPQDTTAAPPTPSATTPAPPSSSAPPETTAAPPTPSATTQAPPSSSAPPETTAAPPTPPATTPAPPSSSAPPETTAAPPTPSATTPAPLSSSAPPETTAVPPTPSATTLDPSSASAPPETTAAPPTPSATTPAPPSSPAPQETTAAPITTPNSSPTTLAPDTSETSAAPTHQTTTSVTTQTTTTKQPTSAPGQNKISRFLLYMKNLLNRIIDDMVEQ

SEQ ID NO: 9114 - protein, 377 aa, Homo sapiens; identical to SEQ ID NO: 9113

SEQ ID NO: 9115 - protein, 377 aa, Homo sapiens; identical to SEQ ID NO: 9113

SEQ ID NO: 9116 - protein, 85 aa, Homo sapiens
MGGDHGYQLAVTKAENPTTAAPADTYPATGPADDEAPDAETTAAATTATTAAPTTATTAASTTARKDIPVLPKWVGDLPNGRVCP

SEQ ID NO: 9117 - protein, 90 aa, Homo sapiens
MKFLAVLVLLGVSIFLVSAQNPTTAAPADTYPATGPADDEAPDAETTAAATTATTAAPTTATTAASTTARKDIPVLPKWVGDLPNGRVCP

SEQ ID NO: 9118 - protein, 80 aa, Homo sapiens
MKFLAVLVLLGVSIFLVSAQNPTTAAPADTYPATGPADDEAPDAETTPTTATTAASTTARKDIPVLPKWVGDLPNGRVCP

SEQ ID NO: 9119 - protein, 2828 aa, Homo sapiens
MPKRAHWGALSVVLILLWGHPRVALACPHPCACYVPSEVHCTFRSLASVPAGIAKHVERINLGFNSIQALSETSFAGLTKLELLMIHGNEIPSIPDGALRDLSSLQVFKFSYNKLRVITGQTLQGLSNLMRLHIDHNKIEFIHPQAFNGLTSLRLLHLEGNLLHQLHPSTFSTFTFLDYFRLSTIRHLYLAENMVRTLPASMLRNMPLLENLYLQGNPWTCDCEMRWFLEWDAKSRGILKCKKDKAYEGGQLCAMCFSPKKLYKHEIHKLKDMTCLKPSIESPLRQNRSRSIEEEQEQEEDGGSQLILEKFQLPQWSISLNMTDEHGNMVNLVCDIKKPMDVYKIHLNQTDPPDIDINATVALDFECPMTRENYEKLWKLIAYYSEVPVKLHRELMLSKDPRVSYQYRQDADEEALYYTGVRAQILAEPEWVMQPSIDIQLNRRQSTAKKVLLSYYTQYSQTISTKDTRQARGRSWVMIEPSGAVQRDQTVLEGGPCQLSCNVKASESPSIFWVLPDGSILKAPMDDPDSKFSILSSGWLRIKSMEPSDSGLYQCIAQVRDEMDRMVYRVLVQSPSTQPAEKDTVTIGKNPGESVTLPCNALAIPEAHLSWILPNRRIINDLANTSHVYMLPNGTLSIPKVQVSDSGYYRCVAVNQQGADHFTVGITVTKKGSGLPSKRGRRPGAKALSRVREDIVEDEGGSGMGDEENTSRRLLHPKDQEVFLKTKDDAINGDKKAKKGRRKLKLWKHSEKEPETNVAEGRRVFESRRRINMANKQINPERWADILAKVRGKNLPKGTEVPPLIKTTSPPSLSLEVTPPFPAISPPSASPVQTVTSAEESSADVPLLGEEEHVLGTISSASMGLEHNHNGVILVEPEVTSTPLEEVVDDLSEKTEEITSTEGDLKGTAAPTLISEPYEPSPTLHTLDTVYEKPTHEETATEGWSAADVGSSPEPTSSEYEPPLDAVSLAESEPMQYFDPDLETKSQPDEDKMKEDTFAHLTPTPTIWVNDSSTSQLFEDSTIGEPGVPGQSHLQGLTDNIHLVKSSLSTQDTLLIKKGMKEMSQTLQGGNMLEGDPTHSRSSESEGQESKSITLPDSTLGIMSSMSPVKKPAETTVGTLLDKDTTTATTTPRQKVAPSSTMSTHPSRRRPNGRRRLRPNKFRHRHKQTPPTTFAPSETFSTQPTQAPDIKISSQVESSLVPTAWVDNTVNTPKQLEMEKNAEPTSKGTPRRKHGKRPNKHRYTPSTVSSRASGSKPSPSPENKHRNIVTPSSETILLPRTVSLKTEGPYDSLDYMTTTRKIYSSYPKVQETLPVTYKPTSDGKEIKDDVATNVDKHKSDILVTGESITNAIPTSRSLVSTMGEFKEESSPVGFPGTPTWNPSRTAQPGRLQTGIPVTTSGENLTDPPLLKELEDVDFTSEFLSSLTVSTPFHQEEAGSSTTLSSIKVEVASSQAETTTLDQDHLETTVAILLSETRPQNHTPTAARMKEPASSSPSTILMSLGQTTTTKPALPSPRISQASRDSKENVFLNYVGNPETEATPVNNEGTQHMSGPNELSTPSSDQDAFNLSTKLELEKQVFGSRSLPRGPDSQRQDGRVHASHQLTRVPAKPILPTATVRLPEMSTQSASRYFVTSQSPRHWTNKPEITTYPSGALPENKQFTTPRLSSTTIPLPLHMSKPSIPSKFTDRRTDQFNGYSKVFGNNNIPEARNPVGKPPSPRIPHYSNGRLPFFTNKTLSFPQLGVTRRPQIPTSPAPVMRERKVIPGSYNRIHSHSTFHLDFGPPAPPLLHTPQTTGSPSTNLQNIPMVSSTQSSISFITSSVQSSGSFHQSSSKFFAGGPPASKFWSLGEKPQILTKSPQTVSVTAETDTVFPCEATGKPKPFVTWTKVSTGALMTPNTRIQRFEVLKNGTLVIRKVQVQDRGQYMCTASNLHGLDRMVVLLSVTVQQPQILASHYQDVTVYLGDTIAMECLAKGTPAPQISWIFPDRRVWQTVSPVEGRITLHENRTLSIKEASFSDRGVYKCVASNAAGADSLAIRLHVAALPPVIHQEKLENISLPPGLSIHIHCTAKAAPLPSVRWVLGDGTQIRPSQFLHGNLFVFPNGTLYIRNLAPKDSGRYECVAANLVGSARRTVQLNVQRAAANARITGTSPRRTDVRYGGTLKLDCSASGDPWPRILWRLPSKRMIDALFSFDSRIKVFANGTLVVKSVTDKDAGDYLCVARNKVGDDYVVLKVDVVMKPAKIEHKEENDHKVFYGGDLKVDCVATGLPNPEISWSLPDGSLVNSFMQSDDSGGRTKRYVVFNNGTLYFNEVGMREEGDYTCFAENQVGKDEMRVRVKVVTAPATIRNKTYLAVQVPYGDVVTVACEAKGEPMPKVTWLSPTNKVIPTSSEKYQIYQDGTLLIQKAQRSDSGNYTCLVRNSAGEDRKTVWIHVNVQPPKINGNPNPITTVREIAAGGSRKLIDCKAEGIPTPRVLWAFPEGVVLPAPYYGNRITVHGNGSLDIRSLRKSDSVQLVCMARNEGGEARLILQLTVLEPMEKPIFHDPISEKITAMAGHTISLNCSAAGTPTPSLVWVLPNGTDLQSGQQLQRFYHKADGMLHISGLSSVDAGAYRCVARNAAGHTERLVSLKVGLKPEANKQYHNLVSIINGETLKLPCTPPGAGQGRFSWTLPNGMHLEGPQTLGRVSLLDNGTLTVREASVFDRGTYVCRMETEYGPSVTSIPVIVIAYPPRITSEPTPVIYTRPGNTVKLNCMAMGIPKADITWELPDKSHLKAGVQARLYGNRFLHPQGSLTIQHATQRDAGFYKCMAKNILGSDSKTTYIHVF

SEQ ID NO: 9120 - protein, 213 aa, Homo sapiens
MDTERVGDGKQHRRKQSQRLRWPCCLALVPDRHPSQLSSCTLCLLAAASQWESWAHFSKWHTEASTGTHLGKAKAEGLGCTVKNTPQLSICEPSHFGPSFVHSPHLLVDHDHRAGAATGRGQAGPSRASSVSPTFCPPTTSHHPVCAKGTDPVLVLQEEEQDLDGEKGPSSEGPEEEDGEGFSFKYSPGKLRGNQYKKMMTKEELEEEQRTEE

SEQ ID NO: 9121 - protein, 177 aa, Homo sapiens
MEAPAELLAALPALATALALLLAWLLVRRGAAASPEPARAPPEPAPPAEATGAPAPSRPCAPEPAASPAGPEEPGEPAGLGELGEPAGPGEPEGPGDPAAAPAEAEEQAVEARQEEEQDLDGEKGPSSEGPEEEDGEGFSFKYSPGKLRGNQYKKMMTKEELEEEQRIELTSDLTSL

SEQ ID NO: 9122 - protein, 170 aa, Homo sapiens
MEAPAELLAALPALATALALLLAWLLVRRGAAASPEPARAPPEPAPPAEATGAPAPSRPCAPEPAASPAGPEEPGEPAGLGELGEPAGPGEPEGPGDPAAAPAEAEEQAVEARQEEEQDLDGEKGPSSEGPEEEDGEGFSFKYSPGKLRGNQYKKMMTKEELEEEQRTEE

SEQ ID NO: 9123 - protein, 204 aa, Homo sapiens
MEAPAELLAALPALATALALLLAWLLVRRGAAASPEPARAPPEPAPPAEATGAPAPSRPCAPEPAASPAGPEEPGEPAGLGELGEPAGPGEPEGPGDPAAAPAEAEEQAVEARQEEEQDLDGEKGPSSEGPEEEDGEGFSFKYSPGKLRGNQYKKMMTKEELEEEQRVQKEQLAAIFKLMKDNKETFGEMSDGDVQEQLRLYDM

SEQ ID NO: 9124 - protein, 22 aa, Homo sapiens
MMTKEELEEEQRIELTSDLTSL

SEQ ID NO: 9125 - protein, 15 aa, Homo sapiens
MMTKEELEEEQRTEE

SEQ ID NO: 9126 - protein, 15 aa, Homo sapiens
MMTKEELEEEQRTEE

SEQ ID NO: 9127 - protein, 189 aa, Homo sapiens
MAAPSGGWNGVGASLWAALLLGAVALRPAEAVSEPTTVAFDVRPGGVVHSFSHNVGPGDKYTCMFTYASQGGTNEQWQMSLGTSEDHQHFTCTIWRPQGKSYLYFTQFKAEVRGAEIEYAMAYSKAAFERESDVPLKTEEFEVTKTAGTERWGWGRGDATPIQGWAIGAVWRGGSAIGVLETVDQASTN

SEQ ID NO: 9128 - protein, 173 aa, Homo sapiens
MAAPSGGWNGVGASLWAALLLGAVALRPAEAVSEPTTVAFDVRPGGVVHSFSHNVGPGDKYTCMFTYASQGGTNEQWQMSLGTSEDHQHFTCTIWRPQGKSYLYFTQFKAEVRGAEIEYAMAYSKAAFERESDVPLKTEEFEVTKTAVAHRPGAFKAELSKLVIVAKASRTEL

SEQ ID NO: 9129 - protein, 84 aa, Homo sapiens
  SITE 1: note = misc_feature - Xaa can be any naturally occurring amino acid
XHQHFTCTIWRPQGKSYLYFTQFKAEVRGAEIEYAMAYSKAAFERESDVPLKTEEFEVTKTAVISAPQEKGDDQPHWTDGETEA

SEQ ID NO: 9130 - protein, 194 aa, Homo sapiens
MAPKKDVKKPVAAAAAAPAPAPAPAPAPAPAKPKEEKIDLSAIKIEFSKEQQDEFKEAFLLFDRTGDSKITLSQVGDVLRALGTNPTNAEVRKVLGNPSNEELNAKKIEFEQFLPMMQAISNNKDQATYEDFVEGLRVFDKEGNGTVMGAELRHVLATLGEKMKEEEVEALMAGQEDSNGCINYEAFVKHIMSI

SEQ ID NO: 9131 - protein, 150 aa, Homo sapiens
MSFSADQIAEFKEAFLLFDRTGDSKITLSQVGDVLRALGTNPTNAEVRKVLGNPSNEELNAKKIEFEQFLPMMQAISNNKDQATYEDFVEGLRVFDKEGNGTVMGAELRHVLATLGEKMKEEEVEALMAGQEDSNGCINYEAFVKHIMSI

SEQ ID NO: 9132 - protein, 63 aa, Homo sapiens
MRFFCARCCSFGPEMPAVQLLLLACLVWDVGARTAQLRKANDQRSFYVEFGHFGLPGTEVRAN

SEQ ID NO: 9133 - protein, 504 aa, Homo sapiens
MRFFCARCCSFGPEMPAVQLLLLACLVWDVGARTAQLRKANDQSGRCQYTFSVASPNESSCPEQSQAMSVIHNLQRDSSTQRLDLEATKARLSSLESLLHQLTLDQAARPQETQEGLQRELGTLRRERDQLETQTRELETAYSNLLRDKSVLEEEKKRLRQENENLARRLESSSQEVARLRRGQCPQTRDTARAVPPGSREVSTWNLDTLAFQELKSELTEVPASRILKESPSGYLRSGEGDTGCGELVWVGEPLTLRTAETITGKYGVWMRDPKPTYPYTQETTWRIDTVGTDVRQVFEYDLISQFMQGYPSKVHILPRPLESTGAVVYSGSLYFQGAESRTVIRYELNTETVKAEKEIPGAGYHGQFPYSWGGYTDIDLAVDEAGLWVIYSTDEAKGAIVLSKLNPENLELEQTWETNIRKQSVANAFIICGTLYTVSSYTSADATVNFAYDTGTGISKTLTIPFKNRYKYSSMIDYNPLEKKLFAWDNLNMVTYDIKLSKM

SEQ ID NO: 9134 - protein, 250 aa, Homo sapiens
MAFCALTIVALYILSLKDQDRRVPNLPPSNITSSQEPALLPTASSSAPNTSLVTTPASLQVPEITFCEILPCQETYCCPIRGMKEVSSSPVQRQSEEKEFHQRRWSEDKSKSVLARNALSGPDWESDWIDTTISSIQIMEIQQIIDHQYCIQSLQCGTTEPLIVFQCKFTLGNICFHSKRGTKGLESHREISQEMTQGYQHIWSLPVAPFSDSMFHFRVAAPDLADCSTDPYFAGIFFTDYFFYFYRRCA

SEQ ID NO: 9135 - protein, 898 aa, Homo sapiens
MDVVGENEALQQFFEAQGANGTLENPALDTSLLEEFLGNDFDLGALQRQLPDTPPYSASDSCSPPQVKGACYPTLRPTAGRTPAPFLHPTAAPAMPPMHPLQSTSGMGDSCQIHGGFHSCHSNASHLATPLDQSVSSHLGIGCSYPQQPLCHSPGASLPPTKKRKCTQALEDSGECRVWACHCRPMTSRSRSSEVQDPDSEGQNRMPTDQCSPALKWQPCHSVPWHSLLNSHYEKLPDVGYRVVTDKGFNFSPADEAFVCQKKNHFQITIHIQVWGSPKFVETEMGLKPIEMFYLKVFGTKVEATNQIIAIEQSQADRSKKIFNPVKIDLLADQVTKVTLGRLHFSETTANNMRKKGKPNPDQRYFMLVVGLYAANQDQFYLLSAHISERIIVRASNPGQFENDSDALWQRGQVPESIVCHGRVGINTDAPDEALVVCGNMKVMGTIMHPSDSRAKQNIQEVDTNEQLKRIAQMRIVEYDYKPEFASAMGINTAHQTGMIAQEVQEILPRAVREVGDVTCGNGETLENFLMVDKDQIFMENVGAVKQLCKLTNNLEERIEELEIWNRKLARLKRLSSWKSSASEASTISKSSRAVSASSPRRAVHKKNNKVYFSGKRQACPNWVFQTLVITLIAVMAFCLKDQDRRVPNLPPSNITSSQEPALLPTASSSAPNTSLVTTPASLQVPEITFCEILPCQETYCCPIRGMKEVSSSPVQRQSEEKEFHQRRWSDKSKSVLARNALSGPDWESDWIDTTISSIQIMEIQQIIDHQYCIQSLQCGSGNYNYNIPVNKHTPTNVKFSLEINTTEPLIVFQCKFTLGNICFHSKRGTKGLESHREISQEMTQGYQHIWSLPVAPFSDSMFHFRVAAPDLADCSTDPYFAGIFFTDYFFYFYRRCA

SEQ ID NO: 9136 - protein, 910 aa, Homo sapiens
MDVVGENEALQQFFEAQGANGTLENPALDTSLLEEFLGNDFDLGALQRQLPDTPPYSASDSCSPPQVKGACYPTLRPTAGRTPAPFLHPTAAPAMPPMHPLQSTSGMGDSCQIHGGFHSCHSNASHLATPLDQSVSSHLGIGCSYPQQPLCHSPGASLPPTKKRKCTQALEDSGECRVWACHCRPMTSRSRSSEVQDPDSEGQNRMPTDQCSPALKWQPCHSVPWHSLLNSHYEKLPDVGYRVVTDKGFNFSPADEAFVCQKKNHFQITIHIQVWGSPKFVETEMGLKPIEMFYLKVFGTKVEATNQIIAIEQSQADRSKKIFNPVKIDLLADQVTKVTLGRLHFSETTANNMRKKGKPNPDQRYFMLVVGLYAANQDQFYLLSAHISERIIVRASNPGQFENDSDALWQRGQVPESIVCHGRVGINTDAPDEALVVCGNMKVMGTIMHPSDSRAKQNIQEVDTNEQLKRIAQMRIVEYDYKPEFASAMGINTAHQTGMIAQEVQEILPRAVREVGDVTCGNGETLENFLMVDKDQIFMENVGAVKQLCKLTNNLEERIEELEIWNRKLARLKRLSSWKSSASEASTISKSSRAVSASSPRRAVHKKNNKVYFSGKRQACPNWVFQTLVITLIAVMAFCALTIVALYILSLKDQDRRVPNLPPSNITSSQEPALLPTASSSAPNTSLVTTPASLQVPEITFCEILPCQETYCCPIRGMKEVSSSPVQRQSEEKEFHQRRWSEDKSKSVLARNALSGPDWESDWIDTTISSIQIMEIQQIIDHQYCIQSLQCGSGNYNYNIPVNKHTPTNVKFSLEINTTEPLIVFQCKFTLGNICFHSKRGTKGLESHREISQEMTQGYQHIWSLPVAPFSDSMFHFRVAAPDLADCSTDPYFAGIFFTDYFFYFYRRCA

SEQ ID NO: 9137 - protein, 250 aa, Homo sapiens
MVFLALTIVALYILSLKDQDRRVPNLPPSNITSSQEPALLPTASSSAPNTSLVTTPASLQVPEITFCEILPCQETYCCPIRGMKEVSSSPVQRQSEEKEFHQRRWSEDKSKSVLARNALSGPDWESDWIDTTISSIQIMEIQQIIDHQYCIQSLQCGTTEPLIVFQCKFTLGNICFHSKRGTKGLESHREISQEMTQGYQHIWSLPVAPFSDSMFHFRVAAPDLADCSTDPYFAGIFFTDYFFYFYRRCA

SEQ ID NO: 9138 - protein, 375 aa, Homo sapiens
  SITE 1: note = misc_feature - Xaa can be any naturally occurring amino acid
XIFMENVGAVKQLCKLTNNLEERIEELEIWNRKLARLKRLSSWKSSASEASTISKSSRAVSASSPRRAVHKKNNKVYFSGKRQACPNWVFQTLVITLIAVMAFCALTIVALYILSLKDQDRRVPNLPPSNITSSQEPALLPTASSSAPNTSLVTTPASLQVPEITFCEILPCQETYCCPIRGMKEVSSSPVQRQSEEKEFHQRRWSEDKSKSVLARNALSGPDWESDWIDTTISSIQIMEIQQIIDHQYCIQSLQCGSGNYNYNIPVNKHTPTNVKFSLEINTTEPLIVFQCKFTLGNICFHSKRGTKGLESHREISQEMTQGYQHIWSLPVAPFSDSMFHFRVAAPDLADCSTDPYFAGIFFTDYFFYFYRRCA

SEQ ID NO: 9139 - protein, 76 aa, Homo sapiens
MRLSLPLLLLLLGAWAIPGGLGDRAPLTATAPQLDDEEMYSAHMPAHLRCDACRAVAYQLRSSRSGPSETSHRPRT

SEQ ID NO: 9140 - protein, 189 aa, Homo sapiens
MRLSLPLLLLLLGAWAIPGGLGDRAPLTATAPQLDDEEMYSAHMPAHLRCDACRAVAYQMWQNLAKAETKLHTSNSGGRRELSELVYTDVLDRSCSRNWQDYGVREVDQVKRLTGPGLSEGPEPSISVMVTGGPWPTRLSRTCLHYLGEFGEDQIYEAHQQGRGALEALLCGGPQGACSEKVSATREEL

SEQ ID NO: 9141 - protein, 75 aa, Homo sapiens
MRLSLPLLLLLLGAWAIPGGLGDRAPLTATAPQLDDEEMYSAHMPAHLRCDACRAVAYQRLCSYPPHLPLTEQQS

SEQ ID NO: 9142 - protein, 123 aa, Homo sapiens
MRLSLPLLLLLLGAWAIPGGLGDRAPLTATAPQLDDEEMYSAHMPAHLRCDACRAVAYQSLLVPDVAKSGKGRDQTSYLKLWGAAGAERVGLHGCPGPELLPELAGLRSSRSGPSETSHRPRT

SEQ ID NO: 9143 - protein, 60 aa, Homo sapiens
  SITE 1: note = misc_feature - Xaa can be any naturally occurring amino acid
XSLPLLLLLLGAWAIPGGLGDRAPLTATAPQLDDEEMYSAHMPAHLRCDACRAVAYQAHP

SEQ ID NO: 9144 - protein, 737 aa, Homo sapiens
MALCSALMTIFTIKMGTAKQAIDQGRSPVIIDNTNIQAWEMKPYVEVAIGKGYRVEFHEPETWWKFDPEELEKRNKHGVSRKKIAQMLDRYEYQMSISIVMNSVEPSHKSTQRPPPPQGRQRERVLKKTGHRLSKTKQKRNRKRNKKQNSQNRIMEENSLEFLSDLTPGDQDPSQSEEEDIEKTRRESEYPFIDGLQNEVGDFVTGYKEKRWKNKDPKDSFQNVMSIVELDNTPKNYLSKEGDNLFVSLLLRPNEISVTCPILTQNLSCVTTDDCSGMKVEKHIRNRHTIALDTQDLSAETSCLFMKKREIVDKNLSHEPILCHQHGIRMSDKVLREEQVYTTKINHWAFFTTNLSDEDLQLGSDRQPYFGSWPAGPHKFICEQRPKKDRACKLAGPDSRGQWIQMIFTSVAASEPGNNPEILTDKLLIGNEDFSPPPETMDSFIETNLFRSCLPQPDIPKNALESTKNKKRRKKRIFNLVPNFDLLGQSRIGVKEREKCDLLTKNHGLKITLGEEKDRISERNSEEENKQKLMTFDHHPLWFYLDIIKATPLNIDGQRYSHCLSFNRLRCSASLYKNYIPSFVLHNLSSIWKPSFTNKKLFLTFESQTRVGNKLNDAGFISPEILHSHPDTSCSLGVTSDFHFLNERFDRKLKRWEEPKELPAEDSQDLTSTDYRSLELPLSQGFAFQLVKLFGSPGVPMESLLPDDYVVPLDWKTLKMIYLQWKMSVEKRQKKIG

SEQ ID NO: 9145 - protein, 737 aa, Homo sapiens; identical to SEQ ID NO: 9144

SEQ ID NO: 9146 - protein, 752 aa, Homo sapiens
MSYGEIEEFCLVRIVMALCSALMTIFTIKMGTAKQAIDQGRSPVIIDNTNIQAWEMKPYVEVAIGKGYRVEFHEPETWWKFDPEELEKRNKHGVSRKKIAQMLDRYEYQMSISIVMNSVEPSHKSTQRPPPPQGRQRERVLKKTGHRLSKTKQKRNRKRNKKQNSQNRIMEENSLEFLSDLTPGDQDPSQSEEEDIEKTRRESEYPFIDGLQNEVGDFVTGYKEKRWKNKDPKDSFQNVMSIVELDNTPKNYLSKEGDNLFVSLLLRPNEISVTCPILTQNLSCVTTDDCSGMKVEKHIRNRHTIALDTQDLSAETSCLFMKKREIVDKNLSHEPILCHQHGIRMSDKVLREEQVYTTKINHWAFFTTNLSDEDLQLGSDRQPYFGSWPAGPHKFICEQRPKKDRACKLAGPDSRGQWIQMIFTSVAASEPGNNPEILTDKLLIGNEDFSPPPETMDSFIETNLFRSCLPQPDIPKNALESTKNKKRRKKRIFNLVPNFDLLGQSRIGVKEREKCDLLTKNHGLKITLGEEKDRISERNSEEENKQKLMTFDHHPLWFYLDIIKATPLNIDGQRYSHCLSFNRLRCSASLYKNYIPSFVLHNLSSIWKPSFTNKKLFLTFESQTRVGNKLNDAGFISPEILHSHPDTSCSLGVTSDFHFLNERFDRKLKRWEEPKELPAEDSQDLTSTDYRSLELPLSQGFAFQLVKLFGSPGVPMESLLPDDYVVPLDWKTLKMIYLQWKMSVEKRQKKIG

SEQ ID NO: 9147 - protein, 583 aa, Homo sapiens
MSYGEIEGKFLGPREEVTSEPRCKKLKSTTESYVFHNHSNADFHRIQEKTGNDWVPVTIIDVRGHSYLQENKIKTTDLHRPLHDEMPGNRPDVIESIDSQVLQEARPPLVSADDEIYSTSKAFIGPIYKPPEKKKRNEGRNEAHVLNGINDRGGQKEKQKFNSEKSEIDNELFQFYKEIEELEKEKDGFENSCKESEPSQEQFVPFYEGHNNGLLKPDEEKKDLSNKAMPSHCDYQQNLGNEPDKYPCNGQVIPTFCDTSFTSFRPEWQSVYPFIVPYGPPLPSLNYHLNIQRFSGPPNPPSNIFQAQDDSQIQNGYYVNNCHVNWNCMTFDQNNEYTDCSENRSSVHPSGNGCSMQDRYVSNGFCEVRERCWKDHCMDKHNGTDRFVNQQFQEEKLNKLQKLLILLRGLPGSGKTTLSRILLGQNRDGIVFSTDDYFHHQDGYRYNVNQLGDAHDWNQNRAKQAIDQGRSPVIIDNTNIQAWEMKPYVEVAIGKGYRVEFHEPETWWKFDPEELEKRNKHGVSRKKIAQMLDRYEYQMSISIVMNSVEPSHKSTQRPPPPQGRQRWGGSLGSHNRVCVTNNH

SEQ ID NO: 9148 - protein, 655 aa, Homo sapiens
MSYGEIEGKFLGPREEVTSEPRCKKLKSTTESYVFHNHSNADFHRIQEKTGNDWVPVTIIDVRGHSYLQENKIKTTDLHRPLHDEMPGNRPDVIESIDSQVLQEARPPLVSADDEIYSTSKAFIGPIYKPPEKKKRNEGRNEAHVLNGINDRGGQKEKQKFNSEKSEIDNELFQFYKEIEELEKEKDGFENSCKESEPSQEQFVPFYEGHNNGLLKPDEEKKDLSNKAMPSHCDYQQNLGNEPDKYPCNGQVIPTFCDTSFTSFRPEWQSVYPFIVPYGPPLPSLNYHLNIQRFSGPPNPPSNIFQAQDDSQIQNGYYVNNCHVNWNCMTFDQNNEYTDCSENRSSVHPSGNGCSMQDRYVSNGFCEVRERCWKDHCMDKHNGTDRFVNQQFQEEKLNKLQKLLILLRGLPGSGKTTLSRILLGQNRDGIVFSTDDYFHHQDGYRYNVNQLGDAHDWNQNRAKQAIDQGRSPVIIDNTNIQAWEMKPYVEVAIGKGYRVEFHEPETWWKFDPEELEKRNKHGVSRKKIAQMLDRYEYQMSISIVMNSVEPSHKSTQRPPPPQGRQRFDRKLKRWEEPKELPAEDSQDLTSTDYRSLELPLSQGFAFQLVKLFGSPGVPMESLLPDDYVVPLDWKTLKMIYLQWKMSVEKRQKKIG

SEQ ID NO: 9149 - protein, 709 aa, Homo sapiens
MSYGEIEGKFLGPREEVTSEPRCKKLKSTTESYVFHNHSNADFHRIQEKTGNDWVPVTIIDVRGHSYLQENKIKTTDLHRPLHDEMPGNRPDVIESIDSQVLQEARPPLVSADDEIYSTSKAFIGPIYKPPEKKKRNEGRNEAHVLNGINDRGGQKEKQKFNSEKSEIDNELFQFYKEIEELEKEKDGFENSCKESEPSQEQFVPFYEGHNNGLLKPDEEKKDLSNKAMPSHCDYQQNLGNEPDKYPCNGQVIPTFCDTSFTSFRPEWQSVYPFIVPYGPPLPSLNYHLNIQRFSGPPNPPSNIFQAQDDSQIQNGYYVNNCHVNWNCMTFDQNNEYTDCSENRSSVHPSGNGCSMQDRYVSNGFCEVRERCWKDHCMDKHNGTDRFVNQQFQEEKLNKLQKLLILLRGLPGSGKTTLSRILLGQNRDGIVFSTDDYFHHQDGYRYNVNQLGDAHDWNQNRAKQAIDQGRSPVIIDNTNIQAWEMKPYVEVAIGKGYRVEFHEPETWWKFDPEELEKRNKHGVSRKKIAQMLDRYEYQMSISIVMNSVEPSHKSTQRPPPPQGRQRERVLKKTGHRLSKTKQKRNRKRNKKQNSQNRIMEENSLEFLSDLTPGDQDPSQSEEEDIEKTRRESEYPFIDGLQNEVGDFVTGYKEKRWKNKDPKDSFQNVMSIVELDNTPKNYLSKEGDNLFVSLLLRPNEISVTCPILTQ

SEQ ID NO: 9150 - protein, 125 aa, Homo sapiens
MAGAGPTMLLREENGCCSRRQSSSSAGDSDGEREDSAAERARQQLEALLNKTMRIRMTDGRTLVGCFLCTDRDCNVILGSAQEFLKPSDSFSAGEPRVLGLAMVPGHHIVSIEVQRESLTGPPYL

SEQ ID NO: 9151 - protein, 135 aa, Homo sapiens
MAGAGPTMLLREENGCCSRRQSSSSAGDSDGEREDSAAERARQQLEALLNKTMRIRMTDGRTLVGCFLCTDRDCNVILGSAQEFLKPSGQCPGNAHPPDSFSAGEPRVLGLAMVPGHHIVSIEVQRESLTGPPYL

SEQ ID NO: 9152 - protein, 173 aa, Homo sapiens
MAVAVGVRAAPVLGLARALVLGLRGSQAARWRGWGTAAPGSLWALCECPAGCRELWFRGRAAWAARSERLLHPAQDSDGEREDSAAERARQQLEALLNKTMRIRMTDGRTLVGCFLCTDRDCNVILGSAQEFLKPSDSFSAGEPRVLGLAMVPGHHIVSIEVQRESLTGPPYL

SEQ ID NO: 9153 - protein, 99 aa, Homo sapiens
MDSDGEREDSAAERARQQLEALLNKTMRIRMTDGRTLVGCFLCTDRDCNVILGSAQEFLKPSDSFSAGEPRVLGLAMVPGHHIVSIEVQRESLTGPPYL

SEQ ID NO: 9154 - protein, 73 aa, Homo sapiens
MRIRMTDGRTLVGCFLCTDRDCNVILGSAQEFLKPSDSFSAGEPRVLGLAMVPGHHIVSIEVQRESLTGPPYL

SEQ ID NO: 9155 - protein, 83 aa, Homo sapiens
MRIRMTDGRTLVGCFLCTDRDCNVILGSAQEFLKPSGQCPGNAHPPDSFSAGEPRVLGLAMVPGHHIVSIEVQRESLTGPPYL

SEQ ID NO: 9156 - protein, 252 aa, Homo sapiens
MCDFMNLSLADCLLVNLAYESSVFCTSIVAQDSRGHIYHGRNLDYPFGNVLRKLTVDVQFLKNGQIAFTGTTFIGYVGLWTGQSPHKFTVSGDERDKGWWWENAIAALFRRHIPVSWLIRATLSESENFEAAVGKLAKTPLIADVYYIVGGTSPREGVVITRNRDGPADIWPLDPLNGAWFRVETNYDHWKPAPKEDDRRTSAIKALNATGQANLSLEALFQVTCVTVSCIPRMFGVLLIVNMKNSVKSSGR

SEQ ID NO: 9157 - protein, 359 aa, Homo sapiens
MRTADREARPGLPSLLLLLLAGAGLSAASPPAAPRFNVSLDSVPELRWLPVLRHYDLDLVRAAMAQVIGDRVPKWVHVLIGKVVLELERFLPQPFTGEIRGMCDFMNLSLADCLLVNLAYESSVFCTSIVAQDSRGHIYHGRNLDYPFGNVLRKLTVDVQFLKNGQIAFTGTTFIGYVGLWTGQSPHKFTVSGDERDKGWWWENAIAALFRRHIPVSWLIRATLSESENFEAAVGKLAKTPLIADVYYIVGGTSPREGVVITRNRDGPADIWPLDPLNGAWFRVETNYDHWKPAPKEDDRRTSAIKALNATGQANLSLEALFQILSVVPVYNNFTIYTTVMSAGSPDKYMTRIRNPSRK

SEQ ID NO: 9158 - protein, 323 aa, Homo sapiens
MRTADREARPGLPSLLLLLLAGAGLSAASPPAAPRFNVSLDSVPELRWLPVLRHYDLDLVRAAMAQVIGDRVPKWVHVLIGKVVLELERFLPQPFTGEIRGMCDFMNLSLADCLLVNLAYESSVFCTSIVAQDSRGHIYHGRNLDYPFGNVLRKLTVDVQFLKNGQIAFTGTTFIGYVGLWTGQSPHKFTVSGDERDKGWWWENAIAALFRRHIPVSWLIRATLSESENFEAAVGKLAKTPLIADVYYIVGGTSPREGVVITRNRDGPADIWPLDPLNGAWFRVETNYDHWKPAPKEDDRRTSAIKALNATGQANLSLEALFQ

SEQ ID NO: 9159 - protein, 167 aa, Homo sapiens
MRTADREARPGLPSLLLLLLAGAGLSAASPPAAPRFNVSLDSVPELRWLPVLRHYDLDLVRAAMAQVIGDRVPKWVHVLIGKVVLELERFLPQPFTGEIRGMCDFMNLSLADCLLVNLAYESSVFCTSIVAQDSRGHIYHGRNLDYPFGNVLRKLTVDVQFLKNGQV

SEQ ID NO: 9160 - protein, 139 aa, Homo sapiens
  SITE 1: note = misc_feature - Xaa can be any naturally occurring amino acid
XDKGWWWENAIAALFRRHIPVSWLIRATLSESENFEAAVGKLAKTPLIADVYYIVGGTSPREGVVITRNRDGPADIWPLDPLNGAWFRVETNYDHWKPAPKEDDRRTSAIKALNATGQANLSLEALFQLHNLYYGNERR

SEQ ID NO: 9161 - protein, 222 aa, Homo sapiens
  SITE 1: note = misc_feature - Xaa can be any naturally occurring amino acid
XTSIVAQDSRGHIYHGRNLDYPFGNVLRKLTVDVQFLKNGQIAFTGTTFIGYVGLWTGQSPHKFTVSGDERDKGWWWENAIAALFRRHIPVSWLIRATLSESENFEAAVGKLAKTPLIADVYYIVGGTSPREGVVITRNRDGPADIWPLDPLNGAWFRVETNYDHWKPAPKEDDRRTSAIKALNATGQANLSLEALFQILSVVPVYNKLFPLAEFPEVGLLS

SEQ ID NO: 9162 - protein, 411 aa, Homo sapiens
MLLKTVLLLGHVAQVLMLDNGLLQTPPMGWLAWERFRCNINCDEDPKNCISEQLFMEMADRMAQDGWRDMGYTYLNIDDCWIGGRDASGRLMPDPKRFPHGIPFLADYVHSLGLKLGIYADMGNFTCMGYPGTTLDKVVQDAQTFAEWKVDMLKLDGCFSTPEERAQGYPKMAAALNATGRPIAFSCSWPAYEGGLPPRVNYSLLADICNLWRNYDDIQDSWWSVLSILNWFVEHQDILQPVAGPGHWNDPDMLLIGNFGLSLEQSRAQMALWTVLAAPLLMSTDLRTISAQNMDILQNPLMIKINQDPLGIQGRRIHKEKSLIEVYMRPLSNKASALVFFSCRTDMPYRYHSSLGQLNFTGSVIYEAQDVYSGDIISGLRDETNFTVIINPSGVVMWYLYPIKNLEMSQQ

SEQ ID NO: 9163 - protein, 411 aa, Homo sapiens; identical to SEQ ID NO: 9162

SEQ ID NO: 9164 - protein, 411 aa, Homo sapiens; identical to SEQ ID NO: 9162

SEQ ID NO: 9165 - protein, 743 aa, Homo sapiens
MEAVAVAAAVGVLLLAGAGGAAGDEAREAAAVRALVARLLGPGPAADFSVSVERALAAKPGLDTYSLGGGGAARVRVRGSTGVAAAAGLHRYLRDFCGCHVAWSGSQLRLPRPLPAVPGELTEATPNRYRYYQNVCTQSYSFVWWDWARWEREIDWMALNGINLALAWSGQEAIWQRVYLALGLTQAEINEFFTGPAFLAWGRMGNLHTWDGPLPPSWHIKQLYLQHRVLDQMRSFGMTPVLPAFAGHVPEAVTRVFPQVNVTKMGSWGHFNCSYSCSFLLAPEDPIFPIIGSLFLRELIKEFGTDHIYGADTFNEMQPPSSEPSYLAAATTAVYEAMTAVDTEAVWLLQGWLFQHQPQFWGPAQIRAVLGAVPRGRLLVLDLFAESQPVYTRTASFQGQPFIWCMLHNFGGNHGLFGALEAVNGGPEAARLFPNSTMVGTGMAPEGISQNEVVYSLMAELGWRKDPVPDLAAWVTSFAARRYGVSHPDAGAAWRLLLRSVYNCSGEACRGHNRSPLVRRPSLQMNTSIWYNRSDVFEAWRLLLTSAPSLATSPAFRYDLLDLTRQAVQELVSLYYEEARSAYLSKELASLLRAGGVLAYELLPALDEVLASDSRFLLGSWLEQARAAAVSEAEADFYEQNSRYQLTLWGPEGNILDYANKQLAGLVANYYTPRWRLFLEALVDSVAQGIPFQQHQFDKNVFQLEQAFVLSKQRYPSQPRGDTVDLAKKIFLKYYPRWVAGSW

SEQ ID NO: 9166 - protein, 81 aa, Homo sapiens
MGDLFQGRGPSRVGCAPAHDTARRYRYYQNVCTQSYSFVWWDWARWEREIDWMALNGINLALAWSGQEAIWQRVYLALGLT

SEQ ID NO: 9167 - protein, 122 aa, Homo sapiens
RGAAPLPARLLWLPRGLVRLSAAPAAATASRAGGADRGHAQQVYLALGLTQAEINEFFTGPAFLAWGRMGNLHTWDGPLPPSWHIKQLYLQHRVLDQMRSFGMTPVLPAFAGHVPEAVTSGY

SEQ ID NO: 9168 - protein, 65 aa, Homo sapiens
  SITE 1: note = misc_feature - Xaa can be any naturally occurring amino acid
XFGTDHIYGADTFNEMQPPSSEPSYLAAATTAVYEAMTAVLGARPDQGCAGSCAPWPPPGSGPVC

SEQ ID NO: 9169 - protein, 170 aa, Homo sapiens
  SITE 1: note = misc_feature - Xaa can be any naturally occurring amino acid
XGRRGAAPLPARLLWLPRGLVRLSAAPAAATASRAGGADRGHAQQVYLALGLTQAEINEFFTGPAFLAWGRMGNLHTWDGPLPPSWHIKQLYLQHRVLDQMRSFGMTPVLPAFAGHVPEAVTRVFPQVNVTKMGSWGHFNCSYSCSFLLAPEDPIFPIIGSLFLRELIKE

SEQ ID NO: 9170 - protein, 534 aa, Homo sapiens
MATALMAVVLRAAAVAPRLRGRGGTGGARRLSCGARRRAARGTSPGRRLSTAWSQPQPPPEEYAGADDVSQSPVAEEPSWVPSPRPPVPHESPEPPSGRSLVQRDIQAFLNQCGASPGEARHWLTQFQTCHHSADKPFAVIEVDEEVLKCQQGVSSLAFALAFLQRMDMKPLVVLGLPAPTAPSGCLSFWEAKAQLAKSCKVLVDALRHNAAAAVPFFGGGSVLRAAEPAPHASYGGIVSVETDLLQWCLESGSIPILCPIGETAARRSVLLDSLEVTASLAKALRPTKIIFLNNTGGLRDSSHKVLSNVNLPADLDLVCNAEWVSTKERQQMRLIVDVLSRLPHHSSAVITAASTLLTELFSNKGSGTLFKNAERMLRVRSLDKLDQGRLVDLVNASFGKKLRDDYLASLRPRLHSIYVSEGYNAAAILTMEPVLGGTPYLDKFVVSSSRQGQGSGQMLWECLRRDLQTLFWRSRVTNPINPWYFKHSDGSFSNKQWIFFWFGLADIRDSYELVNHAKGLPDSFHKPASDPGS

SEQ ID NO: 9171 - protein, 511 aa, Homo sapiens
SCGARRRAARGTSPGRRLSTAWSQPQPPPEEYAGADDVSQSPVAEEPSWVPSPRPPVPHESPEPPSGRSLVQRDIQAFLNQCGASPGEARHWLTQFQTCHHSADKPFAVIEVDEEVLKCQQGVSSLAFALAFLQRMDMKPLVVLGLPAPTAPSGCLSFWEAKAQLAKSCKVLVDALRHNAAAAVPFFGGGSVLRAAEPAPHASYGGIVSVETDLLQWCLESGSIPILCPIGETAARRSVLLDSLEVTASLAKALRPTKIIFLNNTGGLRDSSHKVLSNVNLPADLDLVCNAEWVSTKERQQMRLIVDVLSRLPHHSSAVITAASTLLTELFSNKGSGTLFKNAERMLRVRSLDKLDQGRLVDLVNASFGKKLRDDYLASLRPRLHSIYVSEGLPLSRCARYNAAAILTMEPVLGGTPYLDKFVVSSSRQGQGSGQMLWECLRRDLQTLFWRSRVTNPINPWYFKHSDGSFSNKQWIFFWFGLADIRDSYELVNHAKGLPDSFHKPASDPGS

SEQ ID NO: 9172 - protein, 104 aa, Homo sapiens
MSPPPLLQPLLLLLPLLNVEPSGATLIRIPLHRVQPGRRILNLLRGWREPAELPKLGAPSPGDKPIFVPLSNYRDGYTTDLIPKPLAPSRPMGPSLPFNMELGG

SEQ ID NO: 9173 - protein, 268 aa, Homo sapiens
MSPPPLLQPLLLLLPLLNVEPSGATLIRIPLHRVQPGRRILNLLRGWREPAELPKLGAPSPGDKPIFVPLSNYRDVQYFGEIGLGTPPQNFTVAFDTGSSNLWVPSRRCHFFSVPCSSSSFQANGTKFAIQYGTGRVDGILSEDKLTIGGIKGASVIFGEALWEPSLVFAFAHFDGILGLGFPILSVEGVRPPMDVLVEQGLLDKPVFSFYLNRDPEEPDGGELVLGGSDPAHYIPPLTFVPVTVPAYWQIHMERVKVGPGLTLCAKG

SEQ ID NO: 9174 - protein, 420 aa, Homo sapiens
MSPPPLLQPLLLLLPLLNVEPSGATLIRIPLHRVQPGRRILNLLRGWREPAELPKLGAPSPGDKPIFVPLSNYRDVQYFGEIGLGTPPQNFTVAFDTGSSNLWVPSRRCHFFSVPCWLHHRFDPKASSSFQANGTKFAIQYGTGRVDGILSEDKLTIGGIKGASVIFGEALWEPSLVFAFAHFDGILGLGFPILSVEGVRPPMDVLVEQGLLDKPVFSFYLNRDPEEPDGGELVLGGSDPAHYIPPLTFVPVTVPAYWQIHMERVKVGPGLTLCAKGCAAILDTGTSLITGPTEEIRALHAAIGGIPLLAGEYIILCSEIPKLPAVSFLLGGVWFNLTAHDYVIQTTRNGVRLCLSGFQALDVPPPAGPFWILGDVFLGTYVAVFDRGDMKSSARVGLARARTRGADLGWGETAQAQFPG

SEQ ID NO: 9175 - protein, 237 aa, Homo sapiens
MLPDGPGSSLWGNPGLQTSDSPNAVHEVEKWLPRLHALVVGPGLGRDDALLRNVQGILEVSKARDIPVVIDADGLWLVAQQPALIHGYRKAVLTPNHVEFSRLYDAVLRGPMDSDDSHGSVLRLSQALGNVTVVQKGERDILSNGQQVLVCSQEGSSRRCGGQGDLLSGSLGVLVHWALLAGPQKTNGSSPLLVAAFGACSLTRQCNHQAFQKHGRSTTTSDMIAEVGAAFSKLFET

SEQ ID NO: 9176 - protein, 390 aa, Homo sapiens
MVTRAGAGTAVAGAVVVALLSAALALYGPPLDAVLERAFSLRKAHSIKDMENTLQLVRNIIPPLSSTKHKGQDGRIGVVGGCQEYTGAPYFAAISALKVGADLSHVFCASAAAPVIKAYSPELIVHPVLDSPNAVHEVEKWLPRLHALVVGPGLGRDDALLRNVQGILEVSKARDIPVVIDADGLWLVAQQPALIHGYRKAVLTPNHVEFSRLYDAVLRGPMDSDDSHGSVLRLSQALGNVTVVQKGERDILSNGQQVLVCSQEGSSRRCGGQGDLLSGSLGVLVHWALLAGPQKTNGGISDLKLTIWGPEIETGVKTRAQGSCGPRTTTPTSPHLLLSPSPQVQPSPGGRVWRLLSHQAVQPPSLPEARSLHHHLRHDRRGGGRLQQAL

SEQ ID NO: 9177 - protein, 260 aa, Homo sapiens
MSRLRALLGLGLLVAGSRVPRIKSQTIACRSGPTWWGPQRLNSGGRWDSEVMASTVVKYLSQEEAQAVDQELFNEYQFSVDQLMELAGLSCATAIAKAYPPTSMSRSPPTVLVICGPGNNGGDGLVCARHLKLFGYEPTIYYPKRPNKPLFTALVTQCQKMDIPFLGEMPAELQGRCSGTVPQHPECPEGTHCAHCQHRHSLRMGRGEGKCWRDPARLAHIPHSPQKICNPVYRSLPLPGGSFCATCSGEEVPAEPATLP

SEQ ID NO: 9178 - protein, 245 aa, Homo sapiens
MSRLRALLGLGLLVAGSRVPRIKSQTIACRSGPTWWGPQRLNSGGRWDSEVMASTVVKYLSQEEAQAVDQELFNEYQFSVDQLMELAGLSCATAIAKAYPPTSMSRSPPTVLVICGPGNNGGDGLVCARHLKLFGYEPTIYYPKRPNKPLFTALVTQCQKMDIPFLGEMPAEPMTIDELYELVVDAIFGFSFKGDVREPFHSILSVLKGLTVPIASIDIPSGAGIQKVGWGRLGPYPPDSCPHQV

SEQ ID NO: 9179 - protein, 288 aa, Homo sapiens
MSRLRALLGLGLLVAGSRVPRIKSQTIACRSGPTWWGPQRLNSGGRWDSEVMASTVVKYLSQEEAQAVDQELFNEYQFSVDQLMELAGLSCATAIAKAYPPTSMSRSPPTVLVICGPGNNGGDGLVCARHLKLFGYEPTIYYPKRPNKPLFTALVTQCQKMDIPFLGEMPAEPMTIDELYELVVDAIFGFSFKGDVREPFHSILSVLKGLTVPIASIDIPSGWDVEKGNAGGIQPDLLISLTAPKKSATQFTGRYHYLGGRFVPPALEKKYQLNLPPYPDTECVYRLQ

SEQ ID NO: 9180 - protein, 128 aa, Homo sapiens
MCSLALQQLISMDLFWRLFFVCGQEGLRALEATGMMLRVLVGAVLPAMLLAAPPPINKLALFPDKSAWCEAKNITQIVGHSGCEAKSIQNRACLGQCFSYSVPNTFPQSTESLVHCDSCMPAQSMWEI

SEQ ID NO: 9181 - protein, 215 aa, Homo sapiens
MCSLALQQLISMDLFWRLFFVCGQEGLRALEATGMMLRVLVGAVLPAMLLAAPPPINKLALFPDKSAWCEAKNITQIVGHSGCEAKSIQNRACLGQCFSYSVPNTFPQSTESLVHCDSCMPAQSMWEIVTLECPGHEEVPRVDKLVEKILHCSCQACGKEPSHEGLSVYVQGEDGPGSQPGTHPHPHPHPHPGGQTPEPEDPPGAPHTEEEGAED

SEQ ID NO: 9182 - protein, 163 aa, Homo sapiens
MLRVLVGAVLPAMLLAAPPPINKLALFPDKSAWCEAKNITQIVGHSGCEAKSIQNRACLGQCFSYSVPNTFPQSTESLVHCDSCMPAQSMWEIVTLECPGHEEVPRVDKLVEKILHCSCQACGKEPSHEGLSVYVQGEDGPGSQPGTHPHPHPHPHPGGQTPE

SEQ ID NO: 9183 - protein, 109 aa, Homo sapiens
MMLRVLVGAVLPAMLLAAPPPINKLALFPDKSAWCEAKNITQIVGHSGCEAKSIQNRACLGQCFSYSVPNTFPQSTESLVHCDSCMPAQSMWEIVTLECPGHEEVPRVD

SEQ ID NO: 9184 - protein, 116 aa, Homo sapiens
MMLRVLVGAVLPAMLLAAPPPINKLALFPDKSAWCEAKNITQIVGHSGCEAKSIQNRACLGQCFSYSVPNTFPQSTESLVHCDSCMPAQSMWEIVTLECPGHEEVPRVDKLVEKIL

SEQ ID NO: 9185 - protein, 117 aa, Homo sapiens
MMLRVLVGAVLPAMLLAAPPPINKLALFPDKSAWCEAKNITQIVGHSGCEAKSIQNRACLGQCFSYSVPNTFPQSTESLVHCDSCMPAQSMWEIVTLECPGHEEVPRVDKLVEKILH

SEQ ID NO: 9186 - protein, 128 aa, Homo sapiens
MMLRVLVGAVLPAMLLAAPPPINKLALFPDKSAWCEAKNITQIVGHSGCEAKSIQNRACLGQCFSYSVPNTFPQSTESLVHCDSCMPAQSMWEIVTLECPGHEEVPRVDKLVEKILHCSCQACGKEPS

SEQ ID NO: 9187 - protein, 181 aa, Homo sapiens
MMLRVLVGAVLPAMLLAAPPPINKLALFPDKSAWCEAKNITQIVGHSGCEAKSIQNRACLGQCFSYSVPNTFPQSTESLVHCDSCMPAQSMWEIVTLECPGHEEVPRVDKLVEKILHCSCQACGKEPSHEGLSVYVQGEDGPGSQPGTHPHPHPHPHPGGQTPEPEDPPGAPHTEEEGAED

SEQ ID NO: 9188 - protein, 181 aa, Homo sapiens; identical to SEQ ID NO: 9187

SEQ ID NO: 9189 - protein, 181 aa, Homo sapiens; identical to SEQ ID NO: 9187

SEQ ID NO: 9190 - protein, 181 aa, Homo sapiens; identical to SEQ ID NO: 9187

SEQ ID NO: 9191 - protein, 181 aa, Homo sapiens; identical to SEQ ID NO: 9187

SEQ ID NO: 9192 - protein, 181 aa, Homo sapiens; identical to SEQ ID NO: 9187

SEQ ID NO: 9193 - protein, 216 aa, Homo sapiens
MPGNLMSQTSRAVSIWKFPAKLGKTHGHRALEATGMMLRVLVGAVLPAMLLAAPPPINKLALFPDKSAWCEAKNITQIVGHSGCEAKSIQNRACLGQCFSYSVPNTFPQSTESLVHCDSCMPAQSMWEIVTLECPGHEEVPRVDKLVEKILHCSCQACGKEPSHEGLSVYVQGEDGPGSQPGTHPHPHPHPHPGGQTPEPEDPPGAPHTEEEGAED

SEQ ID NO: 9194 - protein, 165 aa, Homo sapiens
EFILVQADTPSSPSIDQVEPYSSTAQVQFDEPEATGGVPILKYKAEWRAVGEEVWHSKWYDAKEASMEGIVTIVGLKPETTYAVRLAALNGKGLGEISAASEFKTQPVHSPPPPASASSSTPVPLSPPDTTWPLPALATTEPAKNIAQNHCCNMFQAGLHNALMK

SEQ ID NO: 9195 - protein, 133 aa, Homo sapiens
MLQTKDLIWTLFFLGTAAKPKITYVENQTAMELEEQVTLTCEASGDPIPSITWRTSTRNISSEEKTLDGHMVVRSHARVSSLTLKSIQYTDAGEYICTASNTIGQDSQSMYLEVQYAPKLQGPVAVYTWEGNQ

SEQ ID NO: 9196 - protein, 136 aa, Homo sapiens [sequence omitted]

SEQ ID NO: 9197 - protein, 858 aa, Homo sapiens
MLQTKDLIWTLFFLGTAVSLQVDIVPSQGEISVGESKFFLCQVAGDAKDKDISWFSPNGEKLTPNQQRISVVWNDDSSSTLTIYNANIDDAGIYKCVVTGEDGSESEATVNVKIFQKLMFKNAPTPQEFREGEDAVIVCDVVSSLPPTIIWKHKGRDVILKKDVRFIVLSNNYLQIRGIKKTDEGTYRCEGRILARGEINFKDIQVIVNVPPTIQARQNIVNATANLGQSVTLVCDAEGFPEPTMSWTKDGEQIEQEEDDEKYIFSDDSSQLTIKKVDKNDEAEYICIAENKAGEQDATIHLKVFAKPKITYVENQTAMELEEQVTLTCEASGDPIPSITWRTSTRNISSEEKASWTRPEKQETLDGHMVVRSHARVSSLTLKSIQYTDAGEYICTASNTIGQDSQSMYLEVQYAPKLQGPVAVYTWEGNQVNITCEVFAYPSATISWFRDGQLLPSSNYSNIKIYNTPSASYLEVTPDSENDFGNYNCTAVNRIGQESLEFILVQADTPSSPSIDQVEPYSSTAQVQFDEPEATGGVPILKYKAEWRAVGEEVWHSKWYDAKEASMEGIVTIVGLKPETTYAVRLAALNGKGLGEISAASEFKTQPVQGEPSAPKLEGQMGEDGNSIKVNLIKQDDGGSPIRHYLVRYRALSSEWKPEIRLPSGSDHVMLKSLDWNAEYEVYVVAENQQGKSKAAHFVFRTSAQPTAIPANGSPTSGLSTGAIVGILIVIFVLLLVVVDITCYFLNKCGLFMCIAVNLCGKAGPGAKGKDMEEGKAAFSKDESKEPIVEVRTEEERTPNHDGGKHTEPNETTPLTEPEKGPVEAKPECQETETKPAPAEVKTVPNDATQTKENESKA

SEQ ID NO: 9198 - protein, 725 aa, Homo sapiens
MLQTKDLIWTLFFLGTAVSLQVDIVPSQGEISVGESKFFLCQVAGDAKDKDISWFSPNGEKLTPNQQRISVVWNDDSSSTLTIYNANIDDAGIYKCVVTGEDGSESEATVNVKIFQKLMFKNAPTPQEFREGEDAVIVCDVVSSLPPTIIWKHKGRDVILKKDVRFIVLSNNYLQIRGIKKTDEGTYRCEGRILARGEINFKDIQVIVNVPPTIQARQNIVNATANLGQSVTLVCDAEGFPEPTMSWTKDGEQIEQEEDDEKYIFSDDSSQLTIKKVDKNDEAEYICIAENKAGEQDATIHLKVFAKPKITYVENQTAMELEEQVTLTCEASGDPIPSITWRTSTRNISSEEKTLDGHMVVRSHARVSSLTLKSIQYTDAGEYICTASNTIGQDSQSMYLEVQYAPKLQGPVAVYTWEGNQVNITCEVFAYPSATISWFRDGQLLPSSNYSNIKIYNTPSASYLEVTPDSENDFGNYNCTAVNRIGQESLEFILVQADTPSSPSIDQVEPYSSTAQVQFDEPEATGGVPILKYKAEWRAVGEEVWHSKWYDAKEASMEGIVTIVGLKPETTYAVRLAALNGKGLGEISAASEFKTQPVREPSAPKLEGQMGEDGNSIKVNLIKQDDGGSPIRHYLVRYRALSSEWKPEIRLPSGSDHVMLKSLDWNAEYEVYVVAENQQGKSKAAHFVFRTSAQPTAIPATLGGNSASYTFVSLLFSAVTLLLLC

SEQ ID NO: 9199 - protein, 364 aa, Homo sapiens
MLQTKDLIWTLFFLGTAVSLQVDIVPSQGEISVGESKFFLCQVAGDAKDKDISWFSPNGEKLTPNQQRISVVWNDDSSSTLTIYNANIDDAGIYKCVVTGEDGSESEATVNVKIFQKLMFKNAPTPQEFREGEDAVIVCDVVSSLPPTIIWKHKGRDVILKKDVRFIVLSNNYLQIRGIKKTDEGTYRCEGRILARGEINFKDIQVIVNVPPTIQARQNIVNATANLGQSVTLVCDAEGFPEPTMSWTKDGEQIEQEEDDEKYIFSDDSSQLTIKKVDKNDEAEYICIAENKAGEQDATIHLKVFAKPKITYVENQTAMELEEQVTLTCEASGDPIPSITWRTSTRNISSEEKASWTRPEKQEV

SEQ ID NO: 9200 - protein, 761 aa, Homo sapiens
MLQTKDLIWTLFFLGTAVSLQVDIVPSQGEISVGESKFFLCQVAGDAKDKDISWFSPNGEKLTPNQQRISVVWNDDSSSTLTIYNANIDDAGIYKCVVTGEDGSESEATVNVKIFQKLMFKNAPTPQEFREGEDAVIVCDVVSSLPPTIIWKHKGRDVILKKDVRFIVLSNNYLQIRGIKKTDEGTYRCEGRILARGEINFKDIQVIVNVPPTIQARQNIVNATANLGQSVTLVCDAEGFPEPTMSWTKDGEQIEQEEDDEKYIFSDDSSQLTIKKVDKNDEAEYICIAENKAGEQDATIHLKVFAKPKITYVENQTAMELEEQVTLTCEASGDPIPSITWRTSTRNISSEEKTLDGHMVVRSHARVSSLTLKSIQYTDAGEYICTASNTIGQDSQSMYLEVQYAPKLQGPVAVYTWEGNQVNITCEVFAYPSATISWFRDGQLLPSSNYSNIKIYNTPSASYLEVTPDSENDFGNYNCTAVNRIGQESLEFILVQADTPSSPSIDQVEPYSSTAQVQFDEPEATGGVPILKYKAEWRAVGEEVWHSKWYDAKEASMEGIVTIVGLKPETTYAVRLAALNGKGLGEISAASEFKTQPVHSPPPPASASSSTPVPLSPPDTTWPLPALATTEPAKGEPSAPKLEGQMGEDGNSIKVNLIKQDDGGSPIRHYLVRYRALSSEWKPEIRLPSGSDHVMLKSLDWNAEYEVYVVAENQQGKSKAAHFVFRTSAQPTAIPATLGGNSASYTFVSLLFSAVTLLLLC

SEQ ID NO: 9201 - protein, 848 aa, Homo sapiens [sequence omitted]

SEQ ID NO: 9202 - protein, 761 aa, Homo sapiens [sequence omitted]

SEQ ID NO: 9203 - protein, 726 aa, Homo sapiens
MLQTKDLIWTLFFLGTAVSLQVDIVPSQGEISVGESKFFLCQVAGDAKDKDISWFSPNGEKLTPNQQRISVVWNDDSSSTLTIYNANIDDAGIYKCVVTGEDGSESEATVNVKIFQKLMFKNAPTPQEFREGEDAVIVCDVVSSLPPTIIWKHKGRDVILKKDVRFIVLSNNYLQIRGIKKTDEGTYRCEGRILARGEINFKDIQVIVNVPPTIQARQNIVNATANLGQSVTLVCDAEGFPEPTMSWTKDGEQIEQEEDDEKYIFSDDSSQLTIKKVDKNDEAEYICIAENKAGEQDATIHLKVFAKPKITYVENQTAMELEEQVTLTCEASGDPIPSITWRTSTRNISSEEKTLDGHMVVRSHARVSSLTLKSIQYTDAGEYICTASNTIGQDSQSMYLEVQYAPKLQGPVAVYTWEGNQVNITCEVFAYPSATISWFRDGQLLPSSNYSNIKIYNTPSASYLEVTPDSENDFGNYNCTAVNRIGQESLEFILVQADTPSSPSIDQVEPYSSTAQVQFDEPEATGGVPILKYKAEWRAVGEEVWHSKWYDAKEASMEGIVTIVGLKPETTYAVRLAALNGKGLGEISAASEFKTQPVQGEPSAPKLEGQMGEDGNSIKVNLIKQDDGGSPIRHYLVRYRALSSEWKPEIRLPSGSDHVMLKSLDWNAEYEVYVVAENQQGKSKAAHFVFRTSAQPTAIPATLGGNSASYTFVSLLFSAVTLLLLC

SEQ ID NO: 9204 - protein, 884 aa, Homo sapiens [sequence omitted]

SEQ ID NO: 9205 - protein, 884 aa, Homo sapiens
MLQTKDLIWTLFFLGTAVSLQVDIVPSQGEISVGESKFFLCQVAGDAKDKDISWFSPNGEKLTPNQQRISVVWNDDSSSTLTIYNANIDDAGIYKCVVTGEDGSESEATVNVKIFQKLMFKNAPTPQEFREGEDAVIVCDVVSSLPPTIIWKHKGRDVILKKDVRFIVLSNNYLQIRGIKKTDEGTYRCEGRILARGEINFKDIQVIVNVPPTIQARQNIVNATANLGQSVTLVCDAEGFPEPTMSWTKDGEQIEQEEDDEKYIFSDDSSQLTIKKVDKNDEAEYICIAENKAGEQDATIHLKVFAKPKITYVENQTAMELEEQVTLTCEASGDPIPSITWRTSTRNISSEEKASWTRPEKQEVHAPWNWQVGRQKGQAGSAGFPGSHETLDGHMVVRSHARVSSLTLKSIQYTDAGEYICTASNTIGQDSQSMYLEVQYAPKLQGPVAVYTWEGNQVNITCEVFAYPSATISWFRDGQLLPSSNYSNIKIYNTPSASYLEVTPDSENDFGNYNCTAVNRIGQESLEFILVQADTPSSPSIDQVEPYSSTAQVQFDEPEATGGVPILKYKAEWRAVGEEVWHSKWYDAKEASMEGIVTIVGLKPETTYAVRLAALNGKGLGEISAASEFKTQPVQGEPSAPKLEGQMGEDGNSIKVNLIKQDDGGSPIRHYLVRYRALSSEWKPEIRLPSGSDHVMLKSLDWNAEYEVYVVAENQQGKSKAAHFVFRTSAQPTAIPANGSPTSGLSTGAIVGILIVIFVLLLVVVDITCYFLNKCGLFMCIAVNLCGKAGPGAKGKDMEEGKAAFSKDESKEPIVEVRTEEERTPNHDGGKHTEPNETTPLTEPEKGPVEAKPECQETETKPAPAEVKTVPNDATQTKENESKA

SEQ ID NO: 9206 - protein, 858 aa, Homo sapiens [sequence omitted]

SEQ ID NO: 9207 - protein, 848 aa, Homo sapiens
MLQTKDLIWTLFFLGTAVSLQVDIVPSQGEISVGESKFFLCQVAGDAKDKDISWFSPNGEKLTPNQQRISVVWNDDSSSTLTIYNANIDDAGIYKCVVTGEDGSESEATVNVKIFQKLMFKNAPTPQEFREGEDAVIVCDVVSSLPPTIIWKHKGRDVILKKDVRFIVLSNNYLQIRGIKKTDEGTYRCEGRILARGEINFKDIQVIVNVPPTIQARQNIVNATANLGQSVTLVCDAEGFPEPTMSWTKDGEQIEQEEDDEKYIFSDDSSQLTIKKVDKNDEAEYICIAENKAGEQDATIHLKVFAKPKITYVENQTAMELEEQVTLTCEASGDPIPSITWRTSTRNISSEEKTLDGHMVVRSHARVSSLTLKSIQYTDAGEYICTASNTIGQDSQSMYLEVQYAPKLQGPVAVYTWEGNQVNITCEVFAYPSATISWFRDGQLLPSSNYSNIKIYNTPSASYLEVTPDSENDFGNYNCTAVNRIGQESLEFILVQADTPSSPSIDQVEPYSSTAQVQFDEPEATGGVPILKYKAEWRAVGEEVWHSKWYDAKEASMEGIVTIVGLKPETTYAVRLAALNGKGLGEISAASEFKTQPVQGEPSAPKLEGQMGEDGNSIKVNLIKQDDGGSPIRHYLVRYRALSSEWKPEIRLPSGSDHVMLKSLDWNAEYEVYVVAENQQGKSKAAHFVFRTSAQPTAIPANGSPTSGLSTGAIVGILIVIFVLLLVVVDITCYFLNKCGLFMCIAVNLCGKAGPGAKGKDMEEGKAAFSKDESKEPIVEVRTEEERTPNHDGGKHTEPNETTPLTEPEKGPVEAKPECQETETKPAPAEVKTVPNDATQTKENESKA

SEQ ID NO: 9208 - protein, 229 aa, Homo sapiens
TISWFRDGQLLPSSNYSNIKIYNTPSASYLEVTPDSENDFGNYNCTAVNRIGQESLEFILVQADTPSSPSIDQVEPYSSTAQVQFDEPEATGGVPILKYKAEWRAVGEEVWHSKWYDAKEASMEGIVTIVGLKPETTYAVRLAALNGKGLGEISAASEFKTQPVHSPPPREPSAPKLEGQMGEDGNSIKVNLIKQDDGGSPIRHYLVRYRALSSEWKPEIRLPSGSDHV

SEQ ID NO: 9209 - protein, 357 aa, Homo sapiens
  SITE 1: note = misc_feature - Xaa can be any naturally occurring amino acid
XFILVQADTPSSPSIDQVEPYSSTAQVQFDEPEATGGVPILKYKAEWRAVGEEVWHSKWYDAKEASMEGIVTIVGLKPETTYAVRLAALNGKGLGEISAASEFKTQPVREPSAPKLEGQMGEDGNSIKVNLIKQDDGGSPIRHYLVRYRALSSEWKPEIRLPSGSDHVMLKSLDWNAEYEVYVVAENQQGKSKAAHFVFRTSAQPTAIPANGSPTSGLSTGAIVGILIVIFVLLLVVVDITCYFLNKCGLFMCIAVNLCGKAGPGAKGKDMEEGKAAFSKDESKEPIVEVRTEEERTPNHDGGKHTEPNETTPLTEPEKGPVEAKPECQETETKPAPAEVKTVPNDATQTKENESKA

SEQ ID NO: 9210 - protein, 84 aa, Homo sapiens
  SITE 1: note = misc_feature - Xaa can be any naturally occurring amino acid
XQDDGGSPIRHYLVRYRALSSEWKPEIRLPSGSDHVMLKSLDWNAEYEVYVVAENQQGKSKAAHFVFRTSAQPTAIPVTLLLLC

SEQ ID NO: 9211 - protein, 468 aa, Homo sapiens
  SITE 1: note = misc_feature - Xaa can be any naturally occurring amino acid
XSGSDHVMLKSLDWNAEYEVYVVAENQQGKSKAAHFVFRTSAQPTAIPANGSPTSGLSTGAIVGILIVIFVLLLVVVDITCYFLNKCGLFMCIAVNLCGKAGPGAKGKDMEEGKAAFSKDESKEPIVEVRTEEERTPNHDGGKHTEPNETTPLTEPELPADTTATVEDMLPSVTTVTTNSDTITETFATAQNSPTSETTTLTSSIAPPATATPDSNSVPAGQATPSKGPSASAPSPAPASAPKVAPLVDLSDTPTSTPAASNLSSSVLANQGAVLSPSAPAGVGEASKAPPASKPTPAPVPTPTGAASPLAAAAAPATEAPQAKQEAPSTKGPDPEPTQPGAAKSPAEAATALASPKSEAASVSTTNPSQGEDFKMDEGNFKTPDIDLAKDVFAALGSPAPAAGASGQAPELAPSTADSSVSPAPAKTEKGPVEAKPECQETETKPAPAEVKTVPNDATQTKENESKA

SEQ ID NO: 9212 - protein, 372 aa, Homo sapiens
  SITE 1: note = misc_feature - Xaa can be any naturally occurring amino acid
XTPSSPSIDQVEPYSSTAQVQFDEPEATGGVPILKYKAEWRAVGEEVWHSKWYDAKEASMEGIVTIVGLKPETTYAVRLAALNGKGLGEISAASEFKTQPVHSPPPPASASSSTPVPLSPPDKGEPSAPKLEGQMGEDGNSIKVNLIKQDDGGSPIRHYLVRYRALSSEWKPEIRLPSGSDHVMLKSLDWNAEYEVYVVAENQQGKSKAAHFVFRTSAQPTAIPANGSPTSGLSTGAIVGILIVIFVLLLVVVDITCYFLNKCGLFMCIAVNLCGKAGPGAKGKDMEEGKAAFSKDESKEPIVEVRTEEERTPNHDGGKHTEPNETTPLTEPEKGPVEAKPECQETETKPAPAEVKTVPNDATQTKENESKA

SEQ ID NO: 9213 - protein, 305 aa, Homo sapiens
YNTPSASYLEVTPDSENDFGNYNCTAVNRIGQESLEFILVQADTPSSPSIDQVEPYSSTAQVQFDEPEATGGVPILKYKAEWRAVGEEVWHSKWYDAKEASMEGIVTIVGLKPETTYAVRLAALNGKGLGEISAASEFKTQPVHSPPPPASASSSTPVPLSPPDTTWPLPALATTEPAREPSAPKLEGQMGEDGNSIKVNLIKQDDGGSPIRHYLVRYRALSSEWKPEIRLPSGSDHVMLKSLDWNAEYEVYVVAENQQGKSKAAHFVFRTSAQPTAIPATLGGNSASYTFVSLLFSAVTLLLLC

SEQ ID NO: 9214 - protein, 1321 aa, Homo sapiens
MGAPFVWALGLLMLQMLLFVAGEQGTQDITDASERGLHMQKLGSGSVQAALAELVALPCLFTLQPRPSAARDAPRIKWTKVRTASGQRQDLPILVAKDNVVRVAKSWQGRVSLPSYPRRRANATLLLGPLRASDSGLYRCQVVRGIEDEQDLVPLEVTGVVFHYRSARDRYALTFAEAQEACRLSSAIIAAPRHLQAAFEDGFDNCDAGWLSDRTVRYPITQSRPGCYGDRSSLPGVRSYGRRNPQELYDVYCFARELGGEVFYVGPARRLTLAGARAQCRRQGAALASVGQLHLAWHEGLDQCDPGWLADGSVRYPIQTPRRRCGGPAPGVRTVYRFANRTGFPSPAERFDAYCFRAHHPTSQHGDLETPSSGDEGEILSAEGPPVRELEPTLEEEEVVTPDFQEPLVSSGEEETLILEEKQESQQTLSPTPGDPMLASWPTGEVWLSTVAPSPSDMGAGTAASSHTEVAPTDPMPRRRGRFKGLNGRYFQQQEPEPGLQGGMEASAQPPTSEAAVNQMEPPLAMAVTEMLGSGQSRSPWADLTNEVDMPGAGSAGGKSSPEPWLWPPTMVPPSISGHSRAPVLELEKAEGPSARPATPDLFWSPLEATVSAPSPAPWEAFPVATSPDLPMMAMLRGPKEWMLPHPTPISTEANRVEAHGEATATAPPSPAAETKVYSLPLSLTPTGQGGEAMPTTPESPRADFRETGETSPAQVNKAEHSSSSPWPSVNRNVAVGFVPTETATEPTGLRGIPGSESGVFDTAESPTSGLQATVDEVQDPWPSVYSKGLDASSPSAPLGSPGVFLVPKVTPNLEPWVATDEGPTVNPMDSTVTPAPSDASGIWEPGSQVFEEAESTTLSPQVALDTSIVTPLTTLEQGDKVGVPAMSTLGSSSSQPHPEPEDQVETQGTSGASVPPHQSSPLGKPAVPPGTPTAASVGESASVSSGEPTVPWDPSSTLLPVTLGIEDFELEVLAGSPGVESFWEEVASGEEPALPGTPMNAGAEEVHSDPCENNPCLHGGTCNANGTMYGCSCDQGFAGENCEIDIDDCLCSPCENGGTCIDEVNGFVCLCLPSYGGSFCEKDTEGCDRGWHKFQGHCYRYFAHRRAWEDAEKDCRRRSGHLTSVHSPEEHSFINSFGHENTWIGLNDRIVERDFQWTDNTGLQFENWRENQPDNFFAGGEDCVVMVAHESGRWNDVPCNYNLPYVCKKGTVLCGPPPAVENASLIGARKAKYNVHATVRYQCNEGFAQHHVATIRCRSNGKWDRPQIVCTKPRRSHRMRRHHHHHQHHHQHHHHKSRKERRKHKKHPTEDWEKDEGNFC

SEQ ID NO: 9215 - protein, 175 aa, Homo sapiens
  SITE 1: note = misc_feature - Xaa can be any naturally occurring amino acid
XGCDRGWHKFQGHCYRYFAHRRAWEDAEKDCRRRSGHLTSVHSPEEHSFINSFGHENTWIGLNDRIVERDFQWTDNTGLQFENWRENQPDNFFAGGEDCVVMVAHESGRWNDVPCNYNLPYVCKKGTARRSHRMRRHHHHHQHHHQHHHHKSRKERRKHKKHPTEDWEKDEGNFC

SEQ ID NO: 9216 - protein, 99 aa, Homo sapiens
MVLRRLLAALLHSPQLVERLSESRPIRRAAQLTAFALLQAQLRGQDAARRLQDLAAGPVGSLCRRAERFRDAFTQELRRGLRGRSGPPPGSQRGPGANI

SEQ ID NO: 9217 - protein, 709 aa, Homo sapiens
MATAGGGSGADPGSRGLLRLLSFCVLLAGLCRGNSVERKIYIPLNKTAPCVRLLNATHQIGCQSSISGDTGVIHVVEKEEDLQWVLTDGPNPPYMVLLESKHFTRDLMEKLKGRTSRIAGLAVSLTKPSPASGFSPSVQCPNDGFGVYSNSYGPEFAHCREIQWNSLGNGLAYEDFSFPIFLLEDENETKVIKQCYQDHNLSQNGSAPTFPLCAMQLFSHMHAVISTATCMRRSSIQSTFSINPEIVCDPLSDYNVWSMLKPINTTGTLKPDDRVVVAATRLDSRSFFWNVAPGAESAVASFVTQLAAAEALQKAPDVTTLPRNVMFVFFQGETFDYIGSSRMVYDMEKGKFPVQLENVDSFVELGQVALRTSLELWMHTDPVSQKNESVRNQVEDLLATLEKSGAGVPAVILRRPNQSQPLPPSSLQRFLRARNISGVVLADHSGAFHNKYYQSIYDTAENINVSYPEWLSPEEDLNFVTDTAKALADVATVLGRALYELAGGTNFSDTVQADPQTVTRLLYGFLIKANNSWFQSILRQDLRSYLGDGPLQHYIAVSSPTNTTYVVQYALANLTGTVVNLTREQCQDPSKVPSENKDLYEYSWVQGPLHSNETDRLPRCVRSTARLARALSPAFELSQWSSTEYSTWTESRWKDIRARIFLIASKELELITLTVGFGILIFSLIVTYCINAKADVLFIAPREPGAVSY

SEQ ID NO: 9218 - protein, 255 aa, Homo sapiens
MATAGGGSGADPGSRGLLRLLSFCVLLAGLCRGNSVERKIYIPLNKTAPCVRLLNATHQIGCQSSISGDTGVIHVVEKEEDLQWVLTDGPNPPYMVLLESKHFTRDLMEKLKGRTSRIAGLAVSLTKPSPASGFSPSVQCPNDGFGVYSNSYGPEFAHCREIQWNSLGNGLAYEDFSFPIFLLEDENETKVIKQETFDYIGSSRMVYDMEKGKFPVQLENVDSFVELGQVALRTSLELWMHTDPVSQKNESVRNQ

SEQ ID NO: 9219 - protein, 134 aa, Homo sapiens
MATAGGGSGADPGSRGLLRLLSFCVLLAGLCRGNSVERKIYIPLNKTAPCVRLLNATHQIGCQSSISGDTGVIHVVEKEEDLQWVLTDGPNPPYMVLLESKHFTRQNVRLSDTFLCSFMEFLSYSRDLMEKLKG

SEQ ID NO: 9220 - protein, 232 aa, Homo sapiens
MATAGGGSGADPGSRGLLRLLSFCVLLAGLFLDFEPDPLPLCPDVSFFPQPQPPTPQSKGTGLCRGNSVERKIYIPLNKTAPCVRLLNATHQIGCQSSISGDTGVIHVVEKEEDLQWVLTDGPNPPYMVLLESKHFTRDLMEKLKGRTSRIAGLAVSLTKPSPASGFSPSVQCPNDGFGVYSNSYGPEFAHCREIQWNSLGNGLAYEDFSFPIFLLEDENETKVIKQCYQDH

SEQ ID NO: 9221 - protein, 71 aa, Homo sapiens
MATAGGGSGADPGSRGLLRLLSFCVLLAGLFLDFEPDPLPLCPDVSFFPQPQPPTPQSKGTGVKVSFLPRV

SEQ ID NO: 9222 - protein, 69 aa, Homo sapiens
MATAGGGSGADPGSRGLLRLLSFCVLLAVSLSMALHGLCNNPLRHIAGCHVEHVSVTISVCPRNQKNGL

SEQ ID NO: 9223 - protein, 219 aa, Homo sapiens
RSSIQSTFSINPEIVCDPLSDYNVWSMLKPINTTGTLKPDDRVVVAATRLAAAEALQKAPDVTTLPRNVMFVFFQGETFDYIGSSRMVYDMEKGKFPVQLENVDSFVELGQVALRTSLELWMHTDPVSQKNESVRNQVEDLLATLEKSGAGVPAVILRRPNQSQPLPPSSLQRFLRARNISGVVLADHSGAFHNKYYQSIYDTAENINVSYPEWLSPEE

SEQ ID NO: 9224 - protein, 69 aa, Homo sapiens
  SITE 1: note = misc_feature - Xaa can be any naturally occurring amino acid
XNDGFGVYSNSYGPEFAHCREIQWNSLGNGLAYEDFSFPIFLLEDENETKVIKQKSSVTPCLITMCGAC

SEQ ID NO: 9225 - protein, 275 aa, Homo sapiens
  SITE 1: note = misc_feature - Xaa can be any naturally occurring amino acid
XNVAPGAESAVASFVTQLAAAEALQKAPDVTTLPRNVMFVFFQGVALRTSLELWMHTDPVSQKNESVRNQVEDLLATLEKSGAGVPAVILRRPNQSQPLPPSSLQRFLRARNISGVVLADHSGAFHNKYYQSIYDTAENINVSYPEWLSPEEDLNFVTDTAKALADVATVLGRALYELAGGTNFSDTVQADPQTVTRLLYGFLIKANNSWFQSILRQDLRSYLGDGPLQHYIAVSSPTNTTYVVQYALANLTGTVVNLTREQCQDPSKVPSENKD

SEQ ID NO: 9226 - protein, 317 aa, Homo sapiens
  SITE 1: note = misc_feature - Xaa can be any naturally occurring amino acid
XVYSNSYGPEFAHCREIQWNSLGNGLAYEDFSFPIFLLEDENETKVIKQLFSHMHAVISTATCMRRSSIQSTFSINPEIVCDPLSDYNVWSMLKPINTTGTLKPDDRVVVAATRLDSRSFFWNVAPGAESAVASFVTQLAAAEALQKAPDVTTLPRNVMFVFFQGETFDYIGSSRMVYDMEKGKFPVQLENVDSFVELGQVALRTSLELWMHTDPVSQKNESVRNQVEDLLATLEKSGAGVPAVILRRPNQSQPLPPSSLQRFLRARNISGVVLADHSGAFHNKYYQSIYDTAENINVSYPEWLSPEEDLNFVTDTA

SEQ ID NO: 9227 - protein, 116 aa, Homo sapiens
MVLLHWCLLWLLFPLSSRTQKLPTRDEELFQMQIRDKAFFHDSSVIPDGAEISSYLFRDTPKRYFFVVEEDNTPLSVTVTPCDAPLEWKLSLQELPEDRSGEGSGDLEPLEQQKQQ

SEQ ID NO: 9228 - protein, 145 aa, Homo sapiens
MVLLHWCLLWLLFPLSSRTQKLPTRDEELFQMQIRDKAFFHDSSVIPDGAEISSYLFRDTPKRYFFVVEEDNTPLSVTVTPCDAPLEWKLSLQELPEDRSGEGSGDLEPLEQQKQQIINEEGTELFSYKGNDVEYFISSSSPSGL

SEQ ID NO: 9229 - protein, 568 aa, Homo sapiens
MVLLHWCLLWLLFPLSSRTQKLPTRDEELFQMQIRDKAFFHDSSVIPDGAEISSYLFRDTPKRYFFVVEEDNTPLSVTVTPCDAPLEWKLSLQELPEDRSGEGSGDLEPLEQQKQQIINEEGTELFSYKGNDVEYFISSSSPSGLYQLDLLSTEKDTHFKVYATTTPESDQPYPELPYDPRVDVTSLGRTTVTLAWKPSPTASLLKQPIQYCVVINKEHNFKSLCAVEAKLSADDAFMMAPKPGLDFSPFDFAHFGFPSDNSGKERSFQAKPSPKLGRHVYSRPKVDIQKICIGNKNIFTVSDLKPDTQYYFDVFVVNINSNMSTAYVGTFARTKEEAKQKTVELKDGKITDVFVKRKGAKFLRFAPVSSHQKVTFFIHSCLDAVQIQVRRDGKLLLSQNVEGIQQFQLRGKPKAKYLVRLKGNKKGASMLKILATTRPTKQSFPSLPEDTRIKAFDKLRTCSSATVAWLGTQERNKFCIYKKEVDDNYNEDQKKREQNQCLGPDIRKKSEKVLCKYFHSQNLQKAVTTETIKGLQPGKSYLLDVYVIGHGGHSVKYQSKVVKTRKFC

SEQ ID NO: 9230 - protein, 133 aa, Homo sapiens
MRKHVLAASFSMLSLLVIMGDTDSKTDSSFIMDSDPRRCMRHHYVDSISHPLYKCSSKMVLLARCEGHCSQASRSEPLVSFSTVLKQPFRSSCHCCRPQTSKLKALRLRCSGGMRLTATYRYILSCHCEECNS

SEQ ID NO: 9231 - protein, 133 aa, Homo sapiens; identical to SEQ ID NO: 9230

SEQ ID NO: 9232 - protein, 133 aa, Homo sapiens; identical to SEQ ID NO: 9230

SEQ ID NO: 9233 - protein, 129 aa, Homo sapiens
DIENAYKKTFLPEMSEKCEVLQYSAREAQDSKKVVEDIEYLKFDKGPWLKQDNRTLYHLRLLVQDKFEVLNYTSIPIFLPEVTIGAHQTDRVLHQFREVPADQEHRWVSLLSSPLGSLFSEWSVCGEDS

SEQ ID NO: 9234 - protein, 138 aa, Homo sapiens
ENAYKKTFLPEMSEKCEVLQYSAREAQDSKKVVEDIEYLKFDKGPWLKQDNRTLYHLRLLVQDKFEVLNYTSIPIFLPEVTIGAHQTDRVLHQFREFSLFNGRKPDAVKILCSLLEADRSLLEADRSLLEADRVQDSC

SEQ ID NO: 9235 - protein, 94 aa, Homo sapiens
MALRLLKLAATSASARVVAAGAQRVASSTFLKRGFIIQTVPQEMGSPSPPTIMATVVWRNFTMIREAMMATVTACSPGCTAVACCSTQMPWSTC

SEQ ID NO: 9236 - protein, 429 aa, Homo sapiens
MALRLLKLAATSASARVVAAGAQRVRGIHSSVQCKLRYGMWHFLLGDKASKRLTERSRVITVDGNICTGKGKLAKEIAEKLGFKHFPEAGIHYPDSTTGDGKPLATDYNGNCSLEKFYDDPRSNDGNSYRLQSWLYSSRLLQYSDALEHLLTTGQGVVLERSIFSDFVFLEAMYNQGFIRKQCESALQTHFWTGVAGASGKLESGSSEEVLLINERGGRSKPGVDHYNEVKSVTICDYLPPHLVIYIDVPVPEPHEMKITSAYLQDIENAYKKTFLPEMSEKCEVLQYSAREAQDSKKVVEDIEYLKFDKGPWLKQDNRTLYHLRLLVQDKFEVLNYTSIPIFLPEVTIGAHQTDRVLHQFRERLDWTVCFGEESTEVKHQGHLLSVQPGTVALTVGSWLRSCLLGLHWKLLFLFPESPMHTTAFMFLC

SEQ ID NO: 9237 - protein, 201 aa, Homo sapiens
MALRLLKLAATSASARVVAAGAQRVRGIHSSVQCKLRYGMWHFLLGDKASKRLTERSRVITVDGNICTGKGKLAKEIAEKLGFKHFPEAGIHYPDSTTGDGKPLATDYNGNCSLEKFYDDPRSNDGNSYRLQSWLYSSRLLQYSDALEHLLTTGQGVVLERSIFSDFVFLEAMYNQGFIRKQCESALQTHFWVCGATLQGL

SEQ ID NO: 9238 - protein, 355 aa, Homo sapiens
MALRLLKLAATSASARVVAAGAQRVRGIHSSVQCKLRYGMWHFLLGDKASKRLTERSRVITVDGNICTGKGKLAKEIAEKLGFKHFPEAGIHYPDSTTGDGKPLATDYNGNCSLEKFYDDPRSNDGNSYRLQSWLYSSRLLQYSDALEHLLTTGQGVVLERSIFSDFVFLEAMYNQGFIRKQCVDHYNEVKSVTICDYLPPHLVIYIDVPVPEVQRRIQKKGDPHEMKITSAYLQDIENAYKKTFLPEMSEKCEVLQYSAREAQDSKKVVEDIEYLKFDKGPWLKQDNRTLYHLRLLVQDKFEVLNYTSIPIFLPEVTIGAHQTDRVLHQFRELPGRKYSPGYNTEVGDKWIWLK

SEQ ID NO: 9239 - protein, 390 aa, Homo sapiens
MALRLLKLAATSASARVVAAGAQRVRGIHSSVQCKLRYGMWHFLLGDKASKRLTERSRVITVDGNICTGKGKLAKEIAEKLGFKHFPEAGIHYPDSTTGDGKPLATDYNGNCSLEKFYDDPRSNDGNSYRLQSWLYSSRLLQYSDALEHLLTTGQGVVLERSIFSDFVFLEAMYNQGFIRKQCVDHYNEVKSVTICDYLPPHLVIYIDVPVPEVQRRIQKKGDPHEMKITSAYLQDIENAYKKTFLPEMSEKCEVLQYSAREAQDSKKVVEDIEYLKFDKGPWLKQDNRTLYHLRLLVQDKFEVLNYTSIPIFLPEVTIGAHQTDRVLHQFRELGIPYPQRAVQSTREGPEVLLTGLWRWEDLLIGLQLPGRKYSPGYNTEVGDKWIWLK

SEQ ID NO: 9240 - protein, 245 aa, Homo sapiens [sequence omitted]

SEQ ID NO: 9241 - protein, 355 aa, Homo sapiens
MALRLLKLAATSASARVVARAPSAWRGIHSSVQCKLRYGMWHFLLGDKASKRLTERSRVITVDGNICTGKGKLAKEIAEKLGFKHFPEAGIHYPDSTTGDGKPLATDYNGNCSLEKFYDDPRSNDGNSYRLQSWLYSSRLLQYSDALEHLLTTGQGVVLERSIFSDFVFLEAMYNQGFIRKQCVDHYNEVKSVTICDYLPPHLVIYIDVPVPEVQRRIQKKGDPHEMKITSAYLQDIENAYKKTFLPEMSEKCEVLQYSAREAQDSKKVVEDIEYLKFDKGPWLKQDNRTLYHLRLLVQDKFEVLNYTSIPIFLPEVTIGAHQTDRVLHQFRELPGRKYSPGYNTEVGDKWIWLK

SEQ ID NO: 9242 - protein, 133 aa, Homo sapiens
  SITE 1: note = misc_feature - Xaa can be any naturally occurring amino acid
XSAYLQDIENAYKKTFLPEMSEKCEVLQYSAREAQDSKKVVEDIEYLKFDKGPWLKQDNRTLYHLRLLVQDKFEVLNYTSIPIFLPEVTIGAHQTDRVLHQFREVFQESEAKRLDVEEVCWKKTPLKDRGEEV

SEQ ID NO: 9243 - protein, 100 aa, Homo sapiens
GFRLLRWQLCLAGPLALASDLGASSLVAFRRLLGNSIFPAPVRHSGDHGKRLFVIRPSRFYDRRFLKLLRFYIALTGIPVAIFITLVNVFIASHIKMDCP

SEQ ID NO: 9244 - protein, 56 aa, Homo sapiens
IPVAIFITLVNVFIGQAELAEIPEGYVPEHWEYYKGKGAGSAKIDACERRWTLVLL

SEQ ID NO: 9245 - protein, 177 aa, Homo sapiens
MAAMSLLRRVSVTAVAALSGRPLGTRLGFGGFLTRGFPKAAAPGNHHSAVFMILTTLFLIFYIALTGIPVAIFITLVNVFIGQAELAEIPEGYVPEHWEYYKHPISRWIARNFYDSPEKIYERTMAVLQIEAEKAELRVKELEVRKLMHVRGDGPWYYYETIDKELIDHSPKATPDN

SEQ ID NO: 9246 - protein, 135 aa, Homo sapiens
MAAMSLLRRVSVTAVAALSGRPLGTRLGFGGFLTRGFPKAAAPVRHSGDHGKRLFVIRPSRFYDRRFLKLLRFYIALTGIPVAIFITLVNVFIGQAELAEIPEGYVPEHWEYYKGKGAGSAKIDACERRWTLVLL

SEQ ID NO: 9247 - protein, 189 aa, Homo sapiens
MAAMSLLRRVSVTAVAALSGRPLGTRLGFGGFLTRGFPKAAAPVRHSGDHGKRLFVIRPSRFYDRRFLKLLRFYIALTGIPVAIFITLVNVFIGQAELAEIPEGYVPEHWEYYKHPISRWIARNFYDSPEKIYERTMAVLQIEAEKAELRVKELEVRKLMHVRGDGPWYYYETIDKELIDHSPKATPDN

SEQ ID NO: 9248 - protein, 66 aa, Homo sapiens
MAAMSLLRRVSVTAVAALSGRPLGTRLGFGGFLTRGFPKAAEILHCIDWDSSSNFHNSGECIHWSS

SEQ ID NO: 9249 - protein, 42 aa, Homo sapiens
MAAMSLLRRVSVTAVAALSGRPLGTRLGFGGFLTRGFPKAAG

SEQ ID NO: 9250 - protein, 137 aa, Homo sapiens
MAAMSLLRRVSVTAVAALSGRPLGTRLGFGGFLTRGFPKAAGQAELAEIPEGYVPEHWEYYKHPISRWIARNFYDSPEKIYERTMAVLQIEAEKAELRVKELEVRKLMHVRGDGPWYYYETIDKELIDHSPKATPDN

SEQ ID NO: 9251 - protein, 206 aa, Homo sapiens
  SITE 1: note = misc_feature - Xaa can be any naturally occurring amino acid
XSLLRRVSVTAVAALSGRPLGTRLGFGGFLTRGFPKAAAPVRHSGDHGKRLFVIRPSRFYDRRFLKLLALYEQSRGLENGRLSGPSATRFYIALTGIPVAIFITLVNVFIGQAELAEIPEGYVPEHWEYYKHPISRWIARNFYDSPEKIYERTMAVLQIEAEKAELRVKELEVRKLMHVRGDGPWYYYETIDKELIDHSPKATPDN

SEQ ID NO: 9252 - protein, 40 aa, Homo sapiens
LTTPMLLRALAQAARAGPPGGRSLHSSAVAATYSEYLGGL

SEQ ID NO: 9253 - protein, 110 aa, Homo sapiens
MRCLTTPMLLRALAQAARAGPPGGRSLHSSAVAATYKYVNMQDPEMDMKSVTDRAARTLLWTELFRGLGMTLSYLFREPATINYPFEKGPLSPRFRGEHALRRYPSGEER

SEQ ID NO: 9254 - protein, 124 aa, Homo sapiens
MRCLTTPMLLRALAQAARAGPPGGRSLHSSAVAATYKYVNMQDPEMDMKSVTDRAARTLLWTELFRGLGMTLSYLFREPATINYPFEKGPLSPRFRGEHALRRYPSGEERCIACKLCEAICPAQ

SEQ ID NO: 9255 - protein, 184 aa, Homo sapiens
MRCLTTPMLLRALAQAARAGPPGGRSLHSSAVAATYKYVNMQDPEMDMKSVTDRAARTLLWTELFRGLGMTLSYLFREPATINYPFEKGPLSPRFRGEHALRRYPSGEERCIACKLCEAICPAQAITIEAEPRADGSRRTTRYDIDMTKCIYCGFCQEACPVDAIVEGPNFEFSTETHEELLYN

SEQ ID NO: 9256 - protein, 210 aa, Homo sapiens
MRCLTTPMLLRALAQAARAGPPGGRSLHSSAVAATYKYVNMQDPEMDMKSVTDRAARTLLWTELFRGLGMTLSYLFREPATINYPFEKGPLSPRFRGEHALRRYPSGEERCIACKLCEAICPAQAITIEAEPRADGSRRTTRYDIDMTKCIYCGFCQEACPVDAIVEGPNFEFSTETHEELLYNKEKLLNNGDKWEAEIAANIQADYLYR

SEQ ID NO: 9257 - protein, 43 aa, Homo sapiens
MRCLTTPMLLRALAQAARAGPPGGRSLHSSAVAATYSEYLGGL

SEQ ID NO: 9258 - protein, 70 aa, Homo sapiens
MRRPLCATGLVRVGDHWEDALPDHAYAAAGPGPGCTCRTSWWPEPPQQCSGSHLQVCEHAGSRDGHEVSD

SEQ ID NO: 9259 - protein, 138 aa, Homo sapiens
MRRPLCATGLVRVGDHWEEYVNMQDPEMDMKSVTDRAARTLLWTELFRGLGMTLSYLFREPATINYPFEKGPLSPRFRGEHALRRYPSGEERCIACKLCEAICPAQAITIEAEPRADGSRRTTRYDIDMTKCIYCGFC

SEQ ID NO: 9260 - protein, 64 aa, Homo sapiens
MTKCIYCGFCQEACPVDAIVEGPNFEFSTETHEELLYNKEKLLNNGDKWEAEIAANIQADYLYR

SEQ ID NO: 9261 - protein, 93 aa, Homo sapiens
  SITE 1: note = misc_feature - Xaa can be any naturally occurring amino acid
XEPATINYPFEKGPLSPRFRGEHALRRYPSGEERCIACKLCEAICPAQGETLRAAGATLNKAVNSPLVRGGSWQMTPAADKQARQAGHGGSRL

SEQ ID NO: 9262 - protein, 127 aa, Homo sapiens
CPTTVANVETVAVSPTICRRGGTWFAGFGRERNSGTKLFNISGHVNHPCTVEEEMSVPLKELIEKHAGGVTGGWDNLLAVIPGGSSTPLIPKSVCETVLMDFDALVQAQTGLGTAAVIVMDRSVWTG

SEQ ID NO: 9263 - protein, 133 aa, Homo sapiens
EAYEAGLIGKNACGSGYDFDVFVVRGAGAYICGEETALIESIEGKQGKPRLKPPFPADVGVFGCPTTVANVETVAVSPTICRRGGTWFAGFGRERNSGTKLFNISGHVNHPCTVEEEMSVPLKELIEKHAVCV

SEQ ID NO: 9264 - protein, 75 aa, Homo sapiens
MGIPSPSAAPKKTSFGSLKDEDRIFTNLYGRHDWRLKGSLSRGDWYKTKEILLKGPDWILGEIKTSGLRGRGGAG

SEQ ID NO: 9265 - protein, 144 aa, Homo sapiens
MKTGFSPTCTAAMTGGSLSRGDWYKTKEILLKGPDWILGEIKTSGLRGRGGAGFPTGLKWSFMNKPSDGRPKYLVVNADEGEPGTCKDREILRHDPHKLLEGCLVGGRAMGARAAYIYIRGEFYNEASNLQVAIREAYEAGLIG

SEQ ID NO: 9266 - protein, 455 aa, Homo sapiens
MLATRRLLGWSLPARTAPKKTSFGSLKDEDRIFTNLYGRHDWRLKGSLSRGDWYKTKEILLKGPDWILGEIKTSGLRGRGGAGFPTGLKWSFMNKPSDGRPKYLVVNADEGEPGTCKDREILRHDPHKLLEGCLVGGRAMGARAAYIYIRGEFYNEASNLQVAIREAYEAGLIGKNACGSGYDFDVFVVRGAGAYICGEETALIESIEGKQGKPRLKPPFPADVGVFGCPTTVANVETVAVSPTICRRGGTWFAGFGRERNSGTKLFNISGHVNHPCTVEEEMSVPLKELIEKHAGGVTGGWDNLLAVIPGGSSTPLIPKSVCETVLMDFDALVQAQTGLGTAAVIVMDRSTDIVKAIARLIEFYKHESCGQCTPCREGVDWMNKVMARFVRGDARPAEIDSLWEISKQIEGHTICALGDGAAWPVQGLIRHFRPELEERMQRFAQQHQARQAAS

SEQ ID NO: 9267 - protein, 457 aa, Homo sapiens
MLATRRLLGWSLPARVSTAPKKTSFGSLKDEDRIFTNLYGRHDWRLKGSLSRGDWYKTKEILLKGPDWILGEIKTSGLRGRGGAGFPTGLKWSFMNKPSDGRPKYLVVNADEGEPGTCKDREILRHDPHKLLEGCLVGGRAMGARAAYIYIRGEFYNEASNLQVAIREAYEAGLIGKNACGSGYDFDVFVVRGAGAYICGEETALIESIEGKQGKPRLKPPFPADVGVFGCPTTVANVETVAVSPTICRRGGTWFAGFGRERNSGTKLFNISGHVNHPCTVEEEMSVPLKELIEKHAGGVTGGWDNLLAVIPGGSSTPLIPKSVCETVLMDFDALVQAQTGLGTAAVIVMDRSTDIVKAIARLIEFYKHESCGQCTPCREGVDWMNKVMARFVRGDARPAEIDSLWEISKQIEGHTICALGDGAAWPVQGLIRHFRPELEERMQRFAQQHQARQAAS

SEQ ID NO: 9268 - protein, 178 aa, Homo sapiens
MLATRRLLGWSLPARVSVRFSGDTDEDRIFTNLYGRHDWRLKGSLSRGDWYKTKEILLKGPDWILGEIKTSGLRGRGGAGFPTGLKWSFMNKPSDGRPKYLVVNADEGEPGTCKDREILRHDPHKLLEGCLVGGRAMGARAAYIYIRGEFYNEASNLQVAIREAYEAGLIGKNACGSG

SEQ ID NO: 9269 - protein, 43 aa, Homo sapiens
MLATRRLLGWSLPARVSVRFSGDTSSAWRKFCRQHPRKPHLAR

SEQ ID NO: 9270 - protein, 178 aa, Homo sapiens
MLATRRLLGWSLPARVSVRFSGDTTAPKKTSFGSLKDEDRIFTNLLKGSLSRGDWYKTKEILLKGPDWILGEIKTSGLRGRGGAGFPTGLKWSFMNKPSDGRPKYLVVNADEGEPGTCKDREILRHDPHKLLEGCLVGGRAMGARAAYIYIRGEFYNEASNLQVAIREAYEAGLIGKN

SEQ ID NO: 9271 - protein, 464 aa, Homo sapiens
MLATRRLLGWSLPARVSVRFSGDTTAPKKTSFGSLKDEDRIFTNLYGRHDWRLKGSLSRGDWYKTKEILLKGPDWILGEIKTSGLRGRGGAGFPTGLKWSFMNKPSDGRPKYLVVNADEGEPGTCKDREILRHDPHKLLEGCLVGGRAMGARAAYIYIRGEFYNEASNLQVAIREAYEAGLIGKNACGSGYDFDVFVVRGAGAYICGEETALIESIEGKQGKPRLKPPFPADVGVFGCPTTVANVETVAVSPTICRRGGTWFAGFGRERNSGTKLFNISGHVNHPCTVEEEMSVPLKELIEKHAGGVTGGWDNLLAVIPGGSSTPLIPKSVCETVLMDFDALVQAQTGLGTAAVIVMDRSTDIVKAIARLIEFYKHESCGQCTPCREGVDWMNKVMARFVRGDARPAEIDSLWEISKQIEGHTICALGDGAAWPVQGLIRHFRPELEERMQRFAQQHQARQAAS

SEQ ID NO: 9272 - protein, 53 aa, Homo sapiens
MNKPSDGRPKYLVVNADEGEPGTCKDREILRHDPHKLLEGCLVGGRAMGARAA

SEQ ID NO: 9273 - protein, 96 aa, Homo sapiens
MNKPSDGRPKYLVVNADEGEPGTCKDREILRHDPHKLLEGCLVGGRAMGARAAYIYIRGEFYNEASNLQVAIREAYEAGLIGKNACGSGYDFDVFV

SEQ ID NO: 9274 - protein, 136 aa, Homo sapiens
MNKPSDGRPKYLVVNADEGEPGTCKDREILRHDPHKLLEGCLVGGRAMGARAAYIYIRGEFYNEASNLQVAIREAYEAGLIGKNACGSGYDFDVFVVRGAGAYICGEETALIESIEGKQGKPRLKPPFPADVGKAW

SEQ ID NO: 9275 - protein, 363 aa, Homo sapiens
MNKPSDGRPKYLVVNADEGEPGTCKDREILRHDPHKLLEGCLVGGRAMGARAAYIYIRGEFYNEASNLQVAIREAYEAGLIGKNACGSGYDFDVFVVRGAGAYICGEETALIESIEGKQGKPRLKPPFPADVGVFGCPTTVANVETVAVSPTICRRGGTWFAGFGRERNSGTKLFNISGHVNHPCTVEEEMSVPLKELIEKHAGGVTGGWDNLLAVIPGGSSTPLIPKSVCETVLMDFDALVQAQTGLGTAAVIVMDRSTDIVKAIARLIEFYKHESCGQCTPCREGVDWMNKVMARFVRGDARPAEIDSLWEISKQIEGHTICALGDGAAWPVQGLIRHFRPELEERMQRFAQQHQARQAAS

SEQ ID NO: 9276 - protein, 54 aa, Homo sapiens
MACAGLLTVCLLRPPAPQPQPQTPRHPQLAPDPGPAGHTLFQDVFRRADKNALI

SEQ ID NO: 9277 - protein, 210 aa, Homo sapiens
MACAGLLTVCLLRPPAPQPQPQTPRHPQLAPDPGPAGHTLFQDVFRRADKNDDGKLSFEEFQNYFADGVLSLGELQELFSGIDGHLTDNLETEKLCDYFSEHLGVYRPVLAALESLNRAVLAAMDATKLEYERASKVDQFVTRFLLRETVSQLQALQSSLEGASDTLEAQAHGWRCRERGGAEQALRQPAGRTPSPEECQPVIHLVPRLF

SEQ ID NO: 9278 - protein, 192 aa, Homo sapiens
MACAGLLTVCLLRPPAPQPQPQTPRHPQLAPDPGPAGHTLFQDVFRRADKNDDGKLSFEEFQNYFADGVLSLGELQELFSGIDGHLTDNLETEKLCDYFSEHLGVYRPVLAALESLNRAVLAAMDATKLEYERASKVDQFVTRFLLRETVSQLQALQSSLEGASDTLEAQAHGWRLIPSWGPSPRPCEPHFL

SEQ ID NO: 9279 - protein, 362 aa, Homo sapiens
MACAGLLTVCLLRPPAPQPQPQTPRHPQLAPDPGPAGHTLFQDVFRRADKNDDGKLSFEEFQNYFADGVLSLGELQELFSGIDGHLTDNLETEKLCDYFSEHLGVYRPVLAALESLNRAVLAAMDATKLEYERASKVDQFVTRFLLRETVSQLQALQSSLEGASDTLEAQAHGWRSDAESVEAQSRLCGSRRAGRRALRSVSRSSTWSPGSSDTGRSSEAEMQWRLQVNRLQELIDQLECKAPRLEPLREEDLAKGPDLHILMAQRQVQVAEEGLQDFHRALRCYVDFTGAQSHCLHVSAQKMLDGASFTLYEFWQDEASWRRHQQSPGSKAFQRILIDHLRAPDTLTTVFFPASWWIMNNN

SEQ ID NO: 9280 - protein, 289 aa, Homo sapiens
MACAGLLTVCLLRPPAPQPQPQTPRHPQLAPDPGPAGHTLFQDVFRRADKNDDGKLSFEEFQNYFADGVLSLGELQELFSGIDGHLTDNLETEKLCDYFSEHLGVYRPVLAALESLNRAVLAAMDATKLEYERASKVDQFVTRFLLRETVSQLQALQSSLEGASDTLEAQAHGWRSDAESVEAQSRLCGSRRAGRRALRSVSRSSTWSPGSSDTGRSSEAEMQWRLQVNRLQELIDQLECKHILMAQRQVQVAEEGLQDFHRALRCYVDFTGAQSHCLHVSAQKMLDGA

SEQ ID NO: 9281 - protein, 297 aa, Homo sapiens
MACAGLLTVCLLRPPAPQPQPQTPRHPQLAPDPGPAGHTLFQDVFRRADKNDDGKLSFEEFQNYFADGVLSLGELQELFSGIDGHLTDNLETEKLCDYFSEHLGVYRPVLAALESLNRAVLAAMDATKLEYERASKVDQFVTRFLLRETVSQLQALQSSLEGASDTLEAQAHGWRSDAESVEAQSRLCGSRRAGRRALRSVSRSSTWSPGSSDTGRSSEAEMQWRLQVNRLQELIDQLECKRQVQVAEEGLQDFHRALRCYVDFTGAQSHCLHVSAQKMLDGASFTLYEFWQDEASW

SEQ ID NO: 9282 - protein, 396 aa, Homo sapiens
MACAGLLTVCLLRPPAPQPQPQTPRHPQLAPDPGPAGHTLFQDVFRRADKNDDGKLSFEEFQNYFADGVLSLGELQELFSGIDGHLTDNLETEKLCDYFSEHLGVYRPVLAALESLNRAVLAAMDATKLEYERASKVDQFVTRFLLRETVSQLQALQSSLEGASDTLEAQAHGWRSDAESVEAQSRLCGSRRAGRRALRSVSRSSTWSPGSSDTGRSSEAEMQWRLQVNRLQELIDQLECKVRAVGPGPHKGGPSWYPPEPGPCWRPGPHSVPSQAPRLEPLREEDLAKGPDLHILMAQRQVQVAEEGLQDFHRALRCYVDFTGAQSHCLHVSAQKMLDGASFTLYEFWQDEASWRRHQQSPGSKAFQRILIDHLRAPDTLTTVFFPASWWIMNNN

SEQ ID NO: 9283 - protein, 71 aa, Homo sapiens
MACAGLLTVCLLRPPAPQPQPQTPRHPQLAPDPGPAGHTLFQDVFRRADKNELLCRWGSQPGGAAGTVQRH

SEQ ID NO: 9284 - protein, 126 aa, Homo sapiens
MQWRLQVNRLQELIDQLECKAPRLEPLREEDLAKGPDLHILMAQRQVQVAEEGLQDFHRALRCYVDFTGAQSHCLHVSAQKMLDGASFTLYEFWQDEASWRRHQQSPGSKAFQRILIDHLRAPDTL

SEQ ID NO: 9285 - protein, 95 aa, Homo sapiens
  SITE 1: note = misc_feature - Xaa can be any naturally occurring amino acid
XQNYFADGVLSLGELQELFSGIDGHLTDNLETEKLCDYFSEHLGVYRPVLAALESLNRAVLAAMDATKLVSGVADGGGSTVRQWASAVLWDPPQS

SEQ ID NO: 9286 - protein, 517 aa, Homo sapiens
MARMGLAGAAGRWWGLALGLTAFFLPGVHSQVVQVNDSMYGFIGTDVVLHCSFANPLPSVKITQVTWQKSTNGSKQNVAIYNPSMGVSVLAPYRERVEFLRPSFTDGTIRLSRLELEDEGVYICEFATFPTGNRESQLNLTVMAKPTNWIEGTQAVLRAKKGQDDKVLVATCTSANGKPPSVVSWETRLKGEAEYQEIRNPNGTVTVISRYRLVPSREAHQQSLACIVNYHMDRFKESLTLNVQYEPEVTIEGFDGNWYLQRMDVKLTCKADANPPATEYHWTTLNGSLPKGVEAQNRTLFFKGPINYSLAGTYICEATNPIGTRSGQVEVNITEFPYTPSPPEHGRRAGPVPTAIIGGVAGSILLVLIVVGGIVVALRRRRHTFKGDYSTKKHVYGNGYSKAGIPQHHPPMAQNLQYPDDSDDEKKAGPLGGSSYEEEEEEEEGGGGGERKVGGPHPKYDEDAKRPYFTVDEAEARQDGYGDRTLGYQYDPEQLDLAENMVSQNDGSFISKKEWYV

SEQ ID NO: 9287 - protein, 458 aa, Homo sapiens
MARMGLAGAAGRWWGLALGLTAFFLPGVHSQVVQVNDSMYGFIGTDVVLHCSFANPLPSVKITQVTWQKSTNGSKQNVAIYNPSMGVSVLAPYRERVEFLRPSFTDGTIRLSRLELEDEGVYICEFATFPTGNRESQLNLTVMAKPTNWIEGTQAVLRAKKGQDDKVLVATCTSANGKPPSVVSWETRLKGEAEYQEIRNPNGTVTVISRYRLVPSREAHQQSLACIVNYHMDRFKESLTLNVQYEPEVTIEGFDGNWYLQRMDVKLTCKADANPPATEYHWTTLNGSLPKGVEAQNRTLFFKGPINYSLAGTYICEATNPIGTRSGQVEVNITEKPRPQRGLGSAARLLAGTVAVFLILVAVLTVFFLYNRQQKSPPETDGAGTDQPLSQKPEPSPSRQSSLVPEDIQVVHLDPGRQQQQEEEDLQKLSLQPPYYDLGVSPSYHPSVRTTEPRGECP

SEQ ID NO: 9288 - protein, 352 aa, Homo sapiens
MARMGLAGAAGRWWGLALGLTAFFLPGVHSQVVQVNDSMYGFIGTDVVLHCSFANPLPSVKITQVTWQKSTNGSKQNVAIYNPSMGVSVLAPYRERVEFLRPSFTDGTIRLSRLELEDEGVYICEFATFPTGNRESQLNLTVMAKPTNWIEGTQAVLRAKKGQDDKVLVATCTSANGKPPSVVSWETRLKGEAEYQEIRNPNGTVTVISRYRLVPSREAHQQSLACIVNYHMDRFKESLTLNVQYEPEVTIEGFDGNWYLQRMDVKLTCKADANPPATEYHWTTLNGSLPKGVEAQNRTLFFKGPINYSLAGTYICEATNPIGTRSGQVEVNITAFCQLIYPGKGRTRARMF

SEQ ID NO: 9289 - protein, 838 aa, Homo sapiens
MPMDLILVVWFCVCTARTAEDMKPPVLSLIWRTRVLKSLLQQSLQGVVGFGMDPDLQMDIVTELDLVNTTLGVAQVSGMHNASKAFLFQDIEREIHAAPHVSEKLIQLFRNKSEFTILATVQQKPSTSGVILSIRELEHSYFELESSGLRDEIRYHYIHNGKPRTEALPYRMADGQWHKVALSVSASHLLLHVDCNRIYERVIDPPDTNLPPGINLWLGQRNQKHGLFKGIIQDGKIIFMPNGYITQCPNLNHTCPTCSDFLSLVQGIMDLQELLAKMTAKLNYAETRLSQLENCHCEKTCQVSGLLYRDQDSWVDGDHCRNCTCKSGAVECRRMSCPPLNCSPDSLPVHIAGQCCKVCRPKCIYGGKVLAEGQRILTKSCRECRGGVLVKITEMCPPLNCSEKDHILPENQCCRVCRGHNFCAEGPKCGENSECKNWNTKATCECKSGYISVQGDSAYCEDIDECAAKMHYCHANTVCVNLPGLYRCDCVPGYIRVDDFSCTEHDECGSGQHNCDENAICTNTVQGHSCTCKPGYVGNGTICRAFCEEGCRYGGTCVAPNKCVCPSGFTGSHCEKDIDECSEGIIECHNHSRCVNLPGWYHCECRSGFHDDGTYSLSGESCIDIDECALRTHTCWNDSACINLAGGFDCLCPSGPSCSGDCPHEGGLKHNGQVWTLKEDRCSVCSCKDGKIFCRRTACDCQNPSADLFCCPECDTRVTSQCLDQNGHKLYRSGDNWTHSCQQCRCLEGEVDCWPLTCPNLSCEYTAILEGECCPRCVSDPCLADNITYDIRKTCLDSYGVSRLSGSVWTMAGSPCTTCKCKNGRVCCSVDFECLQNN

SEQ ID NO: 9290 - protein, 753 aa, Homo sapiens
MPMDLILVVWFCVCTARTVVGFGMDPDLQMDIVTELDLVNTTLGVAQVSGMHNASKAFLFQDIEREIHAAPHVSEKLIQLFRNKSEFTILATVQQKPSTSGVILSIRELEHRIYERVIDPPDTNLPPGINLWLGQRNQKHGLFKGIIQDGKIIFMPNGYITQCPNLNHTCPTCSDFLSLVQGIMDLQELLAKMTAKLNYAETRLSQLENCHCEKTCQVSGLLYRDQDSWVDGDHCRNCTCKSGAVECRRMSCPPLNCSPDSLPVHIAGQCCKVCRPKCIYGGKVLAEGQRILTKSCRECRGGVLVKITEMCPPLNCSEKDHILPENQCCRVCRGHNFCAEGPKCGENSECKNWNTKATCECKSGYISVQGDSAYCEDIDECAAKMHYCHANTVCVNLPGLYRCDCVPGYIRVDDFSCTEHDECGSGQHNCDENAICTNTVQGHSCTCKPGYVGNGTICRAFCEEGCRYGGTCVAPNKCVCPSGFTGSHCEKDIDECSEGIIECHNHSRCVNLPGWYHCECRSGFHDDGTYSLSGESCIDIDECALRTHTCWNDSACINLAGGFDCLCPSGPSCSGDCPHEGGLKHNGQVWTLKEDRCSVCSCKDGKIFCRRTACDCQNPSADLFCCPECDTRVTSQCLDQNGHKLYRSGDNWTHSCQQCRCLEGEVDCWPLTCPNLSCEYTAILEGECCPRCVSDPCLADNITYDIRKTCLDSYGVSRLSGSVWTMAGSPCTTCKCKNGRVCCSVDFECLQNN

SEQ ID NO: 9291 - protein, 810 aa, Homo sapiens
MPMDLILVVWFCVCTARTVVGFGMDPDLQMDIVTELDLVNTTLGVAQVSGMHNASKAFLFQDIEREIHAAPHVSEKLIQLFRNKSEFTILATVQQKPSTSGVILSIRELEHSYFELESSGLRDEIRYHYIHNGKPRTEALPYRMADGQWHKVALSVSASHLLLHVDCNRIYERVIDPPDTNLPPGINLWLGQRNQKHGLFKGIIQDGKIIFMPNGYITQCPNLNHTCPTCSDFLSLVQGIMDLQELLAKMTAKLNYAETRLSQLENCHCEKTCQVSGLLYRDQDSWVDGDHCRNCTCKSGAVECRRMSCPPLNCSPDSLPVHIAGQCCKVCRPKCIYGGKVLAEGQRILTKSCRECRGGVLVKITEMCPPLNCSEKDHILPENQCCRVCRGHNFCAEGPKCGENSECKNWNTKATCECKSGYISVQGDSAYCEDIDECAAKMHYCHANTVCVNLPGLYRCDCVPGYIRVDDFSCTEHDECGSGQHNCDENAICTNTVQGHSCTCKPGYVGNGTICRAFCEEGCRYGGTCVAPNKCVCPSGFTGSHCEKDIDECSEGIIECHNHSRCVNLPGWYHCECRSGFHDDGTYSLSGESCIDIDECALRTHTCWNDSACINLAGGFDCLCPSGPSCSGDCPHEGGLKHNGQVWTLKEDRCSVCSCKDGKIFCRRTACDCQNPSADLFCCPECDTRVTSQCLDQNGHKLYRSGDNWTHSCQQCRCLEGEVDCWPLTCPNLSCEYTAILEGECCPRCVSDPCLADNITYDIRKTCLDSYGVSRLSGSVWTMAGSPCTTCKCKNGRVCCSVDFECLQNN

SEQ ID NO: 9292 - protein, 763 aa, Homo sapiens
MPMDLILVVWFCVCTARTVVGFGMDPDLQMDIVTELDLVNTTLGVAQVSGMHNASKAFLFQDIEREIHAAPHVSEKLIQLFRNKSEFTILATVQQKPSTSGVILSIRELEHSYFELESSGLRDEIRYHYIHNGKPRTEALPYRMADGQWHKVALSVSASHLLLHVDCNRIYERVIDPPDTNLPPGINLWLGQRNQKHGLFKGIIQDGKIIFMPNGYITQCPNLNHTCPTCSDFLSLVQGIMDLQELLAKMTAKLNYAETRLSQLENCHCEKTCQVSGLLYRDQDSWVDGDHCRNCTCKSGAVECRRMSCPPLNCSPDSLPVHIAGQCCKVCRPKCIYGGKVLAEGQRILTKSCRECRGGVLVKITEMCPPLNCSEKDHILPENQCCRVCRGHNFCAEGPKCGENSECKNWNTKATCECKSGYISVQGDSAYCEDIDECAAKMHYCHANTVCVNLPGLYRCDCVPGYIRVDDFSCTEHDECGSGQHNCDENAICTNTVQGHSCTCKPGYVGNGTICRAFCEEGCRYGGTCVAPNKCVCPSGFTGSHCEKDIDECALRTHTCWNDSACINLAGGFDCLCPSGPSCSGDCPHEGGLKHNGQVWTLKEDRCSVCSCKDGKIFCRRTACDCQNPSADLFCCPECDTRVTSQCLDQNGHKLYRSGDNWTHSCQQCRCLEGEVDCWPLTCPNLSCEYTAILEGECCPRCVSDPCLADNITYDIRKTCLDSYGVSRLSGSVWTMAGSPCTTCKCKNGRVCCSVDFECLQNN

SEQ ID NO: 9293 - protein, 122 aa, Homo sapiens
CPTCNDFHGLVQKIMELQDILAKTSAKLSRAEQRMNRLDQCYCERTCTMKGTTYREFESWIDGCKNCTCLNGTIQCETLICPNPDCPLKSALAYVDGKCCKECKCEHNFYDEYFLWKNKALY

SEQ ID NO: 9294 - protein, 166 aa, Homo sapiens
MELFLFLSPTSYPSPVWGLGVDPSLQIDVLTELELGESTTGVRQVPGLHNGTKAFLFQDTPRSIKASTATAEQFFQKLRNKHEFTILVTLKQTHLNSGVILSIHHLDHRYLELESSGHRNEVRLHYRSGSHRPHTEVFPYILADDKWHKLSLAISASHLILHIDCN

SEQ ID NO: 9295 - protein, 22 aa, Homo sapiens
MESRVLLRTFCLIFGLGAVWGL

SEQ ID NO: 9296 - protein, 112 aa, Homo sapiens
MESRVLLRTFCLIFGLGAVWGLGVDPSLQIDVLTELELGESTTGVRQVPGLHNGTKAFLFQDTPRSIKASTATAEQFFQKLRNKHEFTILVTLKQTHLNSGVILSIHHLDHR

SEQ ID NO: 9297 - protein, 816 aa, Homo sapiens
MESRVLLRTFCLIFGLGAVWGLGVDPSLQIDVLTELELGESTTGVRQVPGLHNGTKAFLFQDTPRSIKASTATAEQFFQKLRNKHEFTILVTLKQTHLNSGVILSIHHLDHRYLELESSGHRNEVRLHYRSGSHRPHTEVFPYILADDKWHKLSLAISASHLILHIDCNKIYERVVEKPSTDLPLGTTFWLGQRNNAHGYFKGIMQDVQLLVMPQGFIAQCPDLNRTCPTCNDFHGLVQKIMELQDILAKTSAKLSRAEQRMNRLDQCYCERTCTMKGTTYREFESWIDGCKNCTCLNGTIQCETLICPNPDCPLKSALAYVDGKCCKECKSICQFQGRTYFEGERNTVYSSSGVCVLYECKDQTMKLVESSGCPALDCPESHQITLSHSCCKVCKGYDFCSERHNCMENSICRNLNDRAVCSCRDGFRALREDNAYCEDIDECAEGRHYCRENTMCVNTPGSFMCICKTGYIRIDDYSCTEHDECITNQHNCDENALCFNTVGGHNCVCKPGYTGNGTTCKAFCKDGCRNGGACIAANVCACPQGFTGPSCETDIDECSDGFVQCDSRANCINLPGWYHCECRDGYHDNGMFSPSGESCEDIDECGTGRHSCANDTICFNLDGGYDCRCPHGKNCTGDCIHDGKVKHNGQIWVLENDRCSVCSCQNGFVMCRRMVCDCENPTVDLFCCPECDPRLSSQCLHQNGETLYNSGDTWVQNCQQCRCLQGEVDCWPLPCPDVECEFSILPENECCPRCVTDPCQADTIRNDITKTCLDEMNVVRFTGSSWIKHGTECTLCQCKNGHICCSVDPQCLQEL

SEQ ID NO: 9298 - protein, 816 aa, Homo sapiens; identical to SEQ ID NO: 9297

SEQ ID NO: 9299 - protein, 321 aa, Homo sapiens
MESRVLLRTFCLIFGLGAVWGLGVDPSLQIDVLTELELGESTTGVRQVPGLHNGTKAFLFQDTPRSIKASTATAEQFFQKLRNKHEFTILVTLKQTHLNSGVILSIHHLDHRYLELESSGHRNEVRLHYRSGSHRPHTEVFPYILADDKWHKLSLAISASHLILHIDCNKIYERVVEKPSTDLPLGTTFWLGQRNNAHGYFKGIMQDVQLLVMPQGFIAQCPDLNRTCPTCNDFHGLVQKIMELQDILAKTSAKLSRAEQRMNRLDQCYCERTCTMKGTTYREFESWIDGCKNCTCLNGTIQCETLICPNPDCPLKSALAY

SEQ ID NO: 9300 - protein, 110 aa, Homo sapiens
METGLGAPLFKAWLLISVWGLGVDPSLQIDVLTELELGESTTGVRQVPGLHNGTKAFLFQDTPRSIKASTATAEQFFQKLRNKHEFTILVTLKQTHLNSGVILSIHHLDH

SEQ ID NO: 9301 - protein, 815 aa, Homo sapiens
METGLGAPLFKAWLLISVWGLGVDPSLQIDVLTELELGESTTGVRQVPGLHNGTKAFLFQDTPRSIKASTATAEQFFQKLRNKHEFTILVTLKQTHLNSGVILSIHHLDHRYLELESSGHRNEVRLHYRSGSHRPHTEVFPYILADDKWHKLSLAISASHLILHIDCNKIYERVVEKPSTDLPLGTTFWLGQRNNAHGYFKGIMQDVQLLVMPQGFIAQCPDLNRTCPTCNDFHGLVQKIMELQDILAKTSAKLSRAEQRMNRLDQCYCERTCTMKGTTYREFESWIDGCKNCTCLNGTIQCETLICPNPDCPLKSALAYVDGKCCKECKSICQFQGRTYFEGERNTVYSSSGVCVLYECKDQTMKLVESSGCPALDCPESHQITLSHSCCKVCKGYDFCSERHNCMENSICRNLNDRAVCSCRDGFRALREDNAYCEDIDECAEGRHYCRENTMCVNTPGSFMCICKTGYIRIDDYSCTEHDECITNQHNCDENALCFNTVGGHNCVCKPGYTGNGTTCKAFCKDGCRNGGACIAANVCACPQGFTGPSCETDIDECSDGFVQCDSRANCINLPGWYHCECRDGYHDNGMFSPSGESCEDIDECGTGRHSCANDTICFNLDGGYDCRCPHGKNCTGDCIHDGKVKHNGQIWVLENDRCSVCSCQNGFVMCRRMVCDCENPTVDLFCCPECDPRLSSQCLHQNGETLYNSGDTWVQNCQQCRCLQGEVDCWPLPCPDVECEFSILPENECCPRCVTDPCQADTIRNDITKTCLDEMNVVRFTGSSWIKHGTECTLCQCKNGHICCSVDPQCLQEL

SEQ ID NO: 9302 - protein, 768 aa, Homo sapiens
METGLGAPLFKAWLLISVWGLGVDPSLQIDVLTELELGESTTGVRQVPGLHNGTKAFLFQDTPRSIKASTATAEQFFQKLRNKHEFTILVTLKQTHLNSGVILSIHHLDHRYLELESSGHRNEVRLHYRSGSHRPHTEVFPYILADDKWHKLSLAISASHLILHIDCNKIYERVVEKPSTDLPLGTTFWLGQRNNAHGYFKGIMQDVQLLVMPQGFIAQCPDLNRTCPTCNDFHGLVQKIMELQDILAKTSAKLSRAEQRMNRLDQCYCERTCTMKGTTYREFESWIDGCKNCTCLNGTIQCETLICPNPDCPLKSALAYVDGKCCKECKSICQFQGRTYFEGERNTVYSSSGVCVLYECKDQTMKLVESSGCPALDCPESHQITLSHSCCKVCKGYDFCSERHNCMENSICRNLNDRAVCSCRDGFRALREDNAYCEDIDECAEGRHYCRENTMCVNTPGSFMCICKTGYIRIDDYSCTEHDECITNQHNCDENALCFNTVGGHNCVCKPGYTGNGTTCKAFCKDGCRNGGACIAANVCACPQGFTGPSCETDIDECGTGRHSCANDTICFNLDGGYDCRCPHGKNCTGDCIHDGKVKHNGQIWVLENDRCSVCSCQNGFVMCRRMVCDCENPTVDLFCCPECDPRLSSQCLHQNGETLYNSGDTWVQNCQQCRCLQGEVDCWPLPCPDVECEFSILPENECCPRCVTDPCQADTIRNDITKTCLDEMNVVRFTGSSWIKHGTECTLCQCKNGHICCSVDPQCLQEL

SEQ ID NO: 9303 - protein, 815 aa, Homo sapiens; identical to SEQ ID NO: 9301

SEQ ID NO: 9304 - protein, 866 aa, Homo sapiens
MGFPPLLKGQASATRSSLASCSWVVFFLSCLSRHAPEIEGGRRWTELIRTMESRVLLRTFCLIFGLGAVWGLGVDPSLQIDVLTELELGESTTGVRQVPGLHNGTKAFLFQDTPRSIKASTATAEQFFQKLRNKHEFTILVTLKQTHLNSGVILSIHHLDHRYLELESSGHRNEVRLHYRSGSHRPHTEVFPYILADDKWHKLSLAISASHLILHIDCNKIYERVVEKPSTDLPLGTTFWLGQRNNAHGYFKGIMQDVQLLVMPQGFIAQCPDLNRTCPTCNDFHGLVQKIMELQDILAKTSAKLSRAEQRMNRLDQCYCERTCTMKGTTYREFESWIDGCKNCTCLNGTIQCETLICPNPDCPLKSALAYVDGKCCKECKSICQFQGRTYFEGERNTVYSSSGVCVLYECKDQTMKLVESSGCPALDCPESHQITLSHSCCKVCKGYDFCSERHNCMENSICRNLNDRAVCSCRDGFRALREDNAYCEDIDECAEGRHYCRENTMCVNTPGSFMCICKTGYIRIDDYSCTEHDECITNQHNCDENALCFNTVGGHNCVCKPGYTGNGTTCKAFCKDGCRNGGACIAANVCACPQGFTGPSCETDIDECSDGFVQCDSRANCINLPGWYHCECRDGYHDNGMFSPSGESCEDIDECGTGRHSCANDTICFNLDGGYDCRCPHGKNCTGDCIHDGKVKHNGQIWVLENDRCSVCSCQNGFVMCRRMVCDCENPTVDLFCCPECDPRLSSQCLHQNGETLYNSGDTWVQNCQQCRCLQGEVDCWPLPCPDVECEFSILPENECCPRCVTDPCQADTIRNDITKTCLDEMNVVRFTGSSWIKHGTECTLCQCKNGHICCSVDPQCLQEL

SEQ ID NO: 9305 - protein, 839 aa, Homo sapiens
MSIRRLLILILKIGRRWTELIRTMESRVLLRTFCLIFGLGAVWGLGVDPSLQIDVLTELELGESTTGVRQVPGLHNGTKAFLFQDTPRSIKASTATAEQFFQKLRNKHEFTILVTLKQTHLNSGVILSIHHLDHRYLELESSGHRNEVRLHYRSGSHRPHTEVFPYILADDKWHKLSLAISASHLILHIDCNKIYERVVEKPSTDLPLGTTFWLGQRNNAHGYFKGIMQDVQLLVMPQGFIAQCPDLNRTCPTCNDFHGLVQKIMELQDILAKTSAKLSRAEQRMNRLDQCYCERTCTMKGTTYREFESWIDGCKNCTCLNGTIQCETLICPNPDCPLKSALAYVDGKCCKECKSICQFQGRTYFEGERNTVYSSSGVCVLYECKDQTMKLVESSGCPALDCPESHQITLSHSCCKVCKGYDFCSERHNCMENSICRNLNDRAVCSCRDGFRALREDNAYCEDIDECAEGRHYCRENTMCVNTPGSFMCICKTGYIRIDDYSCTEHDECITNQHNCDENALCFNTVGGHNCVCKPGYTGNGTTCKAFCKDGCRNGGACIAANVCACPQGFTGPSCETDIDECSDGFVQCDSRANCINLPGWYHCECRDGYHDNGMFSPSGESCEDIDECGTGRHSCANDTICFNLDGGYDCRCPHGKNCTGDCIHDGKVKHNGQIWVLENDRCSVCSCQNGFVMCRRMVCDCENPTVDLFCCPECDPRLSSQCLHQNGETLYNSGDTWVQNCQQCRCLQGEVDCWPLPCPDVECEFSILPENECCPRCVTDPCQADTIRNDITKTCLDEMNVVRFTGSSWIKHGTECTLCQCKNGHICCSVDPQCLQEL

SEQ ID NO: 9306 - protein, 246 aa, Homo sapiens
  SITE 1: note = misc_feature - Xaa can be any naturally occurring amino acid
XAKLSRAEQRMNRLDQCYCERTCTMKGTTYREFESWIDGCKNCTCLNGTIQCETLICPNPDCPLKSALAYVDGKCSICQFQGRTYFEGERNTVYSSSGVCVLYECKDQTMKLVESSGCPALDCPESHQITLSHSCCKVCKGYDFCSERHNCMENSICRNLNDRAVCSCRDGFRALREDNAYCEDIDECAEGRHYCRENTMCVNTPGSFMCICKTGYIRIDDYSCTEHDECITNQHNCDENALCFNT

SEQ ID NO: 9307 - protein, 86 aa, Homo sapiens
  SITE 1: note = misc_feature - Xaa can be any naturally occurring amino acid
XDNGMFSPSGESCEDIDECGTGRHSCANDTICFNLDGGYDCRCPHGKNCTGDCIHDGKVKHNGQIWVLENDRCSVCSCQVGINEKL

SEQ ID NO: 9308 - protein, 172 aa, Homo sapiens
MVGPAPRRRLRPLAALALVLALAPGLPTARAGQTPRPAERGPPVRLFTEEELARYGGEEEDQPIYLAVKGVVFDVTSGKEFYGRGAPYNALTGKDSTRGVAKMSLDPADLTHDTTGLTAKELEALDEVFTKVYKAKYPIVGYTARRILNEDGSPNLDFKPEDQPHFDIKDEF

SEQ ID NO: 9309 - protein, 533 aa, Homo sapiens
MIHGRSVLHIVASLIILHLSGATKKGTEKQTTSETQKSVQCGTWTKHAEGGIFTSPNYPSKYPPDRECIYIIEAAPRQCIELYFDEKYSIEPSWECKFDHIEVRDGPFGFSPIIGRFCGQQNPPVIKSSGRFLWIKFFADGELESMGFSARYNFTPDPDFKDLGALKPLPACEFEMGGSEGIVESIQIMKEGKATASEAVDCKWYIRAPPRSKIYLRFLDYEMQNSNECKRNFVAVYDGSSSVEDLKAKFCSTVANDVMLRTGLGVIRMWADEGSRNSRFQMLFTSFQEPPCEGNTFFCHSNMCINNTLVCNGLQNCVYPWDENHCKEKRKTSLLDQLTNTSGTVIGVTSCIVIILIIISVIVQIKQPRKKYVQRKSDFDQTVFQEVFEPPHYELCTLRGTGATADFADVADDFENYHKLRRSSSKCIHDHHCGSQLSSTKGSRSNLSTRDASILTEMPTQPGKPLIPPMNRRNILVMKHSYSQDAADACDIDEIEEVPTTSHRLSRHDKAVQRFCLIGSLSKHESEYNTTRV

SEQ ID NO: 9310 - protein, 533 aa, Homo sapiens; identical to SEQ ID NO: 9309

SEQ ID NO: 9311 - protein, 156 aa, Homo sapiens
MLAEPFPKVVASLIILHLSGATKKGTEKQTTSETQKSVQCGTWTKHAEGGIFTSPNYPSKYPPDRECIYIIEAAPRQCIELYFDEKYSIEPSWECKFDHIEVRDGPFGFSPIIGRFCGQQNPPVIKSSGRFLWIKFFADGELESMGFSARYNFTPE

SEQ ID NO: 9312 - protein, 101 aa, Homo sapiens
MSLYGFVASLIILHLSGATKKGTEKQTTSETQKSVQCGTWTKHAEGGIFTSPNYPSKYPPDRECIYIIEAAPRQCIELYFDEKYSIEPSWECKFDHIEVRD

SEQ ID NO: 9313 - protein, 1165 aa, Homo sapiens
IEIPMDLTQPPTITKQSAKDHIVDPRDNILIECEAKGNPAPSFHWTRNSRFFNIAKDPRVSMRRRSGTLVIDFRSGGRPEEYEGEYQCFARNKFGTALSNRIRLQVSKSPLWPKENLDPVVVQEGAPLTLQCNPPPGLPSPVIFWMSSSMEPITQDKRVSQGHNGDLYFSNVMLQDMQTDYSCNARFHFTHTIQQKNPFTLKVLTNHPYNDSSLRNHPDMYSARGVAERTPSFMYPQGTASSQMVLRGMDLLLECIASGVPTPDIAWYKKGGDLPSDKAKFENFNKALRITNVSEEDSGEYFCLASNKMGSIRHTISVRVKAAPYWLDEPKNLILAPGEDGRLVCRANGNPKPTVQWMVNGEPLQSAPPNPNREVAGDTIIFRDTQISSRAVYQCNTSNEHGYLLANAFVSVLDVPPRMLSPRNQLIRVILYNRTRLDCPFFGSPIPTLRWFKNGQGSNLDGGNYHVYENGSLEIKMIRKEDQGIYTCVATNILGKAENQVRLEVKDPTRIYRMPEDQVARRGTTVQLECRVKHDPSLKLTVSWLKDDEPLYIGNRMKKEDDSLTIFGVAERDQGSYTCVASTELDQDLAKAYLTVLADQATPTNRLAALPKGRPDRPRDLELTDLAERSVRLTWIPGDANNSPITDYVVQFEEDQFQPGVWHDHSKYPGSVNSAVLRLSPYVNYQFRVIAINEVGSSHPSLPSERYRTSGAPPESNPGDVKGEGTRKNNMEITWTPMNATSAFGPNLRYIVKWRRRETREAWNNVTVWGSRYVVGQTPVYVPYEIRVQAENDFGKGPEPESVIGYSGEDYPRAAPTEVKVRVMNSTAISLQWNRVYSDTVQGQLREYRAYYWRESSLLKNLWVSQKRQQASFPGDRLRGVVSRLFPYSNYKLEMVVVNGRGDGPRSETKEFTTPEGVPSAPRRFRVRQPNLETINLEWDHPEHPNGIMIGYTLKYVAFNGTKVGKQIVENFSPNQTKFTVQRTDPVSRYRFTLSARTQVGSGEAVTEESPAPPNEATPTAAYTNNQADIATQGWFIGLMCAIALLVLILLIVCFIKRSRGGKYPVREKKDVPLGPEDPKEEDGSFDYSDEDNKPLQGSQTSLDGTIKQQESDDSLVDYGEGGEGQFNEDGSFIGQYTVKKDKEETEGNESSEATSPVNAIYSLA

SEQ ID NO: 9314 - protein, 1169 aa, Homo sapiens
MARQPPPPWVHAAFLLCLLSLGGAIEIPMDLTQPPTITKQSAKDHIVDPRDNILIECEAKGNPAPSFHWTRNSRFFNIAKDPRVSMRRRSGTLVIDFRSGGRPEEYEGEYQCFARNKFGTALSNRIRLQVSKSPLWPKENLDPVVVQEGAPLTLQCNPPPGLPSPVIFWMSSSMEPITQDKRVSQGHNGDLYFSNVMLQDMQTDYSCNARFHFTHTIQQKNPFTLKVLTNHPYNDSSLRNHPDMYSARGVAERTPSFMYPQGTASSQMVLRGMDLLLECIASGVPTPDIAWYKKGGDLPSDKAKFENFNKALRITNVSEEDSGEYFCLASNKMGSIRHTISVRVKAAPYWLDEPKNLILAPGEDGRLVCRANGNPKPTVQWMVNGEPLQSAPPNPNREVAGDTIIFRDTQISSRAVYQCNTSNEHGYLLANAFVSVLDVPPRMLSPRNQLIRVILYNRTRLDCPFFGSPIPTLRWFKNGQGSNLDGGNYHVYENGSLEIKMIRKEDQGIYTCVATNILGKAENQVRLEVKDPTRIYRMPEDQVARRGTTVQLECRVKHDPSLKLTVSWLKDDEPLYIGNRMKKEDDSLTIFGVAERDQGSYTCVASTELDQDLAKAYLTVLGRPDRPRDLELTDLAERSVRLTWIPGDANNSPITDYVVQFEEDQFQPGVWHDHSKYPGSVNSAVLRLSPYVNYQFRVIAINEVGSSHPSLPSERYRTSGAPPESNPGDVKGEGTRKNNMEITWTPMNATSAFGPNLRYIVKWRRRETREAWNNVTVWGSRYVVGQTPVYVPYEIRVQAENDFGKGPEPESVIGYSGEDYPRAAPTEVKVRVMNSTAISLQWNRVYSDTVQGQLREYRAYYWRESSLLKNLWVSQKRQQASFPGDRLRGVVSRLFPYSNYKLEMVVVNGRGDGPRSETKEFTTPEGVPSAPRRFRVRQPNLETINLEWDHPEHPNGIMIGYTLKYVAFNGTKVGKQIVENFSPNQTKFTVQRTDPVSRYRFTLSARTQVGSGEAVTEESPAPPNEAYTNNQADIATQGWFIGLMCAIALLVLILLIVCFIKRSRGGKYPVREKKDVPLGPEDPKEEDGSFDYSDEDNKPLQGSQTSLDGTIKQQESDDSLVDYGEGGEGQFNEDGSFIGQYTVKKDKEETEGNESSEATSPVNAIYSLA

SEQ ID NO: 9315 - protein, 1174 aa, Homo sapiens
MARQPPPPWVHAAFLLCLLSLGGAIEIPMDLTQPPTITKQSAKDHIVDPRDNILIECEAKGNPAPSFHWTRNSRFFNIAKDPRVSMRRRSGTLVIDFRSGGRPEEYEGEYQCFARNKFGTALSNRIRLQVSKSPLWPKENLDPVVVQEGAPLTLQCNPPPGLPSPVIFWMSSSMEPITQDKRVSQGHNGDLYFSNVMLQDMQTDYSCNARFHFTHTIQQKNPFTLKVLTNHPYNDSSLRNHPDMYSARGVAERTPSFMYPQGTASSQMVLRGMDLLLECIASGVPTPDIAWYKKGGDLPSDKAKFENFNKALRITNVSEEDSGEYFCLASNKMGSIRHTISVRVKAAPYWLDEPKNLILAPGEDGRLVCRANGNPKPTVQWMVNGEPLQSAPPNPNREVAGDTIIFRDTQISSRAVYQCNTSNEHGYLLANAFVSVLDVPPRMLSPRNQLIRVILYNRTRLDCPFFGSPIPTLRWFKNGQGSNLDGGNYHVYENGSLEIKMIRKEDQGIYTCVATNILGKAENQVRLEVKDPTRIYRMPEDQVARRGTTVQLECRVKHDPSLKLTVSWLKDDEPLYIGNRMKKEDDSLTIFGVAERDQGSYTCVASTELDQDLAKAYLTVLGRPDRPRDLELTDLAERSVRLTWIPGDANNSPITDYVVQFEEDQFQPGVWHDHSKYPGSVNSAVLRLSPYVNYQFRVIAINEVGSSHPSLPSERYRTSGAPPESNPGDVKGEGTRKNNMEITWTPMNATSAFGPNLRYIVKWRRRETREAWNNVTVWGSRYVVGQTPVYVPYEIRVQAENDFGKGPEPESVIGYSGEDYPRAAPTEVKVRVMNSTAISLQWNRVYSDTVQGQLREYRAYYWRESSLLKNLWVSQKRQQASFPGDRLRGVVSRLFPYSNYKLEMVVVNGRGDGPRSETKEFTTPEGVPSAPRRFRVRQPNLETINLEWDHPEHPNGIMIGYTLKYVAFNGTKVGKQIVENFSPNQTKFTVQRTDPVSRYRFTLSARTQVGSGEAVTEESPAPPNEATPTAAYTNNQADIATQGWFIGLMCAIALLVLILLIVCFIKRSRGGKYPVREKKDVPLGPEDPKEEDGSFDYSDEDNKPLQGSQTSLDGTIKQQESDDSLVDYGEGGEGQFNEDGSFIGQYTVKKDKEETEGNESSEATSPVNAIYSLA

SEQ ID NO: 9316 - protein, 1174 aa, Homo sapiens; identical to SEQ ID NO: 9315

SEQ ID NO: 9317 - protein, 1169 aa, Homo sapiens; identical to SEQ ID NO: 9314

SEQ ID NO: 9318 - protein, 1157 aa, Homo sapiens
MARQPPPPWVHAAFLLCLLSLGGAIEIPMDLTQPPTITKQSAKDHIVDPRDNILIECEAKGNPAPSFHWTRNSRFFNIAKDPRVSMRRRSGTLVIDFRSGGRPEEYEGEYQCFARNKFGTALSNRIRLQVSKSPLWPKENLDPVVVQEGAPLTLQCNPPPGLPSPVIFWMSSSMEPITQDKRVSQGHNGDLYFSNVMLQDMQTDYSCNARFHFTHTIQQKNPFTLKVLTTRGVAERTPSFMYPQGTASSQMVLRGMDLLLECIASGVPTPDIAWYKKGGDLPSDKAKFENFNKALRITNVSEEDSGEYFCLASNKMGSIRHTISVRVKAAPYWLDEPKNLILAPGEDGRLVCRANGNPKPTVQWMVNGEPLQSAPPNPNREVAGDTIIFRDTQISSRAVYQCNTSNEHGYLLANAFVSVLDVPPRMLSPRNQLIRVILYNRTRLDCPFFGSPIPTLRWFKNGQGSNLDGGNYHVYENGSLEIKMIRKEDQGIYTCVATNILGKAENQVRLEVKDPTRIYRMPEDQVARRGTTVQLECRVKHDPSLKLTVSWLKDDEPLYIGNRMKKEDDSLTIFGVAERDQGSYTCVASTELDQDLAKAYLTVLGRPDRPRDLELTDLAERSVRLTWIPGDANNSPITDYVVQFEEDQFQPGVWHDHSKYPGSVNSAVLRLSPYVNYQFRVIAINEVGSSHPSLPSERYRTSGAPPESNPGDVKGEGTRKNNMEITWTPMNATSAFGPNLRYIVKWRRRETREAWNNVTVWGSRYVVGQTPVYVPYEIRVQAENDFGKGPEPESVIGYSGEDYPRAAPTEVKVRVMNSTAISLQWNRVYSDTVQGQLREYRAYYWRESSLLKNLWVSQKRQQASFPGDRLRGVVSRLFPYSNYKLEMVVVNGRGDGPRSETKEFTTPEGVPSAPRRFRVRQPNLETINLEWDHPEHPNGIMIGYTLKYVAFNGTKVGKQIVENFSPNQTKFTVQRTDPVSRYRFTLSARTQVGSGEAVTEESPAPPNEATPTAAYTNNQADIATQGWFIGLMCAIALLVLILLIVCFIKRSRGGKYPVREKKDVPLGPEDPKEEDGSFDYSDEDNKPLQGSQTSLDGTIKQQESDDSLVDYGEGGEGQFNEDGSFIGQYTVKKDKEETEGNESSEATSPVNAIYSLA

SEQ ID NO: 9319 - protein, 129 aa, Homo sapiens
MARQPPPPWVHAAFLLCLLSLGGAIEIPMDPSIQNELTQPPTITKQSAKDHIVDPRDNILIECEAKGNPAPSFHWTRNSRFFNIAKDPRVSMRRRSGTLVIDFRSGGRPEEYEGEYQCFARNKFGTALS

SEQ ID NO: 9320 - protein, 486 aa, Homo sapiens
MARQPPPPWVHAAFLLCLLSLGGAIEIPMDPSIQNELTQPPTITKQSAKDHIVDPRDNILIECEAKGNPAPSFHWTRNSRFFNIAKDPRVSMRRRSGTLVIDFRSGGRPEEYEGEYQCFARNKFGTALSNRIRLQVSKSPLWPKENLDPVVVQEGAPLTLQCNPPPGLPSPVIFWMSSSMEPITQDKRVSQGHNGDLYFSNVMLQDMQTDYSCNARFHFTHTIQQKNPFTLKVLTNHPYNDSSLRNHPDMYSARGVAERTPSFMYPQGTASSQMVLRGMDLLLECIASGVPTPDIAWYKKGGDLPSDKAKFENFNKALRITNVSEEDSGEYFCLASNKMGSIRHTISVRVKAAPYWLDEPKNLILAPGEDGRLVCRANGNPKPTVQWMVNGEPLQSAPPNPNREVAGDTIIFRDTQISSRAVYQCNTSNEHGYLLANAFVSVLDVPPRMLSPRNQLIRVILYNRTRLDCPFFGSPIPTLRCPHGLS

SEQ ID NO: 9321 - protein, 1240 aa, Homo sapiens
MARQPPPPWVHAAFLLCLLSLGGAIEIPMDPSIQNELTQPPTITKQSAKDHIVDPRDNILIECEAKGNPAPSFHWTRNSRFFNIAKDPRVSMRRRSGTLVIDFRSGGRPEEYEGEYQCFARNKFGTALSNRIRLQVSKSPLWPKENLDPVVVQEGAPLTLQCNPPPGLPSPVIFWMSSSMEPITQDKRVSQGHNGDLYFSNVMLQDMQTDYSCNARFHFTHTIQQKNPFTLKVLTTRGVAERTPSFMYPQGTASSQMVLRGMDLLLECIASGVPTPDIAWYKKGGDLPSDKAKFENFNKALRITNVSEEDSGEYFCLASNKMGSIRHTISVRVKAAPYWLDEPKNLILAPGEDGRLVCRANGNPKPTVQWMVNGEPLQSAPPNPNREVAGDTIIFRDTQISSRAVYQCNTSNEHGYLLANAFVSVLDVPPRMLSPRNQLIRVILYNRTRLDCPFFGSPIPTLRWFKNGQGSNLDGGNYHVYENGSLEIKMIRKEDQGIYTCVATNILGKAENQVRLEVKDPTRIYRMPEDQVARRGTTVQLECRVKHDPSLKLTVSWLKDDEPLYIGNRMKKEDDSLTIFGVAERDQGSYTCVASTELDQDLAKAYLTVLADQATPTNRLAALPKGRPDRPRDLELTDLAERSVRLTWIPGDANNSPITDYVVQFEEDQFQPGVWHDHSKYPGSVNSAVLRLSPYVNYQFRVIAINEVGSSHPSLPSERYRTSGAPPESNPGDVKGEGTRKNNMEITWTPMNATSAFGPNLRYIVKWRRRETREAWNNVTVWGSRYVVGQTPVYVPYEIRVQAENDFGKGPEPESVIGYSGEDLPSAPRRFRVRQPNLETINLEWDHPEHPNGIMIGYTLKYVAFNGTKVGKQIVENFSPNQTKFTVQRTDPVSRYRFTLSARTQVGSGEAVTEESPAPPNEATPTAAPPTLPPTTVGATGAVSSTDATAIAATTEATTVPIIPTVAPTTIATTTTVATTTTTTAAATTTTESPPTTTSGTKIHESAPDEQSIWNVTVLPNSKWANITWKHNFGPGTDFVVEYIDSNHTKKTVPVKAQAQPIQLTDLYPGMTYTLRVYSRDNEGISSTVITFMTSTAYTNNQADIATQGWFIGLMCAIALLVLILLIVCFIKRSRGGKYPVREKKDVPLGPEDPKEEDGSFDYSDEDNKPLQGSQTSLDGTIKQQESDDSLVDYGEGGEGQFNEDGSFIGQYTVKKDKEETEGNESSEATSPVNAIYSLA

SEQ ID NO: 9322 - protein, 1240 aa, Homo sapiens; identical to SEQ ID NO: 9321

SEQ ID NO: 9323 - protein, 619 aa, Homo sapiens
MARQPPPPWVHAAFLLCLLSLGGAIEIPMDPSIQNELTQPPTITKQSAKDHIVDPRDNILIECEAKGNPAPSFHWTRNSRFFNIAKDPRVSMRRRSGTLVIDFRSGGRPEEYEGEYQCFARNKFGTALSNRIRLQVSKSPLWPKENLDPVVVQEGAPLTLQCNPPPGLPSPVIFWMSSSMEPITQDKRVSQGHNGDLYFSNVMLQDMQTDYSCNARFHFTHTIQQKNPFTLKVLTTRGVAERTPSFMYPQGTASSQMVLRGMDLLLECIASGVPTPDIAWYKKGGDLPSDKAKFENFNKALRITNVSEEDSGEYFCLASNKMGSIRHTISVRVKAAPYWLDEPKNLILAPGEDGRLVCRANGNPKPTVQWMVNGEPLQSAPPNPNREVAGDTIIFRDTQISSRAVYQCNTSNEHGYLLANAFVSVLDVPPRMLSPRNQLIRVILYNRTRLDCPFFGSPIPTLRWFKNGQGSNLDGGNYHVYENGSLEIKMIRKEDQGIYTCVATNILGKAENQVRLEVKDPTRIYRMPEDQVARRGTTVQLECRVKHDPSLKLTVSWLKDDEPLYIGNRMKKEDDSLTIFGVAERDQGSYTCVASTELDQDLAKAYLTVLGNCPCSPWH

SEQ ID NO: 9324 - protein, 218 aa, Homo sapiens
PPTTVGATGAVSSTDATAIAATTEATTVPIIPTVAPTTIATTTTVATTTTTTAAATTTTESPPTTTSGTKIHESAYTNNQADIATQGWFIGLMCAIALLVLILLIVCFIKRSRGGKYPVREKKDVPLGPEDPKEEDGSFDYSDEDNKPLQGSQTSLDGTIKQQESDDSLVDYGEGGEGQFNEDGSFIGQYTVKKDKEETEGNESSEATSPVNAIYSLA

SEQ ID NO: 9325 - protein, 237 aa, Homo sapiens
  SITE 1: note = misc_feature - Xaa can be any naturally occurring amino acid
XENFSPNQTKFTVQRTDPVSRYRFTLSARTQVGSGEAVTEESPAPPNEATPTAAPDEQSIWNVTVLPNSKWANITWKHNFGPGTDFVVEYIDSNHTKKTVPVKAQAQPIQLTDLYPGMTYTLRVYSRDNEGISSTVITFMTSTAYTNNQADIATQGWFIGLMCAIALLVLILLIVCFIKRSRGGKYPVREKKDVPLGPEDPKEEDGSFDYSDEDNKPLQGSQTSLDGTIKQQESDDS

SEQ ID NO: 9326 - protein, 298 aa, Homo sapiens
  SITE 1: note = misc_feature - Xaa can be any naturally occurring amino acid
XRETREAWNNVTVWGSRYVVGQTPVYVPYEIRVQAENDFGKGPEPESVIGYSGEDLPSAPRRFRVRQPNLETINLEWDHPEHPNGIMIGYTLKYVAFNGTKVGKQIVENFSPNQTKFTVQRTDPVSRYRFTLSARTQVGSGEAVTEESPAPPNEAYTNNQADIATQGWFIGLMCAIALLVLILLIVCFIKRSRGGKYPVREKKDVPLGPEDPKEEDGSFDYSDEDNKPLQGSQTSLDGTIKQQESDDSLVDYGEGGEGQFNEDGSFIGQYTVKKDKEETEGNESSEATSPVNAIYSLA

SEQ ID NO: 9327 - protein, 1041 aa, Homo sapiens
  SITE 1: note = misc_feature - Xaa can be any naturally occurring amino acid
XSIQNELTQPPTITKQSAKDHIVDPRDNILIECEAKGNPAPSFHWTRNSRFFNIAKDPRVSMRRRSGTLVIDFRSGGRPEEYEGEYQCFARNKFGTALSNRIRLQVSKSPLWPKENLDPVVVQEGAPLTLQCNPPPGLPSPVIFWMSSSMEPITQDKRVSQGHNGDLYFSNVMLQDMQTDYSCNARFHFTHTIQQKNPFTLKVLTTRGVAERTPSFMYPQGTASSQMVLRGMDLLLECIASGVPTPDIAWYKKGGDLPSDKAKFENFNKALRITNVSEEDSGEYFCLASNKMGSIRHTISVRVKAAPYWLDEPKNLILAPGEDGRLVCRANGNPKPTVQWMVNGEPLQSAPPNPNREVAGDTIIFRDTQISSRAVYQCNTSNEHGYLLANAFVSVLDVPPRMLSPRNQLIRVILYNRTRLDCPFFGSPIPTLRWFKNGQGSNLDGGNYHVYENGSLEIKMIRKEDQGIYTCVATNILGKAENQVRLEVKDPTRIYRMPEDQVARRGTTVQLECRVKHDPSLKLTVSWLKDDEPLYIGNRMKKEDDSLTIFGVAERDQGSYTCVASTELDQDLAKAYLTVLADQATPTNRLAALPKGRPDRPRDLELTDLAERSVRLTWIPGDANNSPITDYVVQFEEDQFQPGVWHDHSKYPGSVNSAVLRLSPYVNYQFRVIAINEVGSSHPSLPSERYRTSGAPPESNPGDVKGEGTRKNNMEITWTPMNATSAFGPNLRYIVKWRRRETREAWNNVTVWGSRYVVGQTPVYVPYEIRVQAENDFGKGPEPESVIGYSGEDLPSAPRRFRVRQPNLETINLEWDHPEHPNGIMIGYTLKYVAFNGTKVGKQIVENFSPNQTKFTVQRTDPVSRYRFTLSARTQVGSGEAVTEESPAPPNEATPTAAYTNNQADIATQGWFIGLMCAIALLVLILLIVCFIKRSRGGKYPVREKKDVPLGPEDPKEEDGSFDYSDEDNKPLQGSQTSLDGTIKQQESDDSLVDYGEGGEGQFNEDGSFIGQYTVKKDKEETEGNESSEATSPVNAIYSLA

SEQ ID NO: 9328 - protein, 573 aa, Homo sapiens
MGWESHLTAASADIDLGAGREVFDYSHRQKEQDVEKELRDGGEQDTWAGEGAEALARNLLVDGETGESFPAQFPADISSITEAVPSESEPPALQNNLLSPLLTGTESPFDLEQQWQDLMSIMEMQAMEVNTSASEILYSAPPGDPLSTNYSLAPNTPINQNVSLHQASLGGCSQDFLLFSPEVESLPVASSSTLLPLAPSNSTSLNSTFGSTNLTGLFFPPQLNGTANDTAGPELPDPLGGLLDEAMLDEISLMDLAIEEGFNPVQASQLEEEFDSDSGLSLDSSHSPSSLSSSEGSSSSSSSSSSSSSSASSSASSSFSEEGAVGYSSDSETLDLEEAEGAVGYQPEYSKFCRMSYQDPAQLSCLPYLEHVGHNHTYNMAPSALDSADLPPPSALKKGSKEKQADFLDKQMSRDEHRARAMKIPFTNDKIINLPVEEFNELLSKYQLSEAQLSLIRDIRRRGKNKMAAQNCRKRKLDTILNLERDVEDLQRDKARLLREKVEFLRSLRQMKQKVQSLYQEVFGRLRDENGRPYSPSQYALQYAGDGSVLLIPRTMADQQARRQERKPKDRRK

SEQ ID NO: 9329 - protein, 584 aa, Homo sapiens
MGWESHLTAASADIDLIDILWRQDIDLGAGREVFDYSHRQKEQDVEKELRDGGEQDTWAGEGAEALARNLLVDGETGESFPAQFPADISSITEAVPSESEPPALQNNLLSPLLTGTESPFDLEQQWQDLMSIMEMQAMEVNTSASEILYSAPPGDPLSTNYSLAPNTPINQNVSLHQASLGGCSQDFLLFSPEVESLPVASSSTLLPLAPSNSTSLNSTFGSTNLTGLFFPPQLNGTANDTAGPELPDPLGGLLDEAMLDEISLMDLAIEEGFNPVQASQLEEEFDSDSGLSLDSSHSPSSLSSSEGSSSSSSSSSSSSSSASSSASSSFSEEGAVGYSSDSETLDLEEAEGAVGYQPEYSKFCRMSYQDPAQLSCLPYLEHVGHNHTYNMAPSALDSADLPPPSALKKGSKEKQADFLDKQMSRDEHRARAMKIPFTNDKIINLPVEEFNELLSKYQLSEAQLSLIRDIRRRGKNKMAAQNCRKRKLDTILNLERDVEDLQRDKARLLREKVEFLRSLRQMKQKVQSLYQEVFGRLRDENGRPYSPSQYALQYAGDGSVLLIPRTMADQQARRQERKPKDRRK

SEQ ID NO: 9330 - protein, 4 aa, Homo sapiens
MLSL

SEQ ID NO: 9331 - protein, 9 aa, Homo sapiens
MLSLKKYLT

SEQ ID NO: 9332 - protein, 83 aa, Homo sapiens
MLSLKKYLTEGLLQFTILLSLIGVRVDVDTYLTSQLPPLREIILGPSSAYTQTQFHNLRNTLDGYGIHPKSIDLDNYFTARRL

SEQ ID NO: 9333 - protein, 99 aa, Homo sapiens
MLSLKKYLTEGLLQFTILLSLIGVRVDVDTYLTSQLPPLREIILGPSSAYTQTQFHNLRNTLDGYGIHPKSIDLDNYFTARRLLSQVRALDRFQVPTTE

SEQ ID NO: 9334 - protein, 761 aa, Homo sapiens
MLSLKKYLTEGLLQFTILLSLIGVRVDVDTYLTSQLPPLREIILGPSSAYTQTQFHNLRNTLDGYGIHPKSIDLDNYFTARRLLSQVRALDRFQVPTTEVNAWLVHRDPEGSVSGSQPNSGLALESSSGLQDVTGPDNGVRESETEQGFGEDLEDLGAVAPPVSGDLTKEDIDLGAGREVFDYSHRQKEQDVEKELRDGGEQDTWAGEGAEALARNLLVDGETGESFPAQVPSGEDQTALSLEECLRLLEATCPFGENAEFPADISSITEAVPSESEPPALQNNLLSPLLTGTESPFDLEQQWQDLMSIMEMQAMEVNTSASEILYSAPPGDPLSTNYSLAPNTPINQNVSLHQASLGGCSQDFLLFSPEVESLPVASSSTLLPLAPSNSTSLNSTFGSTNLTGLFFPPQLNGTANDTAGPELPDPLGGLLDEAMLDEISLMDLAIEEGFNPVQASQLEEEFDSDSGLSLDSSHSPSSLSSSEGSSSSSSSSSSSSSSASSSASSSFSEEGAVGYSSDSETLDLEEAEGAVGYQPEYSKFCRMSYQDPAQLSCLPYLEHVGHNHTYNMAPSALDSADLPPPSALKKGSKEKQADFLDKQMSRDEHRARAMKIPFTNDKIINLPVEEFNELLSKYQLSEAQLSLIRDIRRRGKNKMAAQNCRKRKLDTILNLERDVEDLQRDKARLLREKVEFLRSLRQMKQKVQSLYQEVFGRLRDENGRPYSPSQYALQYAGDGSVLLIPRTMADQQARRQERKPKDRRK

SEQ ID NO: 9335 - protein, 742 aa, Homo sapiens
MLSLKKYLTEGLLQFTILLSLIGVRVDVDTYLTSQLPPLREIILGPSSAYTQTQFHNLRNTLDGYGIHPKSIDLDNYFTARRLLSQVRALDRFQVPTTEVNAWLVHRDPEGSVSGSQPNSGLALESSSGLQDVTGPDNGVRESETEQGFGEDLEDLGAVAPPVSGDLTKEDIDLIDILWRQDIDLGAGREVFDYSHRQKEQDVEKELRDGGEQDTWAGEGAEALARNLLVDGETGESFPAQFPADISSITEAVPSESEPPALQNNLLSPLLTGTESPFDLEQQWQDLMSIMEMQAMEVNTSASEILYSAPPGDPLSTNYSLAPNTPINQNVSLHQASLGGCSQDFLLFSPEVESLPVASSSTLLPLAPSNSTSLNSTFGSTNLTGLFFPPQLNGTANDTAGPELPDPLGGLLDEAMLDEISLMDLAIEEGFNPVQASQLEEEFDSDSGLSLDSSHSPSSLSSSEGSSSSSSSSSSSSSSASSSASSSFSEEGAVGYSSDSETLDLEEAEGAVGYQPEYSKFCRMSYQDPAQLSCLPYLEHVGHNHTYNMAPSALDSADLPPPSALKKGSKEKQADFLDKQMSRDEHRARAMKIPFTNDKIINLPVEEFNELLSKYQLSEAQLSLIRDIRRRGKNKMAAQNCRKRKLDTILNLERDVEDLQRDKARLLREKVEFLRSLRQMKQKVQSLYQEVFGRLRDENGRPYSPSQYALQYAGDGSVLLIPRTMADQQARRQERKPKDRRK

SEQ ID NO: 9336 - protein, 742 aa, Homo sapiens; identical to SEQ ID NO: 9335

SEQ ID NO: 9337 - protein, 772 aa, Homo sapiens
MLSLKKYLTEGLLQFTILLSLIGVRVDVDTYLTSQLPPLREIILGPSSAYTQTQFHNLRNTLDGYGIHPKSIDLDNYFTARRLLSQVRALDRFQVPTTEVNAWLVHRDPEGSVSGSQPNSGLALESSSGLQDVTGPDNGVRESETEQGFGEDLEDLGAVAPPVSGDLTKEDIDLIDILWRQDIDLGAGREVFDYSHRQKEQDVEKELRDGGEQDTWAGEGAEALARNLLVDGETGESFPAQVPSGEDQTALSLEECLRLLEATCPFGENAEFPADISSITEAVPSESEPPALQNNLLSPLLTGTESPFDLEQQWQDLMSIMEMQAMEVNTSASEILYSAPPGDPLSTNYSLAPNTPINQNVSLHQASLGGCSQDFLLFSPEVESLPVASSSTLLPLAPSNSTSLNSTFGSTNLTGLFFPPQLNGTANDTAGPELPDPLGGLLDEAMLDEISLMDLAIEEGFNPVQASQLEEEFDSDSGLSLDSSHSPSSLSSSEGSSSSSSSSSSSSSSASSSASSSFSEEGAVGYSSDSETLDLEEAEGAVGYQPEYSKFCRMSYQDPAQLSCLPYLEHVGHNHTYNMAPSALDSADLPPPSALKKGSKEKQADFLDKQMSRDEHRARAMKIPFTNDKIINLPVEEFNELLSKYQLSEAQLSLIRDIRRRGKNKMAAQNCRKRKLDTILNLERDVEDLQRDKARLLREKVEFLRSLRQMKQKVQSLYQEVFGRLRDENGRPYSPSQYALQYAGDGSVLLIPRTMADQQARRQERKPKDRRK

SEQ ID NO: 9338 - protein, 19 aa, Homo sapiens
MSIMEMQAMEVNTSASEIL

SEQ ID NO: 9339 - protein, 23 aa, Homo sapiens
MSIMEMQAMEVNTSASEILYSAP

SEQ ID NO: 9340 - protein, 47 aa, Homo sapiens
MSIMEMQAMEVNTSASEILYSAPPGDPLSTNYSLAPNTPINQNVSLH

SEQ ID NO: 9341 - protein, 63 aa, Homo sapiens
MSIMEMQAMEVNTSASEILYSAPPGDPLSTNYSLAPNTPINQNVSLHQASLGGCSQDFLLFSP

SEQ ID NO: 9342 - protein, 161 aa, Homo sapiens
MTRLDRSSHSGGGHAKGSRPLNSLLAGHRVAQPASAPGSRASVQDIDLGAGREVFDYSHRQKEQDVEKELRDGGEQDTWAGEGAEALARNLLVDGETGESFPAQFPADISSITEAVPSESEPPALQNNLLSPLLTGTESPFDLEQQWQDLMSIMEMQAMEV

SEQ ID NO: 9343 - protein, 63 aa, Homo sapiens
MTRLDRSSHSGGGHAKGSRPLNSLLAGHRVAQPASAPGSRASVQDIDLIDILWRQDIDLGAGR

SEQ ID NO: 9344 - protein, 111 aa, Homo sapiens
MTRLDRSSHSGGGHAKGSRPLNSLLAGHRVAQPASAPGSRASVQDIDLIDILWRQDIDLGAGREVFDYSHRQKEQDVEKELRDGGEQDTWAGEGAEALARNLLVDGETGES

SEQ ID NO: 9345 - protein, 616 aa, Homo sapiens
MTRLDRSSHSGGGHAKGSRPLNSLLAGHRVAQPASAPGSRASVQDIDLIDILWRQDIDLGAGREVFDYSHRQKEQDVEKELRDGGEQDTWAGEGAEALARNLLVDGETGESFPAQFPADISSITEAVPSESEPPALQNNLLSPLLTGTESPFDLEQQWQDLMSIMEMQAMEVNTSASEILYSAPPGDPLSTNYSLAPNTPINQNVSLHQASLGGCSQDFLLFSPEVESLPVASSSTLLPLAPSNSTSLNSTFGSTNLTGLFFPPQLNGTANDTAGPELPDPLGGLLDEAMLDEISLMDLAIEEGFNPVQASQLEEEFDSDSGLSLDSSHSPSSLSSSEGSSSSSSSSSSSSSSASSSASSSFSEEGAVGYSSDSETLDLEEAEGAVGYQPEYSKFCRMSYQDPAQLSCLPYLEHVGHNHTYNMAPSALDSADLPPPSALKKGSKEKQADFLDKQMSRDEHRARAMKIPFTNDKIINLPVEEFNELLSKYQLSEAQLSLIRDIRRRGKNKMAAQNCRKRKLDTILNLERDVEDLQRDKARLLREKVEFLRSLRQMKQKVQSLYQEVFGRLRDENGRPYSPSQYALQYAGDGSVLLIPRTMADQQARRQERKPKDRRK

SEQ ID NO: 9346 - protein, 133 aa, Homo sapiens
SEEGAVGYSSDSETLDLEEAEGAVGYQPEYSKFCRMSYQDPAQLSCLPYLEHVGHNHTYNMAPSALDSADLPPPSALKKGSKEKQADFLDKQMSRDEHRARAMKIPFTNDKIINLPVEELCGAKADRGEGMDL

SEQ ID NO: 9347 - protein, 694 aa, Homo sapiens
MKHLKRWWSAGGGLLHLTLLLSLAGLRVDLDLYLLLPPPTLLQDELLFLGGPASSAYALSPFSASGGWGRAGHLHPKGRELDPAAPPEGQLLREVRALGVPFVPRTSVDAWLVHSVAAGSADEAHGLLGAAAASSTGGAGASVDGGSQAVQGGGGDPRAARSGPLDAGEEEKAPAEPTAQVPDAGGCASEENGVLREKHEAVDHSSQHEENEERVSAQKENSLQQNDDDENKIAEKPDWEAEKTTESRNERHLNGTDTSFSLEDLFQLLSSQPENSLEGISLGDIPLPGSISDGMNSSAHYHVNFSQAISQDVNLHEAILLCPNNTFRRDPTARTSQSQEPFLQLNSHTTNPEQTLPGTNLTGFLSPVDNHMRNLTSQDLLYDLDINIFDEINLMSLATEDNFDPIDVSQLFDEPDSDSGLSLDSSHNNTSVIKSNSSHSVCDEGAIGYCTDHESSSHHDLEGAVGGYYPEPSKLCHLDQSDSDFHGDLTFQHVFHNHTYHLQPTAPESTSEPFPWPGKSQKIRSRYLEDTDRNLSRDEQRAKALHIPFSVDEIVGMPVDSFNSMLSRYYLTDLQVSLIRDIRRRGKNKVAAQNCRKRKLDIILNLEDDVCNLQAKKETLKREQAQCNKAINIMKQKLHDLYHDIFSRLRDDQGRPVNPNHYALQCTHDGSILIVPKELVASGHKKETQKGKRK

SEQ ID NO: 9348 - protein, 83 aa, Homo sapiens
NEERVSAQKENSLQQNDDDENKIAEKPDWEAEKTTESRNERHLNGTDTSFSLEDLFQLLSSQPENSLEVIGTLAFILAGTYLH

SEQ ID NO: 9349 - protein, 238 aa, Homo sapiens
MELLAAAFSAACAVDHDSSTSESDARDSAAGHLPGSESSSTPGNGATPEEWPALADSPTTLTEALRMIHPIPADSWRNLIEQIGLLYQEYRDKSTLQEIETRRQQDAEIEDNTNGSPASEDTPEEEEEEEEEEEPASPPERKTLPQICLLSNPHSRFNLWQDLPEIRSSGVLEILQPEEIKLQEAMFELVTSEASYYKSLNLLVSHFMENERIRKILHPSEAHILFSNVLDVLAVSER

SEQ ID NO: 9350 - protein, 618 aa, Homo sapiens
MELLAAAFSAACAVDHDSSTSESDARDSAAGHLPGSESSSTPGNGATPEEWPALADSPTTLTEALRMIHPIPADSWRNLIEQIGLLYQEYRDKSTLQEIETRRQQDAEIEDNTNGSPASEDTPEEEEEEEEEEEPASPPERKTLPQICLLSNPHSRFNLWQDLPEIRSSGVLEILQPEEIKLQEAMFELVTSEASYYKSLNLLVSHFMENERIRKILHPSEAHILFSNVLDVLAVSERFLLELEHRMEENIVISDVCDIVYRYAADHFSVYITYVSNQTYQERTYKQLLQEKAAFRELIAQLELDPKCRGLPFSSFLILPFQRITRLKLLVQNILKRVEERSERECTALDAHKELEMVVKACNEGVRKMSRTEQMISIQKKMEFKIKSVPIISHSRWLLKQGELQQMSGPKTSRTLRTKKLFHEIYLFLFNDLLVICRQIPGDKYQVFDSAPRGLLRVEELEDQGQTLANVFILRLLENADDREATYMLKASSQSEMKRWMTSLAPNRRTKFVSFTSRLLDCPQVQCVHPYVAQQPDELTLELADILNILDKTDDGWIFGERLHDQERGWFPSSMTEEILNPKIRSQNLKECFRVHKMDDPQRSQNKDRRKLGSRNRQ

SEQ ID NO: 9351 - protein, 710 aa, Homo sapiens
METRESEDLEKTRRKSASDQWNTDNEPAKVKPELLPEKEETSQADQDIQDKEPHCHIPIKRNSIFNRSIRRKSKAKARDNPERNASCLADSQDNGKSVNEPLTLNIPWSRMPPCRTAMQTDPGAQEMSESSSTPGNGATPEEWPALADSPTTLTEALRMIHPIPADSWRNLIEQIGLLYQEYRDKSTLQEIETRRQQDAEIEDNTNGSPASEDTPEEEEEEEEEEEPASPPERKTLPQICLLSNPHSRFNLWQDLPEIRSSGVLEILQPEEIKLQEAMFELVTSEASYYKSLNLLVSHFMENERIRKILHPSEAHILFSNVLDVLAVSERFLLELEHRMEENIVISDVCDIVYRYAADHFSVYITYVSNQTYQERTYKQLLQEKAAFRELIAQLELDPKCRGLPFSSFLILPFQRITRLKLLVQNILKRVEERSERECTALDAHKELEMVVKACNEGVRKMSRTEQMISIQKKMEFKIKSVPIISHSRWLLKQGELQQMSGPKTSRTLRTKKLFHEIYLFLFNDLLVICRQIPGDKYQVFDSAPRGLLRVEELEDQGQTLANVFILRLLENADDREATYMLKASSQSEMKRWMTSLAPNRRTKFVSFTSRLLDCPQVQCVHPYVAQQPDELTLELADILNILDKTDDGWIFGERLHDQERGWFPSSMTEEILNPKIRSQNLKECFRVHKMDDPQRSQNKDRRKLGSRNRQ

SEQ ID NO: 9352 - protein, 187 aa, Homo sapiens
MFELVTSEASYYKSLNLLVSHFMENERIRKILHPSEAHILFSNVLDVLAVSERFLLELEHRMEENIVISDVCDIVYRYAADHFSVYITYVSNQTYQERTYKQLLQEKAAFRELIAQLELDPKCRGLPFSSFLILPFQRITRLKLLVQNILKRVEERSERECTALDAHKELEMVVKACNEGVRKMSRT

SEQ ID NO: 9353 - protein, 150 aa, Homo sapiens
MVVKACNEGVRKMSRTEQMISIQKKMEFKIKSVPIISHSRWLLKQGELQQMSGPKTSRTLRTKKLFHEIYLFLFNDLLVICRQIPGDKYQVFDSAPRGLLRVEELEDQGQTLANVFILRLLENADDREATYMLKASSQSEMKRWMTSLAP

SEQ ID NO: 9354 - protein, 97 aa, Homo sapiens
  SITE 1: note = misc_feature - Xaa can be any naturally occurring amino acid
XELLPEKEETSQADQDIQDKEPHCHIPIKRNSIFNRSIRRKSKAKARDNPERNASCLADSQDNGKSVNEPLTLNIPWSRMPPCRTAMQTDPGAQEMR

SEQ ID NO: 9355 - protein, 241 aa, Homo sapiens
MSMLFYTLITAFLIGIQAEPHSESNVPAGHTIPQAHWTKLQHSLDTALRRARSAPAAAIAARVAGQTRNITVDPRLFKKRRLRSPRVLFSTQPPREAADTQDLDFEVGGAAPFNRTHRSKRSSSHPIFHRGEFSVCDSVSVWVGDKTTATDIKGKEVMVLGEVNINNSVFKQYFFETKCRDPNPVDSGCRGIDSKHWNSYCTTTHTFVKALTMDGKQAAWRFIRIDTACVCVLSRKAVRRA

SEQ ID NO: 9356 - protein, 633 aa, Homo sapiens
AALGSSSGSASPAVAELCQNTPETFLEASKLLLTYADNILRNPNDEKYRSIRIGNTAFSTRLLPVRGAVECLFEMGFEEGETHLIFPKKASVEQLQKIRDLIAIERSSRLDGSNKSHKVKSSQQPAASTQLPTTPSSNPSGLNQHTRNRQGQSSDPPSASTVAADSAILEVLQSNIQHVLVYENPALQEKALACIPVQELKRKSQEKLSRARKLDKGINISDEDFLLLELLHWFKEEFFHWVNNVLCSKCGGQTRSRDRSLLPSDDELKWGAKEVEDHYCDACQFSNRFPRYNNPEKLLETRCGRCGEWANCFTLCCRAVGFEARYVWDYTELQRTLSLKLTTLKEIGKTFLRISKRQKLIQVVDVTWRYSCKHEEVIARRTKVKEALLRDTINGLNKQRQLFLSENRRKELLQRIIVELVEFISPKTPKPGELGGRISGSVAWRVARGEMGLQRKETLFIPCENEKISKQLHLCYNIVKDRYVRVSNNNQTISGWENGVWKMESIFRKVETDWHMVYLARKEGSSFAYISWKFECGSVGLKVDSISIRTSSQTFQTGTVEWKLRSDTAQVELTGDNSLHSYADFSGATEVILEAELSRGDGDVAWQHTQLFRQSLNDHEENCLEIIIKFSDL

SEQ ID NO: 9357 - protein, 654 aa, Homo sapiens [sequence omitted]

SEQ ID NO: 9358 - protein, 558 aa, Homo sapiens
MAAAALGSSSGSASPAVAELCQNTPETFLEASKLLLTYADNILRNPNDEKYRSIRIGNTAFSTRLLPVRGAVECLFEMGFEEGETHLIFPKKASVEQLQKIRDLIAIERSSRLDGSNKSHKVKSSQQPAASTQLPTTPSSNPSGLNQHTRNRQGQSSDPPSASTVAADSAILEVLQSNIQHVLVYENPALQEKALACIPVQELKRKSQEKLSRARKLDKGINISDEDFLLLELLHWFKEEFFHWVNNVLCSKCGGQTRSRDRSLLPSDDELKWGAKEVEDHYCDACQFSNRFPRYNNPEKLLETRCGRCGEWANCFTLCCRAVGFEARYVWDYTDHVWTEVYSPSQQRWLHCDACEDVCDKPLLYEIGWGKKLSYVIAFSKDEVVDVTWRYSCKHEEVIARRTKVKEALLRDTINGLNKQRQLFLSENRRKELLQRIIVELVEFISPKTPKPGELGGRISGSVAWRVARGEMGLQRKETLFIPCENEKISKQLHLCYNIVKDRYVRVSNNNQTISGWENGVWKMESIFRKVETDWHMITVFTPMLIFLVPLKLFWKQN

SEQ ID NO: 9359 - protein, 636 aa, Homo sapiens
MAAAALGSSSGSASPAVAELCQNTPETFLEASKLLLTYADNILRNPNDEKYRSIRIGNTAFSTRLLPVRGAVECLFEMGFEEGETHLIFPKKASVEQLQKIRDLIAIERSSRLDGSNKSHKVKSSQQPAASTQLPTTPSSNPSGLNQHTRNRQGQSSDPPSASTVAADSAILEVLQSNIQHVLVYENPALQEKALACIPVQELKRKSQEKLSRARKLDKGINISDEDFLLLELLHWFKEEFFHWVNNVLCSKCGGQTRSRDRSLLPSDDELKWGAKEVEDHYCDACQFSNRFPRYNNPEKLLETRCGRCGEWANCFTLCCRAVGFEARYVWDYTELQRTLSLKLTTLKEIGKTFLRISKRQKLIQVVDVTWRYSCKHEEVIARRTKVKEALLRDTINGLNKQRQLFLSENRRKELLQRIIVELVEFISPKTPKPGELGGRISGSVAWRVARGEMGLQRKETLFIPCENEKISKQLHLCYNIVKDRYVRVSNNNQTISGWENGVWKMESIFRKVETDWHMVYLARKEGSSFAYISWKFECGSVGLKVDSISIRTSSQTFQTGTVEWKLRSDTAQVELTGDNSLHSYADFSGATEVILEAELSRGDGDVAWQHTQLFRQSLNDHEENCLEIIIKFSDL

SEQ ID NO: 9360 - protein, 114 aa, Homo sapiens
MGFEEGETHLIFPKKASVEQLQKIRDLIAIERSSRLDGSNKSHKVKSSQQPAASTQLPTTPSSNPSGLNQHTRNRQGQSSDPPSASTVAADSAILEVLQSNIQHVLVYENPALQ

SEQ ID NO: 9361 - protein, 612 aa, Homo sapiens
MRNPNDEKYRSIRIGNTAFSTRLLPVRGAVECLFEMGFEEGETHLIFPKKASVEQLQKIRDLIAIERSSRLDGSNKSHKVKSSQQPAASTQLPTTPSSNPSGLNQHTRNRQGQSSDPPSASTVAADSAILEVLQSNIQHVLVYENPALQEKALACIPVQELKRKSQEKLSRARKLDKGINISDEDFLLLELLHWFKEEFFHWVNNVLCSKCGGQTRSRDRSLLPSDDELKWGAKEVEDHYCDACQFSNRFPRYNNPEKLLETRCGRCGEWANCFTLCCRAVGFEARYVWDYTDHVWTEVYSPSQQRWLHCDACEDVCDKPLLYEIGWGKKLSYVIAFSKDEVVDVTWRYSCKHEEVIARRTKVKEALLRDTINGLNKQRQLFLSENRRKELLQRIIVELVEFISPKTPKPGELGGRISGSVAWRVARGEMGLQRKETLFIPCENEKISKQLHLCYNIVKDRYVRVSNNNQTISGWENGVWKMESIFRKVETDWHMVYLARKEGSSFAYISWKFECGSVGLKVDSISIRTSSQTFQTGTVEWKLRSDTAQVELTGDNSLHSYADFSGATEVILEAELSRGDGDVAWQHTQLFRQSLNDHEENCLEIIIKFSDL

SEQ ID NO: 9362 - protein, 240 aa, Homo sapiens
  SITE 1: note = misc_feature - Xaa can be any naturally occurring amino acid
XSGSASPAVAELCQNTPETFLEASKLLLTYADNILRNPNDEKYRSIRIGNTAFSTRLLPVRGAVECLFEMGFEEGETHLIFPKKASVEQLQKIRDLIAIERSSRLDGSNKSHKVKSSQQPAASTQLPTTPSSNPSGLNQHTRNRQGQSSDPPSASTVAADSAILEVLQSNIQHVLVYENPALQEKALACIPVQELKRKSQEKLSRARKLDKDIITLRNFWKQDVDGVASGPIVLHCAAEL

SEQ ID NO: 9363 - protein, 23 aa, Homo sapiens
EAPGAPPRTLTWEAMEQIRYLSS

SEQ ID NO: 9364 - protein, 291 aa, Homo sapiens
MAVTLSLLLGGRVCAAVTRCGFATRGVAGPGPIGREPDPDSDWEPEERELQEVESTLKRQKQAIRFQKIRRQMEAPGAPPRTLTWEAMEQIRYLHEEFPESWSVPRLAEGFDVSTDVIRRVLKSKFLPTLEQKLKQDQKVLKKAGLAHSLQHLRGSGNTSKLLPAGHSVSGSLLMPGHEASSKDPNHSTALKVIESDTHRTNTPRRRKGRNKEIQDLEESFVPVAAPLGHPRELQKYSSDSESPRGTGSGALPSGQKLEELKAEEPDNFSSKVVQRGREFFDSNGNFLYRI

SEQ ID NO: 9365 - protein, 280 aa, Homo sapiens
MARFWVCVAGAGFFLAFLVLHSRFCGSPVLRNFTFAVSWRTEKILYRLDVGWPKHPEYFTGTTFCVAVDSLNGLVYIGQRGDNIPKILVFTEDGYFLRAWNYTVDTPHGIFAASTLYEQSVWITDVGSDFMILWLHGENGTGPAKFNIPHSVTLDSAGRVWVADRGNKRIQVFDKDTGEWLGAWNNCFTEEGPSSVRFTPDGKYLIVAQLNLSRLSVVAAPPVGSIGECSVISTIQLADQVLPHLLEVDRKTGAVYVAEIGAKQVQKYVPLNSYVPSFGS

SEQ ID NO: 9366 - protein, 347 aa, Homo sapiens
MARFWVCVAGAGFFLAFLVLHSRFCGSPVLRNFTFAVSWRTEKILYRLDVGWPKHPEYFTGTTFCVAVDSLNGLVYIGQRGDNIPKILVFTEDGYFLRAWNYTVDTPHGIFAASTLYEQSVWITDVGSGFFGHTVKKYSSFGDLVQVLGTPGKKGTSLNPLQFDNPAELYVEDTGDIYIVDGDGGLNNRLIKLSQDFMILWLHGENGTGPAKFNIPHSVTLDSAGRVWVADRGNKRIQVFDKDTGEWLGAWNNCFTEEGPSSVRFTPDGKYLIVAQLNLSRLSVVAAPPVGSIGECSVISTIQLADQVLPHLLEVDRKTGAVYVAEIGAKQVQKYVPLNSYVPSFGS

SEQ ID NO: 9367 - protein, 150 aa, Homo sapiens
MILWLHGENGTGPAKFNIPHSVTLDSAGRVWVADRGNKRIQVFDKDTGEWLGAWNNCFTEEGPSSVRFTPDGKYLIVAQLNLSRLSVVAAPPVGSIGECSVISTIQLADQVLPHLLEVDRKTGAVYVAEIGAKQVQKYVPLNSYVPSFGS

SEQ ID NO: 9368 - protein, 1247 aa, Homo sapiens
MLASSSRIRAAWTRALLLPLLLAGPVGCLSRQELFPFGPGQGDLELEDGDDFVSPALELSGALRFYDRSDIDAVYVTTNGIIATSEPPAKESHPGLFPPTFGAVAPFLADLDTTDGLGKVYYREDLSPSITQRAAECVHRGFPEISFQPSSAVVVTWESVAPYQGPSRDPDQKGKRNTFQAVLASSDSSSYAIFLYPEDGLQFHTTFSKKENNQVPAVVAFSQGSVGFLWKSNGAYNIFANDRESVENLAKSSNSGQQGVWVFEIGSPATTNGVVPADVILGTEDGAEYDDEDEDYDLATTRLGLEDVGTTPFSYKALRRGGADTYSVPSVLSPRRAATERPLGPPTERTRSFQLAVETFHQQHPQVIDVDEVEETGVVFSYNTDSRQTCANNRHQCSVHAECRDYATGFCCSCVAGYTGNGRQCVAEGSPQRVNGKVKGRIFVGSSQVPIVFENTDLHSYVVMNHGRSYTAISTIPETVGYSLLPLAPVGGIIGWMFAVEQDGFKNGFSITGGEFTRQAEVTFVGHPGNLVIKQRFSGIDEHGHLTIDTELEGRVPQIPFGSSVHIEPYTELYHYSTSVITSSSTREYTVTEPERDGASPSRIYTYQWRQTITFQECVHDDSRPALPSTQQLSVDSVFVLYNQEEKILRYALSNSIGPVREGSPDALQNPCYIGTHGCDTNAACRPGPRTQFTCECSIGFRGDGRTCYDIDECSEQPSVCGSHTICNNHPGTFRCECVEGYQFSDEGTCVAVVDQRPINYCETGLHNCDIPQRAQCIYTGGSSYTCSCLPGFSGDGQACQDVDECQPSRCHPDAFCYNTPGSFTCQCKPGYQGDGFRCVPGEVEKTRCQHEREHILGAAGATDPQRPIPPGLFVPECDAHGHYAPTQCHGSTGYCWCVDRDGREVEGTRTRPGMTPPCLSTVAPPIHQGPAVPTAVIPLPPGTHLLFAQTGKIERLPLEGNTMRKTEAKAFLHVPAKVIIGLAFDCVDKMVYWTDITEPSIGRASLHGGEPTTIIRQDLGSPEGIAVDHLGRNIFWTDSNLDRIEVAKLDGTQRRVLFETDLVNPRGIVTDSVRGNLYWTDWNRDNPKIETSYMDGTNRRILVQDDLGLPNGLTFDAFSSQLCWVDAGTNRAECLNPSQPSRRKALEGLQYPFAVTSYGKNLYFTDWKMNSVVALDLAISKETDAFQPHKQTRLYGITTALSQCPQGHNYCSVNNGGCTHLCLATPGSRTCRCPDNTLGVDCIEQK

SEQ ID NO: 9369 - protein, 1114 aa, Homo sapiens
MLASSSRIRAAWTRALLLPLLLAGPVGCLSRQELFPFGPGQGDLELEDGDDFVSPALELSGALRFYDRSDIDAVYVTTNGIIATSEPPAKESHPGLFPPTFGAVAPFLADLDTTDGLGKVYYREDLSPSITQRAAECVHRGFPEISFQPSSAVVVTWESVAPYQGPSRDPDQKGKRNTFQAVLASSDSSSYAIFLYPEDGLQFHTTFSKKENNQVPAVVAFSQGSVGFLWKSNGAYNIFANDRESVENLAKSSNSGQQGVWVFEIGSPATTNGVVPADVILGTEDGAEYDDEDEDYDLATTRLGLEDVGTTPFSYKALRRGGADTYSVPSVLSPRRAATERPLGPPTERTRSFQLAVETFHQQHPQVIDVDEVEETGVVFSYNTDSRQTCANNRHQCSVHAECRDYATGFCCSCVAGYTGNGRQCVAEGSPQRVNGKVKGRIFVGSSQVPIVFENTDLHSYVVMNHGRSYTAISTIPETVGYSLLPLAPVGGIIGWMFAVEQDGFKNGFSITGGEFTRQAEVTFVGHPGNLVIKQRFSGIDEHGHLTIDTELEGRVPQIPFGSSVHIEPYTELYHYSTSVITSSSTREYTVTEPERDGASPSRIYTYQWRQTITFQECVHDDSRPALPSTQQLSVDSVFVLYNQEEKILRYALSNSIGPVREGSPDALQNPCYIGTHGCDTNAACRPGPRTQFTCECSIGFRGDGRTCYEVEKTRCQHEREHILGAAGATDPQRPIPPGLFVPECDAHGHYAPTQCHGSTGYCWCVDRDGREVEGTRTRPGMTPPCLSTVAPPIHQGPAVPTAVIPLPPGTHLLFAQTGKIERLPLEGNTMRKTEAKAFLHVPAKVIIGLAFDCVDKMVYWTDITEPSIGRASLHGGEPTTIIRQDLGSPEGIAVDHLGRNIFWTDSNLDRIEVAKLDGTQRRVLFETDLVNPRGIVTDSVRGNLYWTDWNRDNPKIETSYMDGTNRRILVQDDLGLPNGLTFDAFSSQLCWVDAGTNRAECLNPSQPSRRKALEGLQYPFAVTSYGKNLYFTDWKMNSVVALDLAISKETDAFQPHKQTRLYGITTALSQCPQGHNYCSVNNGGCTHLCLATPGSRTCRCPDNTLGVDCIEQK

SEQ ID NO: 9370 - protein, 1375 aa, Homo sapiens
MEGDRVAGRPVLSSLPVLLLLPLLMLRAAALHPDELFPHGESWGDQLLQEGDDESSAVVKLANPLHFYEARFSNLYVGTNGIISTQDFPRETQYVDYDFPTDFPAIAPFLADIDTSHGRGRVLYREDTSPAVLGLAARYVRAGFPRSARFTPTHAFLATWEQVGAYEEVKRGALPSGELNTFQAVLASDGSDSYALFLYPANGLQFLGTRPKESYNVQLQLPARVGFCRGEADDLKSEGPYFSLTSTEQSVKNLYQLSNLGIPGVWAFHIGSTSPLDNVRPAAVGDLSAAHSSVPLGRSFSHATALESDYNEDNLDYYDVNEEEAEYLPGEPEEALNGHSSIDVSFQSKVDTKPLEESSTLDPHTKEGTSLGEVGGPDLKGQVEPWDERETRSPAPPEVDRDSLAPSWETPPPYPENGSIQPYPDGGPVPSEMDVPPAHPEEEIVLRSYPASGHTTPLSRGTYEVGLEDNIGSNTEVFTYNAANKETCEHNHRQCSRHAFCTDYATGFCCHCQSKFYGNGKHCLPEGAPHRVNGKVSGHLHVGHTPVHFTDVDLHAYIVGNDGRAYTAISHIPQPAAQALLPLTPIGGLFGWLFALEKPGSENGFSLAGAAFTHDMEVTFYPGEETVRITQTAEGLDPENYLSIKTNIQGQVPYVSANFTAHISPYKELYHYSDSTVTSTSSRDYSLTFGAINQTWSYRIHQNITYQVCRHAPRHPSFPTTQQLNVDRVFALYNDEERVLRFAVTNQIGPVKEDSDPTPGNPCYDGSHMCDTTARCHPGTGVDYTCECASGYQGDGRNCVDENECATGFHRCGPNSVCINLPGSYRCECRSGYEFADDRHTCILITPPANPCEDGSHTCAPAGQARCVHHGGSTFSCACLPGYAGDGHQCTDVDECSENRCHPAATCYNTPGSFSCRCQPGYYGDGFQCIPDSTSSLTPCEQQQRHAQAQYAYPGARFHIPQCDEQGNFLPLQCHGSTGFCWCVDPDGHEVPGTQTPPGSTPPHCGPSPEPTQRPPTICERWRENLLEHYGGTPRDDQYVPQCDDLGHFIPLQCHGKSDFCWCVDKDGREVQGTRSQPGTTPACIPTVAPPMVRPTPRPDVTPPSVGTFLLYTQGQQIGYLPLNGTRLQKDAAKTLLSLHGSIIVGIDYDCRERMVYWTDVAGRTISRAGLELGAEPETIVNSGLISPEGLAIDHIRRTMYWTDSVLDKIESALLDGSERKVLFYTDLVNPRAIAVDPIRGNLYWTDWNREAPKIETSSLDGENRRILINTDIGLPNGLTFDPFSKLLCWADAGTKKLECTLPDGTGRRVIQNNLKYPFSIVSYADHFYHTDWRRDGVVSVNKHSGQFTDEYLPEQRSHLYGITAVYPYCPTGRK

SEQ ID NO: 9371 - protein, 969 aa, Homo sapiens
MEGDRVAGRPVLSSLPVLLLLPLLMLRAAALHPDELFPHGESWGDQLLQEGDDESSAVVKLANPLHFYEARFSNLYVGTNGIISTQDFPRETQYVDYDFPTDFPAIAPFLADIDTSHGRGRVLYRVNGKVSGHLHVGHTPVHFTDVDLHAYIVGNDGRAYTAISHIPQPAAQALLPLTPIGGLFGWLFALEKPGSENGFSLAGAAFTHDMEVTFYPGEETVRITQTAEGLDPENYLSIKTNIQGQVPYVSANFTAHISPYKELYHYSDSTVTSTSSRDYSLTFGAINQTWSYRIHQNITYQVCRHAPRHPSFPTTQQLNVDRVFALYNDEERVLRFAVTNQIGPVKEDSDPTPGNPCYDGSHMCDTTARCHPGTGVDYTCECASGYQGDGRNCVDENECATGFHRCGPNSVCINLPGSYRCECRSGYEFADDRHTCILITPPANPCEDGSHTCAPAGQARCVHHGGSTFSCACLPGYAGDGHQCTDVDECSENRCHPAATCYNTPGSFSCRCQPGYYGDGFQCIPDSTSSLTPCEQQQRHAQAQYAYPGARFHIPQCDEQGNFLPLQCHGSTGFCWCVDPDGHEVPGTQTPPGSTPPHCGPSPEPTQRPPTICERWRENLLEHYGGTPRDDQYVPQCDDLGHFIPLQCHGKSDFCWCVDKDGREVQGTRSQPGTTPACIPTVAPPMVRPTPRPDVTPPSVGTFLLYTQGQQIGYLPLNGTRLQKDAAKTLLSLHGSIIVGIDYDCRERMVYWTDVAGRTISRAGLELGAEPETIVNSGLISPEGLAIDHIRRTMYWTDSVLDKIESALLDGSERKVLFYTDLVNPRAIAVDPIRGNLYWTDWNREAPKIETSSLDGENRRILINTDIGLPNGLTFDPFSKLLCWADAGTKKLECTLPDGTGRRVIQNNLKYPFSIVSYADHFYHTDWRRDGVVSVNKHSGQFTDEYLPEQRSHLYGITAVYPYCPTGRK

SEQ ID NO: 9372 - protein, 644 aa, Homo sapiens
  SITE 1: note = misc_feature - Xaa can be any naturally occurring amino acid
XYSLTFGAINQTWSYRIHQNITYQVCRHAPRHPSFPTTQQLNVDRVFALYNDEERVLRFAVTNQIGPVKEDSDPTPGNPCYDGSHMCDTTARCHPGTGVDYTCECASGYQGDGRNCVDENECATGFHRCGPNSVCINLPGSYRCECRSGYEFADDRHTCIYVDECSENRCHPAATCYNTPGSFSCRCQPGYYGDGFQCIPDSTSSLTPCEQQQRHAQAQYAYPGARFHIPQCDEQGNFLPLQCHGSTGFCWCVDPDGHEVPGTQTPPGSTPPHCGPSPEPTQRPPTICERWRENLLEHYGGTPRDDQYVPQCDDLGHFIPLQCHGKSDFCWCVDKDGREVQGTRSQPGTTPACIPTVAPPMVRPTPRPDVTPPSVGTFLLYTQGQQIGYLPLNGTRLQKDAAKTLLSLHGSIIVGIDYDCRERMVYWTDVAGRTISRAGLELGAEPETIVNSGLISPEGLAIDHIRRTMYWTDSVLDKIESALLDGSERKVLFYTDLVNPRAIAVDPIRGNLYWTDWNREAPKIETSSLDGENRRILINTDIGLPNGLTFDPFSKLLCWADAGTKKLECTLPDGTGRRVIQNNLKYPFSIVSYADHFYHTDWRRDGVVSVNKHSGQFTDEYLPEQRSHLYGITAVYPYCPTGRK

SEQ ID NO: 9373 - protein, 85 aa, Homo sapiens
MELCRSLALLGGSLGLMFCLIALSTDFWFEAVGPTHSAHSGLWPTGHGDIISGHGPLVSTTAAFAAGALSLGAHCGGPRPGYETL

SEQ ID NO: 9374 - protein, 142 aa, Homo sapiens
MELCRSLALLGGSLGLMFCLIALSTDFWFEAVGPTHSAHSGLWPTGHGDIISGHGPLVSTTAAFAAGKDSGLDWGIASQRIPAEELSHLSCPCPQPSPWWWPWRCTPASGGTSLHTPRSRPSSPGPSTWAGSQLSSCSVQVP

SEQ ID NO: 9375 - protein, 165 aa, Homo sapiens
MELCRSLALLGGSLGLMFCLIALSTDFWFEAVGPTHSAHSGLWPTGHGDIISGYIHVTQTFSIMAVLWALVSVSFLVLSCFPSLFPPGHGPLVSTTAAFAAAISMVVAMAVYTSERWDQPPHPQIQTFFSWSFYLGWVSAILLLCTGALSLGAHCGGPRPGYETL

SEQ ID NO: 9376 - protein, 72 aa, Homo sapiens
TGHGDIISAISMVVAMAVYTSERWDQPPHPQIQTFFSWSFYLGWVSAILLLCTGALSLGAHCGGPRPGYETL

SEQ ID NO: 9377 - protein, 89 aa, Homo sapiens
  SITE 1: note = misc_feature - Xaa can be any naturally occurring amino acid
XWPTGHGDIISGHGPLVSTTAAFAAAISMVVAMAVYTSERWDQPPHPQIQTFFSWSFYLGWVSAILLLCTGALSLGAHCGGPRPGYETL

SEQ ID NO: 9378 - protein, 351 aa, Homo sapiens
MLPVWFTANLDIVATYIQEPNEDCLYLNVYVPTEDGSGAKKQGEDLADNDGDEDEDIRDSGAKPVMVYIHGGSYMEGTGNMIDGSILASYGNVIVITLNYRVGVLGFLSTGDQAAKGNYGLLDQIQALRWVSENIAFFGGDPRRITVFGSGIGASCVSLLTLSHHSEGLFQRAIIQSGSALSSWAVNYQPVKYTSLLADKVGCNVLDTVDMVDCLRQKSAKELVEQDIQPARYHVAFGPVIDGDVIPDDPEILMEQGEFLNYDIMLGVNQGEGLKFVEGVVDPEDGVSGTDFDYSVSILWTICMAILRVRTPCERPSSSCIQTGQTVTTLRPAVKHWWHSSLTTSGWSPQW

SEQ ID NO: 9379 - protein, 513 aa, Homo sapiens
MWLRLGPPSLSLSPKPTVGRSLCLTLWFLSLALRASTQAPAPTVNTHFGKLRGARVPLPSEILGPVDQYLGVPYAAPPIGEKRFLPPEPPPSWSGIRNATHFPPVCPQNIHTAVPEVMLPVWFTANLDIVATYIQEPNEDCLYLNVYVPTEDDIRDSGAKPVMVYIHGGSYMEGTGNMIDGSILASYGNVIVITLNYRVGVLGFLSTGDQAAKGNYGLLDQIQALRWVSENIAFFGGDPRRITVFGSGIGASCVSLLTLSHHSEGLFQRAIIQSGSALSSWAVNYQPVKYTSLLADKVGCNVLDTVDMVDCLRQKSAKELVEQDIQPARYHVAFGPVIDGDVIPDDPEILMEQGEFLNYDIMLGVNQGEGLKFVEGVVDPEDGVSGTDFDYSVSNFVDNLYGYPEGKDTLRETIKFMYTDWADRDNPETRRKTLVALFTDHQWVEPSVVTADLHARYGSPTYFYAFYHHCQSLMKPAWSDAAHGDEVPYVFGVPMVGPTDLFPCNFSKNDVML

SEQ ID NO: 9380 - protein, 808 aa, Homo sapiens
MWLRLGPPSLSLSPKPTVGRSLCLTLWFLSLALRASTQAPAPTVNTHFGKLRGARVPLPSEILGPVDQYLGVPYAAPPIGEKRFLPPEPPPSWSGIRNATHFPPVCPQNIHTAVPEVMLPVWFTANLDIVATYIQEPNEDCLYLNVYVPTEDDIRDSGAKPVMVYIHGGSYMEGTGNMIDGSILASYGNVIVITLNYRVGVLGFLSTGDQAAKGNYGLLDQIQALRWVSENIAFFGGDPRRITVFGSGIGASCVSLLTLSHHSEGLFQRAIIQSGSALSSWAVNYQPVKYTSLLADKVGCNVLDTVDMVDCLRQKSAKELVEQDIQPARYHVAFGPVIDGDVIPDDPEILMEQGEFLNYDIMLGVNQGEGLKFVEGVVDPEDGVSGTDFDYSVSNFVDNLYGYPEGKDTLRETIKFMYTDWADRDNPETRRKTLVALFTDHQWVEPSVVTADLHARYGSPTYFYAFYHHCQSLMKPAWSDAAHGDEVPYVFGVPMVGPTDLFPCNFSKNDVMLSAVVMTYWTNFAKTGDPNKPVPQDTKFIHTKANRFEEVAWSKYNPRDQLYLHIGLKPRVRDHYRATKVAFWKHLVPHLYNLHDMFHYTSTTTKVPPPDTTHSSHITRRPNGKTWSTKRPAISPAYSNENAQGSWNGDQDAGPLLVENPRDYSTELSVTIAVGASLLFLNVLAFAALYYRKDKRRQEPLRQPSPQRGAGAPELGAAPEEELAALQLGPTHHECEAGPPHDTLRLTALPDYTLTLRRSPDDIPLMTPNTITMIPNSLVGLQTLHPYNTFAAGFNSTGLPHSHSTTRV

SEQ ID NO: 9381 - protein, 828 aa, Homo sapiens
MWLRLGPPSLSLSPKPTVGRSLCLTLWFLSLALRASTQAPAPTVNTHFGKLRGARVPLPSEILGPVDQYLGVPYAAPPIGEKRFLPPEPPPSWSGIRNATHFPPVCPQNIHTAVPEVMLPVWFTANLDIVATYIQEPNEDCLYLNVYVPTEDGSGAKKQGEDLADNDGDEDEDIRDSGAKPVMVYIHGGSYMEGTGNMIDGSILASYGNVIVITLNYRVGVLGFLSTGDQAAKGNYGLLDQIQALRWVSENIAFFGGDPRRITVFGSGIGASCVSLLTLSHHSEGLFQRAIIQSGSALSSWAVNYQPVKYTSLLADKVGCNVLDTVDMVDCLRQKSAKELVEQDIQPARYHVAFGPVIDGDVIPDDPEILMEQGEFLNYDIMLGVNQGEGLKFVEGVVDPEDGVSGTDFDYSVSNFVDNLYGYPEGKDTLRETIKFMYTDWADRDNPETRRKTLVALFTDHQWVEPSVVTADLHARYGSPTYFYAFYHHCQSLMKPAWSDAAHGDEVPYVFGVPMVGPTDLFPCNFSKNDVMLSAVVMTYWTNFAKTGDPNKPVPQDTKFIHTKANRFEEVAWSKYNPRDQLYLHIGLKPRVRDHYRATKVAFWKHLVPHLYNLHDMFHYTSTTTKVPPPDTTHSSHITRRPNGKTWSTKRPAISPAYSNENAQGSWNGDQDAGPLLVENPRDYSTELSVTIAVGASLLFLNVLAFAALYYRKDKRRQEPLRQPSPQRGAGAPELGAAPEEELAALQLGPTHHECEAGPPHDTLRLTALPDYTLTLRRSPDDIPLMTPNTITMIPNSLVGLQTLHPYNTFAAGFNSTGLPHSHSTTRV

SEQ ID NO: 9382 - protein, 848 aa, Homo sapiens
MWLRLGPPSLSLSPKPTVGRSLCLTLWFLSLALRASTQAPAPTVNTHFGKLRGARVPLPSEILGPVDQYLGVPYAAPPIGEKRFLPPEPPPSWSGIRNATHFPPVCPQNIHTAVPEVMLPVWFTANLDIVATYIQEPNEDCLYLNVYVPTEDVKRISKECARKPNKKICRKGGSGAKKQGEDLADNDGDEDEDIRDSGAKPVMVYIHGGSYMEGTGNMIDGSILASYGNVIVITLNYRVGVLGFLSTGDQAAKGNYGLLDQIQALRWVSENIAFFGGDPRRITVFGSGIGASCVSLLTLSHHSEGLFQRAIIQSGSALSSWAVNYQPVKYTSLLADKVGCNVLDTVDMVDCLRQKSAKELVEQDIQPARYHVAFGPVIDGDVIPDDPEILMEQGEFLNYDIMLGVNQGEGLKFVEGVVDPEDGVSGTDFDYSVSNFVDNLYGYPEGKDTLRETIKFMYTDWADRDNPETRRKTLVALFTDHQWVEPSVVTADLHARYGSPTYFYAFYHHCQSLMKPAWSDAAHGDEVPYVFGVPMVGPTDLFPCNFSKNDVMLSAVVMTYWTNFAKTGDPNKPVPQDTKFIHTKANRFEEVAWSKYNPRDQLYLHIGLKPRVRDHYRATKVAFWKHLVPHLYNLHDMFHYTSTTTKVPPPDTTHSSHITRRPNGKTWSTKRPAISPAYSNENAQGSWNGDQDAGPLLVENPRDYSTELSVTIAVGASLLFLNVLAFAALYYRKDKRRQEPLRQPSPQRGAGAPELGAAPEEELAALQLGPTHHECEAGPPHDTLRLTALPDYTLTLRRSPDDIPLMTPNTITMIPNSLVGLQTLHPYNTFAAGFNSTGLPHSHSTTRV

SEQ ID NO: 9383 - protein, 33 aa, Homo sapiens
MLRPQGLLWLPLLFTSVCVMLNSNVLLWITALA

SEQ ID NO: 9384 - protein, 816 aa, Homo sapiens
MLRPQGLLWLPLLFTSVCVMLNSNVLLWITALAIKFTLIDSQAQYPVVNTNYGKIQGLRTPLPSEILGPVEQYLGVPYASPPTGERRFQPPESPSSWTGIRNATQFSAVCPQHLDERFLLHDMLPIWFTTSLDTLMTYVQDQNEDCLYLNIYVPMEDDIHEQNSKKPVMVYIHGGSYMEGTGNMIDGSILASYGNVIVITINYRLGILGFLSTGDQAAKGNYGLLDQIQALRWIEENVGAFGGDPKRVTIFGSGAGASCVSLLTLSHYSEGLFQKAIIQSGTALSSWAVNYQPAKYTRILADKVGCNMLDTTDMVECLKNKNYKELIQQTITPATYHIAFGPVIDGDVIPDDPQILMEQGEFLNYDIMLGVNQGEGLKFVDGIVDNEDGVTPNDFDFSVSNFVDNLYGYPEGKDTLRETIKFMYTDWADKENPETRRKTLVALFTDHQWVAPAVATADLHAQYGSPTYFYAFYHHCQSEMKPSWADSAHGDEVPYVFGIPMIGPTELFSCNFSKNDVMLSAVVMTYWTNFAKTGDPNQPVPQDTKFIHTKPNRFEEVAWSKYNPKDQLYLHIGLKPRVRDHYRATKVAFWLELVPHLHNLNEIFQYVSTTTKVPPPDMTSFPYGTRRSPAKIWPTTKRPAITPANNPKHSKDPHKTGPEDTTVLIETKRDYSTELSVTIAVGASLLFLNILAFAALYYKKDKRRHETHRHPSPQRNTTNDITHIQNEEIMSLQMKQLEHDHECESLQAHDTLRLTCPPDYTLTLRRSPDDIPFMTPNTITMIPNTLMGMQPLHTFKTFSGGQNSTNLPHGHSTTRV

SEQ ID NO: 9385 - protein, 816 aa, Homo sapiens; identical to SEQ ID NO: 9384

SEQ ID NO: 9386 - protein, 873 aa, Homo sapiens
MLRPQGLLWLPLLFTSVCVMLNSNVLLWITALAIKFTLIDSQAQYPVVNTNYGKIQGLRTPLPSEILGPVEQYLGVPYASPPTGERRFQPPESPSSWTGIRNATQFSAVCPQHLDERFLLHDMLPIWFTTSLDTLMTYVQDQNEDCLYLNIYVPMEDGTNIKRNADDITSNDHGEDKDIHEQNSKKPVMVYIHGGSYMEGTGNMIDGSILASYGNVIVITINYRLGILAQNTLAHGNCKHRCQLHLQAPRDCKSAYPFRNEDEIRGFLSTGDQAAKGNYGLLDQIQALRWIEENVGAFGGDPKRVTIFGSGAGASCVSLLTLSHYSEGLFQKAIIQSGTALSSWAVNYQPAKYTRILADKVGCNMLDTTDMVECLKNKNYKELIQQTITPATYHIAFGPVIDGDVIPDDPQILMEQGEFLNYDIMLGVNQGEGLKFVDGIVDNEDGVTPNDFDFSVSNFVDNLYGYPEGKDTLRETIKFMYTDWADKENPETRRKTLVALFTDHQWVAPAVATADLHAQYGSPTYFYAFYHHCQSEMKPSWADSAHGDEVPYVFGIPMIGPTELFSCNFSKNDVMLSAVVMTYWTNFAKTGDPNQPVPQDTKFIHTKPNRFEEVAWSKYNPKDQLYLHIGLKPRVRDHYRATKVAFWLELVPHLHNLNEIFQYVSTTTKVPPPDMTSFPYGTRRSPAKIWPTTKRPAITPANNPKHSKDPHKTGPEDTTVLIETKRDYSTELSVTIAVGASLLFLNILAFAALYYKKDKRRHETHRHPSPQRNTTNDITHIQNEEIMSLQMKQLEHDHECESLQAHDTLRLTCPPDYTLTLRRSPDDIPFMTPNTITMIPNTLMGMQPLHTFKTFSGGQNSTNLPHGHSTTRV

SEQ ID NO: 9387 - protein, 836 aa, Homo sapiens
MLRPQGLLWLPLLFTSVCVMLNSNVLLWITALAIKFTLIDSQAQYPVVNTNYGKIQGLRTPLPSEILGPVEQYLGVPYASPPTGERRFQPPESPSSWTGIRNATQFSAVCPQHLDERFLLHDMLPIWFTTSLDTLMTYVQDQNEDCLYLNIYVPMEDGTNIKRNADDITSNDHGEDKDIHEQNSKKPVMVYIHGGSYMEGTGNMIDGSILASYGNVIVITINYRLGILGFLSTGDQAAKGNYGLLDQIQALRWIEENVGAFGGDPKRVTIFGSGAGASCVSLLTLSHYSEGLFQKAIIQSGTALSSWAVNYQPAKYTRILADKVGCNMLDTTDMVECLKNKNYKELIQQTITPATYHIAFGPVIDGDVIPDDPQILMEQGEFLNYDIMLGVNQGEGLKFVDGIVDNEDGVTPNDFDFSVSNFVDNLYGYPEGKDTLRETIKFMYTDWADKENPETRRKTLVALFTDHQWVAPAVATADLHAQYGSPTYFYAFYHHCQSEMKPSWADSAHGDEVPYVFGIPMIGPTELFSCNFSKNDVMLSAVVMTYWTNFAKTGDPNQPVPQDTKFIHTKPNRFEEVAWSKYNPKDQLYLHIGLKPRVRDHYRATKVAFWLELVPHLHNLNEIFQYVSTTTKVPPPDMTSFPYGTRRSPAKIWPTTKRPAITPANNPKHSKDPHKTGPEDTTVLIETKRDYSTELSVTIAVGASLLFLNILAFAALYYKKDKRRHETHRHPSPQRNTTNDITHIQNEEIMSLQMKQLEHDHECESLQAHDTLRLTCPPDYTLTLRRSPDDIPFMTPNTITMIPNTLMGMQPLHTFKTFSGGQNSTNLPHGHSTTRV

SEQ ID NO: 9388 - protein, 648 aa, Homo sapiens
MVYIHGGSYMEGTGNMIDGSILASYGNVIVITINYRLGILGFLSTGDQAAKGNYGLLDQIQALRWIEENVGAFGGDPKRVTIFGSGAGASCVSLLTLSHYSEGLFQKAIIQSGTALSSWAVNYQPAKYTRILADKVGCNMLDTTDMVECLKNKNYKELIQQTITPATYHIAFGPVIDGDVIPDDPQILMEQGEFLNYDIMLGVNQGEGLKFVDGIVDNEDGVTPNDFDFSVSNFVDNLYGYPEGKDTLRETIKFMYTDWADKENPETRRKTLVALFTDHQWVAPAVATADLHAQYGSPTYFYAFYHHCQSEMKPSWADSAHGDEVPYVFGIPMIGPTELFSCNFSKNDVMLSAVVMTYWTNFAKTGDPNQPVPQDTKFIHTKPNRFEEVAWSKYNPKDQLYLHIGLKPRVRDHYRATKVAFWLELVPHLHNLNEIFQYVSTTTKVPPPDMTSFPYGTRRSPAKIWPTTKRPAITPANNPKHSKDPHKTGPEDTTVLIETKRDYSTELSVTIAVGASLLFLNILAFAALYYKKDKRRHETHRHPSPQRNTTNDITHIQNEEIMSLQMKQLEHDHECESLQAHDTLRLTCPPDYTLTLRRSPDDIPFMTPNTITMIPNTLMGMQPLHTFKTFSGGQNSTNLPHGHSTTRV

SEQ ID NO: 9389 - protein, 236 aa, Homo sapiens
  SITE 1: note = misc_feature - Xaa can be any naturally occurring amino acid
XNSNVLLWITALAIKFTLIDSQAQYPVVNTNYGKIQGLRTPLPSEILGPVEQYLGVPYASPPTGERRFQPPESPSSWTGIRNATQFSAVCPQHLDERFLLHDMLPIWFTTSLDTLMTYVQDQNEDCLYLNIYVPMEDGTNIKRNADDITSNDHGEDKDIHEQNSKKPVMVYIHGGSYMEGTGNMIDGSILASYGNVIVITINYRLGILGMQEARLCGSSKMFNYFKSPFTNLINFF

SEQ ID NO: 9390 - protein, 178 aa, Homo sapiens
GPTCSILPKNPLFPQNLSSQPCIKMEGDKSLTFSSYGLQWCLYELDKEEFQTFKELLKKKSSESTTCSIPQFEIENANVECLALLLHEYYGASLAWATSISIFENMNLRTLSEKARDDMKRHSPEDPEATMTDQGPSKEKVPGISQAVQQDSATAAETKEQESFAVLLRLQCSGYPQA

SEQ ID NO: 9391 - protein, 1200 aa, Homo sapiens
MKVAGGLELGAAALLSASPRALVTLSTGPTCSILPKNPLFPQNLSSQPCIKMEGDKSLTFSSYGLQWCLYELDKEEFQTFKELLKKKSSESTTCSIPQFEIENANVECLALLLHEYYGASLAWATSISIFENMNLRTLSEKARDDMKRHSPEDPEATMTDQGPSKEKVPDISDSNNKHKYVGIHSSFAEISQAMEQEGATAAETEEQEISQAMEQEGATAAETEEQGHGGDTWDYKSHVMTKFAEEEDVRRSFENTAADWPEMQTLAGAFDSDRWGFRPRTVVLHGKSGIGKSALARRIVLCWAQGGLYQGMFSYVFFLPVREMQRKKESSVTEFISREWPDSQAPVTEIMSRPERLLFIIDGFDDLGSVLNNDTKLCKDWAEKQPPFTLIRSLLRKVLLPESFLIVTVRDVGTEKLKSEVVSPRYLLVRGISGEQRIHLLLERGIGEHQKTQGLRAIMNNRELLDQCQVPAVGSLICVALQLQDVVGESVAPFNQTLTGLHAAFVFHQLTPRGVVRRCLNLEERVVLKRFCRMAVEGVWNRKSVFDGDDLMVQGLGESELRALFHMNILLPDSHCEEYYTFFHLSLQDFCAALYYVLEGLEIEPALCPLYVEKTKRSMELKQAGFHIHSLWMKRFLFGLVSEDVRRPLEVLLGCPVPLGVKQKLLHWVSLLGQQPNATTPGDTLDAFHCLFETQDKEFVRLALNSFQEVWLPINQNLDLIASSFCLQHCPYLRKIRVDVKGIFPRDESAEACPVVPLWMRDKTLIEEQWEDFCSMLGTHPHLRQLDLGSSILTERAMKTLCAKLRHPTCKIQTLMFRNAQITPGVQHLWRIVMANRNLRSLNLGGTHLKEEDVRMACEALKHPKCLLESLRLDCCGLTHACYLKISQILTTSPSLKSLSLAGNKVTDQGVMPLSDALRVSQCALQKLILEDCGITATGCQSLASALVSNRSLTHLCLSNNSLGNEGVNLLCRSMRLPHCSLQRLMLNQCHLDTAGCGFLALALMGNSWLTHLSLSMNPVEDNGVKLLCEVMREPSCHLQDLELVKCHLTAACCESLSCVISRSRHLKSLDLTDNALGDGGVAALCEGLKQKNSVLARLGLKACGLTSDCCEALSLALSCNRHLTSLNLVQNNFSPKGMMKLCSAFACPTSNLQIIGLWKWQYPVQIRKLLEEVQLLKPRVVIDGSWHSFDEDDRYWWKN

SEQ ID NO: 9392 - protein, 1200 aa, Homo sapiens
MKVAGGLELGAAALLSASPRALVTLSTGPTCSILPKNPLFPQNLSSQPCIKMEGDKSLTFSSYGLQWCLYELDKEEFQTFKELLKKKSSESTTCSIPQFEIENANVECLALLLHEYYGASLAWATSISIFENMNLRTLSEKARDDMKRHSPEDPEATMTDQGPSKEKVPGISQAVQQDSATAAETKEQEISQAMEQEGATAAETEEQEISQAMEQEGATAAETEEQGHGGDTWDYKSHVMTKFAEEEDVRRSFENTAADWPEMQTLAGAFDSDRWGFRPRTVVLHGKSGIGKSALARRIVLCWAQGGLYQGMFSYVFFLPVREMQRKKESSVTEFISREWPDSQAPVTEIMSRPERLLFIIDGFDDLGSVLNNDTKLCKDWAEKQPPFTLIRSLLRKVLLPESFLIVTVRDVGTEKLKSEVVSPRYLLVRGISGEQRIHLLLERGIGEHQKTQGLRAIMNNRELLDQCQVPAVGSLICVALQLQDVVGESVAPFNQTLTGLHAAFVFHQLTPRGVVRRCLNLEERVVLKRFCRMAVEGVWNRKSVFDGDDLMVQGLGESELRALFHMNILLPDSHCEEYYTFFHLSLQDFCAALYYVLEGLEIEPALCPLYVEKTKRSMELKQAGFHIHSLWMKRFLFGLVSEDVRRPLEVLLGCPVPLGVKQKLLHWVSLLGQQPNATTPGDTLDAFHCLFETQDKEFVRLALNSFQEVWLPINQNLDLIASSFCLQHCPYLRKIRVDVKGIFPRDESAEACPVVPLWMRDKTLIEEQWEDFCSMLGTHPHLRQLDLGSSILTERAMKTLCAKLRHPTCKIQTLMFRNAQITPGVQHLWRIVMANRNLRSLNLGGTHLKEEDVRMACEALKHPKCLLESLRLDCCGLTHACYLKISQILTTSPSLKSLSLAGNKVTDQGVMPLSDALRVSQCALQKLILEDCGITATGCQSLASALVSNRSLTHLCLSNNSLGNEGVNLLCRSMRLPHCSLQRLMLNQCHLDTAGCGFLALALMGNSWLTHLSLSMNPVEDNGVKLLCEVMREPSCHLQDLELVKCHLTAACCESLSCVISRSRHLKSLDLTDNALGDGGVAALCEGLKQKNSVLARLGLKACGLTSDCCEALSLALSCNRHLTSLNLVQNNFSPKGMMKLCSAFACPTSNLQIIGLWKWQYPVQIRKLLEEVQLLKPRVVIDGSWHSFDEDDRYWWKN

SEQ ID NO: 9393 - protein, 154 aa, Homo sapiens
MARRAGGARMFGSLLLFALLAAGVAPLSWDLPEPRSRASKIRVHSRGNLWATGHFMGKKSLEPSSPSPLGTAPHTSLRDQRLQLSHDLLGILLLKKALGVSLSRPAPQIQEAAGTNTAEMTPIMGQTQQRGLDCAHPGKVLNGTLLMAPSGCKS

SEQ ID NO: 9394 - protein, 121 aa, Homo sapiens
MARRAGGARMFGSLLLFALLAAGVAPLSWDLPEPRSRASKIRVHSRGNLWATGHFMGKKSLEPSSPSPLGTAPHTSLRDQRLQLSHDLLGILLLKKALGVSLSRPAPQIQYRRLLVQILQK

SEQ ID NO: 9395 - protein, 82 aa, Homo sapiens
MANCERTFIAIKPDGVQRGLVGEIIKRFEQKGFRLVGLKFMQASEDLLKEHYVDLKDRPFFAGLVKYMHSGPVVAMLPDFLL

SEQ ID NO: 9396 - protein, 82 aa, Homo sapiens; identical to SEQ ID NO: 9395

SEQ ID NO: 9397 - protein, 152 aa, Homo sapiens
MANCERTFIAIKPDGVQRGLVGEIIKRFEQKGFRLVGLKFMQASEDLLKEHYVDLKDRPFFAGLVKYMHSGPVVAMVWEGLNVVKTGRVMLGETNPADSKPGTIRGDFCIQVGRNIIHGSDSVESAEKEIGLWFHPEELVDYTSCAQNWIYE

SEQ ID NO: 9398 - protein, 60 aa, Homo sapiens
MVLLSTLGIVFQGEGPPISSCDTGTMANCERTFIAIKPDGVQRGLVGEIIKRFEQKGFRL

SEQ ID NO: 9399 - protein, 139 aa, Homo sapiens
MVLLSTLGIVFQGEGPPISSCDTGTMANCERTFIAIKPDGVQRGLVGEIIKRFEQKGFRLVGLKFMQASEDLLKEHYVDLKDRPFFAGLVKYMHSGPVVAMVWEGLNVVKTGRVMLGETNPADSKPGTIRGDFCIQVGR

SEQ ID NO: 9400 - protein, 177 aa, Homo sapiens
MVLLSTLGIVFQGEGPPISSCDTGTMANCERTFIAIKPDGVQRGLVGEIIKRFEQKGFRLVGLKFMQASEDLLKEHYVDLKDRPFFAGLVKYMHSGPVVAMVWEGLNVVKTGRVMLGETNPADSKPGTIRGDFCIQVGRNIIHGSDSVESAEKEIGLWFHPEELVDYTSCAQNWIYE

SEQ ID NO: 9401 - protein, 177 aa, Homo sapiens; identical to SEQ ID NO: 9400

SEQ ID NO: 9402 - protein, 197 aa, Homo sapiens
MANCERTFIAIKPDGVQRGLVGEIIKRFEQKGFRLVGLKFMQASEDLLKEHYVDLKDRPFFAGLVKYMHSGPVVAMVWEGLNVVKTGRVMLGETNPADSKPGTIRGDFCIQVGRTMANLERTFIAIKPDGVQRGLVGEIIKRFEQKGFRLVAMKFLRASEEHLKQHYIDLKDRPFFPGLVKYMNSGPVVAMEHHSWQ

SEQ ID NO: 9403 - protein, 267 aa, Homo sapiens
MANCERTFIAIKPDGVQRGLVGEIIKRFEQKGFRLVGLKFMQASEDLLKEHYVDLKDRPFFAGLVKYMHSGPVVAMVWEGLNVVKTGRVMLGETNPADSKPGTIRGDFCIQVGRTMANLERTFIAIKPDGVQRGLVGEIIKRFEQKGFRLVAMKFLRASEEHLKQHYIDLKDRPFFPGLVKYMNSGPVVAMVWEGLNVVKTGRVMLGETNPADSKPGTIRGDFCIQVGRNIIHGSDSVKSAEKEISLWFKPEELVDYKSCAHDWVYE

SEQ ID NO: 9404 - protein, 292 aa, Homo sapiens
MVLLSTLGIVFQGEGPPISSCDTGTMANCERTFIAIKPDGVQRGLVGEIIKRFEQKGFRLVGLKFMQASEDLLKEHYVDLKDRPFFAGLVKYMHSGPVVAMVWEGLNVVKTGRVMLGETNPADSKPGTIRGDFCIQVGRTMANLERTFIAIKPDGVQRGLVGEIIKRFEQKGFRLVAMKFLRASEEHLKQHYIDLKDRPFFPGLVKYMNSGPVVAMVWEGLNVVKTGRVMLGETNPADSKPGTIRGDFCIQVGRNIIHGSDSVKSAEKEISLWFKPEELVDYKSCAHDWVYE

SEQ ID NO: 9405 - protein, 53 aa, Homo sapiens
FANLFPAACTGAHERTFLAVKPDGVQRRLVGEIVRRFERKGFKLVALKLVQAA

SEQ ID NO: 9406 - protein, 57 aa, Homo sapiens
IFANLFPAACTGAHERTFLAVKPDGVQRRLVGEIVRRFERKGFKRPDPSAGLRGAAA

SEQ ID NO: 9407 - protein, 85 aa, Homo sapiens
MASGPVVAMVWQGLDVVRTSRALIGATNPADAPPGTIRGDFCIEVGKNLIHGSDSVESARREIALWFRADELLCWEDSAGHWLYE

SEQ ID NO: 9408 - protein, 169 aa, Homo sapiens
MICLVLTIFANLFPAACTGAHERTFLAVKPDGVQRRLVGEIVRRFERKGFKLVALKLVQASEELLREHYAELRERPFYGRLVKYMASGPVVAMVWQGLDVVRTSRALIGATNPADAPPGTIRGDFCIEVGKNLIHGSDSVESARREIALWFRADELLCWEDSAGHWLYE

SEQ ID NO: 9409 - protein, 123 aa, Homo sapiens
PAACTGAHERTFLAVKPDGVQRRLVGEIVRRFERKGFKLVALKLVQVGARPPRSCCVSTTPSCVNARSTAALSSIWPPGRWWPWYGRGWTWCAPRGRSSEPRTRPTPRPAPSAGISASRLART

SEQ ID NO: 9410 - protein, 153 aa, Homo sapiens
MKHLRPQFPLILAIYCFCMLQIPSSGFPQPLADPSDGLDIVQLEQLAYCLSQWAPLSRQPKDNQDIYKRFLFHYSRTQEATHPVKTGFPPVHPLMHLAAKLANRRMKRILQRGSGTAAVDFTKKDHTATWGRPFFLFRPRNGRNIEDEAQIQW

SEQ ID NO: 9411 - protein, 158 aa, Homo sapiens
MLRTESCRPRSPAGQVAAASPLLLLLLLLAWCAGACRGAPILPQGLQPEQQLQLWNEASNALEELCFMIMGMLPKPQEQDEKDNTKRFLFHYSKTQKLGKSNVVSSVVHPLLQLVPHLHERRMKRFRVDEEFQSPFASQSRGYFLFRPRNGRRSAGFI

SEQ ID NO: 9412 - protein, 149 aa, Homo sapiens
MLRTESCRPRSPAGQVAAASPLLLLLLLLAWCAGACRGAPILPQGLQPEQQLQLWNEIDDTCSSFLSIDSQPQASNALEELCFMIMGMLPKPQEQDEKDNTKRFLFHYSKTQKLGKSNVVEEFQSPFASQSRGYFLFRPRNGRRSAGFI

SEQ ID NO: 9413 - protein, 174 aa, Homo sapiens
MLRTESCRPRSPAGQVAAASPLLLLLLLLAWCAGACRGAPILPQGLQPEQQLQLWNEIDDTCSSFLSIDSQPQASNALEELCFMIMGMLPKPQEQDEKDNTKRFLFHYSKTQKLGKSNVVSSVVHPLLQLVPHLHERRMKRFRVDEEFQSPFASQSRGYFLFRPRNGRRSAGFI

SEQ ID NO: 9414 - protein, 147 aa, Homo sapiens
MLRTESCRPRSPAGQVAAASPLLLLLLLLAWCAGACRGAPILPQGLQPEQQLQLWNEIDDTCSSFLSIDSQPQASNALEELCFMIMGMLPKPQSSVVHPLLQLVPHLHERRMKRFRVDEEFQSPFASQSRGYFLFRPRNGRRSAGFI

SEQ ID NO: 9415 - protein, 698 aa, Homo sapiens
MLPARLPFRLLSLFLRGSAPTAARHGLREPLLERRCAAASSFQHSSSLGRELPYDPVDTEGFGEGGDMQERFLFPEYILDPEPQPTREKQLQELQQQQEEEERQRQQRREERRQQNLRARSREHPVVGHPDPALPPSGVNCSGCGAELHCQDAGVPGYLPREKFLRTAEADGGLARTVCQRCWLLSHHRRALRLQVSREQYLELVSAALRRPGPSLVLYMVDLLDLPDALLPDLPALVGPKQLIVLGNKVDLLPQDAPGYRQRLRERLWEDCARAGLLLAPGHQGPQRPVKDEPQDGENPNPPNWSRTVVRDVRLISAKTGYGVEELISALQRSWRYRGDVYLVGATNAGKSTLFNTLLESDYCTAKGSEAIDRATISPWPGTTLNLLKFPICNPTPYRMFKRHQRLKKDSTQAEEDLSEQEQNQLNVLKKHGYVVGRVGRTFLYSEEQKDNIPFEFDADSLAFDMENDPVMGTHKSTKQVELTAQDVKDAHWFYDTPGITKENCILNLLTEKEVNIVLPTQSIVPRTFVLKPGMVLFLGAIGRIDFLQGNQSAWFTVVASNILPVHITSLDRADALYQKHAGHTLLQIPMGGKERMAGFPPLVAEDIMLKEGLGASEAVADIKFSSAGWVSVTPNFKDRLHLRGYTPEGTVLTVRPPLLPYIVNIKGQRIKKSVAYKTKKPPSLMYNVRKKKGKINV

SEQ ID NO: 9416 - protein, 292 aa, Homo sapiens
DQQLGIQTKDVAVDGQNWTFAFDFSFLSQQEDLAWAELRLQLSSPVDLPTEGSLAIEIFHQPKPDTEQASDSCLERFQMDLFTVTLSQVTFSLGSMVLEVTRPLSKWLKHPGALEKQMSRVAGECWPRPPTPPATNVLLMLYSNLSQEQRQLGGSTLLWEAESSWRAQEGQLSWEWGKRHRRHHLPDRSQLCRKVKFQVDFNLIGWGSWIIYPKQYNAYRCEGECPNPVGEEFHPTNHAYIQSLLKRYQPHRVPSTCCAPVKTKPLSMLYVDNGRVLLDHHKDMIVEECGCL

SEQ ID NO: 9417 - protein, 347 aa, Homo sapiens
MHAHCLPFLLHAWWALLQAGAATVATALLRTRGQPSSPSPLAYMLSLYRDPLPRADIIRSLQAEDVAVDGQNWTFAFDFSFLSQQEDLAWAELRLQLSSPVDLPTEGSLAIEIFHQPKPDTEQASDSCLERFQMDLFTVTLSQVTFSLGSMVLEVTRPLSKWLKHPGALEKQMSRVAGECWPRPPTPPATNVLLMLYSNLSQEQRQLGGSTLLWEAESSWRAQEGQLSWEWGKRHRRHHLPDRSQLCRKVKFQVDFNLIGWGSWIIYPKQYNAYRCEGECPNPVGEEFHPTNHAYIQSLLKRYQPHRVPSTCCAPVKTKPLSMLYVDNGRVLLDHHKDMIVEECGCL

SEQ ID NO: 9418 - protein, 232 aa, Homo sapiens
MERCPSLGVTLYALVVVLGLRATPAGGQHYLHIRPAPSDNLPLVDLIEHPDPIFDPKEKDLNETLLRSLLGGHYDPGFMATSPPEDRPGGGGGAAGGAEDLAELDQLLRQRPSGAMPSEIKGLEFSEGLAQGKKQRLSKKLRRKLQMWLWSQTFCPVLYAWNDLGSRFWPRYVKVGSCFSKRSCSVPEGMVCKPSKSVHLTVLRWRCQRRGGQRCGWIPIQYPIISECKCSC

SEQ ID NO: 9419 - protein, 138 aa, Homo sapiens
MLVGQGAGPLGPAVVTAAVVLLLSGVGPAHGSEDIVVGCGGFVKSDVEINYSLIEIKLYTKHGTLKYQTDCAPNNGYFMIPLYDKGDFILKIEPPLGWSFEPTTVELHVDGVSDICTKGGDINFVFTGFSVNGKVCIF

SEQ ID NO: 9420 - protein, 1267 aa, Homo sapiens
MLVGQGAGPLGPAVVTAAVVLLLSGVGPAHGSEDIVVGCGGFVKSDVEINYSLIEIKLYTKHGTLKYQTDCAPNNGYFMIPLYDKGDFILKIEPPLGWSFEPTTVELHVDGVSDICTKGGDINFVFTGFSVNGKVLSKGQPLGPAGVQVSLRNTGTEAKIQSTVTQPGGKFAFFKVLPGDYEILATHPTWALKEASTTVRVTNSNANAASPLIVAGYNVSGSVRSDGEPMKGVKFLLFSSLVTKEDVLGCNVSPVPGFQPQDESLVYLCYTVSREDGSFSFYSLPSGGYTVIPFYRGERITFDVAPSRLDFTVEHDSLKIEPVFHVMGFSVTGRVLNGPEGDGVPEAVVTLNNQIKVKTKADGSFRLENITTGTYTIHAQKEHLYFETVTIKIAPNTPQLADIVATGFSVCGQISIIRFPDTVKQMNKYKVVLSSQDKDKSLVTVETDAHGSFCFKANPGTYKVQVMVPEAETRAGLTLKPQTFPLTVTDRPVMDVAFVQFLASVSGKVSCLDTCGDLLVTLQSLSRQGEKRSLQLSGKVNAMTFTFDNVLPGKYKISIMHEDWCWKNKSLEVEVLEDDVSAVEFRQTGYMLRCSLSHAITLEFYQDGNGRENVGIYNLSKGVNRFCLSKPGVYKVTPRSCHRFEQAFYTYDTSSPSILTLTAIRHHVLGTITTDKMMDVTVTIKSSIDSEPALVLGPLKSVQELRREQQLAEIEARRQEREKNGNEEGEERMTKPPVQEMVDELQGPFSYDFSYWARSGEKITVTPSSKELLFYPPSMEAVVSGESCPGKLIEIHGKAGLFLEGQIHPELEGVEIVISEKGASSPLITVFTDDKGAYSVGPLHSDLEYTVTSQKEGYVLTAVEGTIGDFKAYALAGVSFEIKAEDDQPLPGVLLSLSGGLFRSNLLTQDNGILTFSNLSPGQYYFKPMMKEFRFEPSSQMIEVQEGQNLKITITGYRTAYSCYGTVSSLNGEPEQGVAMEAVGQNDCSIYGEDTVTDEEGKFRLRGLLPGCVYHVQLKAEGNDHIERALPHHRVIEVGNNDIDDVNIIVFRQINQFDLSGNVITSSEYLPTLWVKLYKSENLDNPIQTVSLGQSLFFHFPPLLRDGENYVVLLDSTLPRSQYDYILPQVSFTAVGYHKHITLIFNPTRKLPEQDIAQGSYIALPLTLLVLLAGYNHDKLIPLLLQLTSRLQGVGALGQAASDNSGPEDAKRQAKKQKTRRTLRLQEEFQLMWCLVPWRGTLGIHLFSSLPFASEILLETTATCIHY

SEQ ID NO: 9421 - protein, 1222 aa, Homo sapiens
MLVGQGAGPLGPAVVTAAVVLLLSGVGPAHGSEDIVVGCGGFVKSDVEINYSLIEIKLYTKHGTLKYQTDCAPNNGYFMIPLYDKGDFILKIEPPLGWSFEPTTVELHVDGVSDICTKGGDINFVFTGFSVNGKVLSKGQPLGPAGVQVSLRNTGTEAKIQSTVTQPGGKFAFFKVLPGDYEILATHPTWALKEASTTVRVTNSNANAASPLIVAGYNVSGSVRSDGEPMKGVKFLLFSSLVTKEDVLGCNVSPVPGFQPQDESLVYLCYTVSREDGSFSFYSLPSGGYTVIPFYRGERITFDVAPSRLDFTVEHDSLKIEPVFHVMGFSVTGRVLNGPEGDGVPEAVVTLNNQIKVKTKADGSFRLENITTGTYTIHAQKEHLYFETVTIKIAPNTPQLADIVATGFSVCGQISIIRFPDTVKQMNKYKVVLSSQDKDKSLVTVETDAHGSFCFKANPGTYKVQVMVPEAETRAGLTLKPQTFPLTVTDRPVMDVAFVQFLASVSGKVSCLDTCGDLLVTLQSLSRQGEKRSLQLSGKVNAMTFTFDNVLPGKYKISIMHEDWCWKNKSLEVEVLEDDVSAVEFRQTGYMLRCSLSHAITLEFYQDGNGRENVGIYNLSKGVNRFCLSKPGVYKVTPRSCHRFEQAFYTYDTSSPSILTLTAIRHHVLGTITTDKMMDVTVTIKSSIDSEPALVLGPLKSVQELRREQQLAEIEARRQEREKNGNEEGEERMTKPPVQEMVDELQGPFSYDFSYWARSGEKITVTPSSKELLFYPPSMEAVVSGESCPGKLIEIHGKAGLFLEGQIHPELEGVEIVISEKGASSPLITVFTDDKGAYSVGPLHSDLEYTVTSQKEGYVLTAVEGTIGDFKAYALAGVSFEIKAEDDQPLPGVLLSLSGGLFRSNLLTQDNGILTFSNLSPGQYYFKPMMKEFRFEPSSQMIEVQEGQNLKITITGYRTAYSCYGTVSSLNGEPEQGVAMEAVGQNDCSIYGEDTVTDEEGKFRLRGLLPGCVYHVQLKAEGNDHIERALPHHRVIEVGNNDIDDVNIIVFRQINQFDLSGNVITSSEYLPTLWVKLYKSENLDNPIQTVSLGQSLFFHFPPLLRDGENYVVLLDSTLPRSQYDYILPQVSFTAVGYHKHITLIFNPTRKLPEQDIAQGSYIALPLTLLVLLAGYNHDKLIPLLLQLTSRLQGVGALGQAASDNSGPEDAKRQAKKQKTRRT

SEQ ID NO: 9422 - protein, 61 aa, Homo sapiens
MLVGQGAGPLGPAVVTAAVVLLLSGVGPAHGSEDIVVGCGGFVKSDVEINYSLIEQVLNMH

SEQ ID NO: 9423 - protein, 95 aa, Homo sapiens
  SITE 1: note = misc_feature - Xaa can be any naturally occurring amino acid
XEDWCWKNKSLEVEVLEDDVSAVEFRQTGYMLRCSLSHAITLVQPYCSGEMCPGTSELKTPRNFIRMEMGVRMWGFITSPKESTDSACPSLVCTK

SEQ ID NO: 9424 - protein, 50 aa, Homo sapiens
  SITE 1: note = misc_feature - Xaa can be any naturally occurring amino acid
XSYIALPLTLLVLLAGYNHDKGHIRPGERPAHPWGLISKRPASFELKPTH

SEQ ID NO: 9425 - protein, 80 aa, Homo sapiens
  SITE 1: note = misc_feature - Xaa can be any naturally occurring amino acid
XTGYMLRCSLSHAITLVCTAYGVSYLEKRLPCGCQERLTSQEYCKRRNFIRMEMGVRMWGFITSPKESTDSACPSLVCTK

SEQ ID NO: 9426 - protein, 81 aa, Homo sapiens
MLQHISLLVKQVQELELKLSGQNAMGSQDSLLEITFRSGALPVLCDPTTPKPEDLHSPPLGAGLADFAHPAGSPLGRRDCL

SEQ ID NO: 9427 - protein, 349 aa, Homo sapiens
MPSKTKYNLVDDGHDLRIPLHNEDAFQHGICFEAKYVGSLDVPRPNSRVEIVAAMRRIRYEFKAKNIKKKKVSIMVSVDGVKVILKKKKKKKEWTWDESKMLVMQDPIYRIFYVSHDSQDLKIFSYIARDGASNIFRCNVFKSKKKSQAMRIVRTVGQAFEVCHKLSLQHTQQNADGQEDGESERNSNSSGDPGRQLTGAERASTATAEETDIDAVEVPLPGNDVLEFSRGVTDLDAVGKEGGSHTGSKVSHPQEPMLTASPRMLLPSSSSKPPGLGTETPLSTHHQMQLLQQLLQQQQQQTQVAVAQCVVGQIALVLSTAISMCLLLPNFSLALPSLLMEELESRYTC

SEQ ID NO: 9428 - protein, 501 aa, Homo sapiens
MPSKTKYNLVDDGHDLRIPLHNEDAFQHGICFEAKYVGSLDVPRPNSRVEIVAAMRRIRYEFKAKNIKKKKVSIMVSVDGVKVILKKKKKKKEWTWDESKMLVMQDPIYRIFYVSHDSQDLKIFSYIARDGASNIFRCNVFKSKKKSQAMRIVRTVGQAFEVCHKLSLQHTQQNADGQEDGESERNSNSSGDPGRQLTGAERASTATAEETDIDAVEVPLPGNDVLEFSRGVTDLDAVGKEGGSHTGSKVSHPQEPMLTASPRMLLPSSSSKPPGLGTETPLSTHHQMQLLQQLLQQQQQQTQVAVAQVHLLKDQLAAEAAARLEAQARVHQLLLQNKDMLQHISLLVKQVQELELKLSGQNAMGSQDSLLEITFRSGALPVLCDPTTPKPEDLHSPPLGAGLADFAHPAGSPLGRRDCLVKLECFRFLPPEDTPPPAQGEALLGGLELIKFRESGIASEYESNTDESEERDSWSQEELPRLLNVLQRQELGDGLDDEIAV

SEQ ID NO: 9429 - protein, 506 aa, Homo sapiens
MPSKTKYNLVDDGHDLRIPLHNEDAFQHGICFEAKYVGSLDVPRPNSRVEIVAAMRRIRYEFKAKNIKKKKVSIMVSVDGVKVILKKKKKLLLLQKKEWTWDESKMLVMQDPIYRIFYVSHDSQDLKIFSYIARDGASNIFRCNVFKSKKKSQAMRIVRTVGQAFEVCHKLSLQHTQQNADGQEDGESERNSNSSGDPGRQLTGAERASTATAEETDIDAVEVPLPGNDVLEFSRGVTDLDAVGKEGGSHTGSKVSHPQEPMLTASPRMLLPSSSSKPPGLGTETPLSTHHQMQLLQQLLQQQQQQTQVAVAQVHLLKDQLAAEAAARLEAQARVHQLLLQNKDMLQHISLLVKQVQELELKLSGQNAMGSQDSLLEITFRSGALPVLCDPTTPKPEDLHSPPLGAGLADFAHPAGSPLGRRDCLVKLECFRFLPPEDTPPPAQGEALLGGLELIKFRESGIASEYESNTDESEERDSWSQEELPRLLNVLQRQELGDGLDDEIAV

SEQ ID NO: 9430 - protein, 211 aa, Homo sapiens
MSLSSLCPVFSAAASSLQVHLLKDQLAAEAAARLEAQARVHQLLLQNKDMLQHISLLVKQVQELELKLSGQNAMGSQDSLLEITFRSGALPVLCDPTTPKPEDLHSPPLGAGLADFAHPAGSPLGRRDCLVKLECFRFLPPEDTPPPAQGEALLGGLELIKFRESGIASEYESNTDESEERDSWSQEELPRLLNVLQRQELGDGLDDEIAV

SEQ ID NO: 9431 - protein, 1286 aa, Homo sapiens
GPGARGRRRRRRPMSPPPPPPPVRALPLLLLLAGPGAAAPPCLDGSPCANGGRCTQLPSREAACLCPPGWVGERCQLEDPCHSGPCAGRGVCQSSVVAGTARFSCRCPRGFRGPDCSLPDPCLSSPCAHGARCSVGPDGRFLCSCPPGYQGRSCRSDVDECRVGEPCRHGGTCLNTPGSFRCQCPAGYTGPLCENPAVPCAPSPCRNGGTCRQSGDLTYDCACLPGFEGQNCEVNVDDCPGHRCLNGGTCVDGVNTYNCQCPPEWTGQFCTEDVDECQLQPNACHNGGTCFNTLGGHSCVCVNGWTGESCSQNIDDCATAVCFHGATCHDRVASFYCACPMGKTGLLCHLDDACVSNPCHEDAICDTNPVNGRAICTCPPGFTGGACDQDVDECSIGANPCEHLGRCVNTQGSFLCQCGRGYTGPRCETDVNECLSGPCRNQATCLDRIGQFTCICMAGFTGTYCEVDIDECQSSPCVNGGVCKDRVNGFSCTCPSGFSGSTCQLDVDECASTPCRNGAKCVDQPDGYECRCAEGFEGTLCDRNVDDCSPDPCHHGRCVDGIASFSCACAPGYTGTRCESQVDECRSQPCRHGGKCLDLVDKYLCRCPSGTTGVNCEVNIDDCASNPCTFGVCRDGINRYDCVCQPGFTGPLCNVEINECASSPCGEGGSCVDGENGFRCLCPPGSLPPLCLPPSHPCAHEPCSHGICYDAPGGFRCVCEPGWSGPRCSQSLARDACESQPCRAGGTCSSDGMGFHCTCPPGVQGRQCELLSPCTPNPCEHGGRCESAPGQLPVCSCPQGWQDPCLNGGSCQDGVGSFSCSCLPGFAGPRCARDVDECLSNPCGPGTCTDHVASFTCTCPPGYGGFHCEQDLPDCSPSSCFNGGTCVDGVNSFSCLCRPGYTGAHCQHEADPCLSRPCLHGGVCSAAHPGFRCTCLESFTGPQCQTLVDWCSRQPCQNGGRCVQTGAYCLCPPGWSGRLCDIRSLPCREAAAQIGVRLEQLCQAGGQCVDEDSSHYCVCPEGRTGSHCEQEVDPCLAQPCQHGGTCRGYMGGYMCECLPGYNGDNCEDDVDECASQPCQHGGSCIDLVARYLCSCPPGTLGVLCEINEDDCGPGPPLDSGPRCLHNGTCVDLVGGFRCTCPPGYTGLRCEADINECRSGACHAAHTRDCLQDPGGGFRCLCHAGFSGPRCQTVLSPCESQPCQHGGQCRPSPGPGGGLTFTCHCAQPFWGPRCERVARSCRELQCPVGVPCQQTPRGPRCACPPGLSGPSCRSFPGSPPGASNASC

SEQ ID NO: 9432 - protein, 2321 aa, Homo sapiens
MGPGARGRRRRRRPMSPPPPPPPVRALPLLLLLAGPGAAAPPCLDGSPCANGGRCTQLPSREAACLCPPGWVGERCQLEDPCHSGPCAGRGVCQSSVVAGTARFSCRCPRGFRGPDCSLPDPCLSSPCAHGARCSVGPDGRFLCSCPPGYQGRSCRSDVDECRVGEPCRHGGTCLNTPGSFRCQCPAGYTGPLCENPAVPCAPSPCRNGGTCRQSGDLTYDCACLPGFEGQNCEVNVDDCPGHRCLNGGTCVDGVNTYNCQCPPEWTGQFCTEDVDECQLQPNACHNGGTCFNTLGGHSCVCVNGWTGESCSQNIDDCATAVCFHGATCHDRVASFYCACPMGKTGLLCHLDDACVSNPCHEDAICDTNPVNGRAICTCPPGFTGGACDQDVDECSIGANPCEHLGRCVNTQGSFLCQCGRGYTGPRCETDVNECLSGPCRNQATCLDRIGQFTCICMAGFTGTYCEVDIDECQSSPCVNGGVCKDRVNGFSCTCPSGFSGSTCQLDVDECASTPCRNGAKCVDQPDGYECRCAEGFEGTLCDRNVDDCSPDPCHHGRCVDGIASFSCACAPGYTGTRCESQVDECRSQPCRHGGKCLDLVDKYLCRCPSGTTGVNCEVNIDDCASNPCTFGVCRDGINRYDCVCQPGFTGPLCNVEINECASSPCGEGGSCVDGENGFRCLCPPGSLPPLCLPPSHPCAHEPCSHGICYDAPGGFRCVCEPGWSGPRCSQSLARDACESQPCRAGGTCSSDGMGFHCTCPPGVQGRQCELLSPCTPNPCEHGGRCESAPGQLPVCSCPQGWQGPRCQQDVDECAGPAPCGPHGICTNLAGSFSCTCHGGYTGPSCDQDINDCDPNPCLNGGSCQDGVGSFSCSCLPGFAGPRCARDVDECLSNPCGPGTCTDHVASFTCTCPPGYGGFHCEQDLPDCSPSSCFNGGTCVDGVNSFSCLCRPGYTGAHCQHEADPCLSRPCLHGGVCSAAHPGFRCTCLESFTGPQCQTLVDWCSRQPCQNGGRCVQTGAYCLCPPGWSGRLCDIRSLPCREAAAQIGVRLEQLCQAGGQCVDEDSSHYCVCPEGRTGSHCEQEVDPCLAQPCQHGGTCRGYMGGYMCECLPGYNGDNCEDDVDECASQPCQHGGSCIDLVARYLCSCPPGTLGVLCEINEDDCGPGPPLDSGPRCLHNGTCVDLVGGFRCTCPPGYTGLRCEADINECRSGACHAAHTRDCLQDPGGGFRCLCHAGFSGPRCQTVLSPCESQPCQHGGQCRPSPGPGGGLTFTCHCAQPFWGPRCERVARSCRELQCPVGVPCQQTPRGPRCACPPGLSGPSCRSFPGSPPGASNASCAAAPCLHGGSCRPAPLAPFFRCACAQGWTGPRCEAPAAAPEVSEEPRCPRAACQAKRGDQRCDRECNSPGCGWDGGDCSLSVGDPWRQCEALQCWRLFNNSRCDPACSSPACLYDNFDCHAGGRERTCNPVYEKYCADHFADGRCDQGCNTEECGWDGLDCASEVPALLARGVLVLTVLLPPEELLRSSADFLQRLSAILRTSLRFRLDAHGQAMVFPYHRPSPGSEPRARRELAPEVIGSVVMLEIDNRLCLQSPENDHCFPDAQSAADYLGALSAVERLDFPYPLRDVRGEPLEPPEPSVPLLPLLVAGAVLLLVILVLGVMVARRKREHSTLWFPEGFSLHKDVASGHKGRREPVGQDALGMKNMAKGESLMGEVATDWMDTECPEAKRLKVEEPGMGAEEAVDCRQWTQHHLVAADIRVAPAMALTPPQGDADADGMDVNVRGPDGFTPLMLASFCGGALEPMPTEEDEADDTSASIISDLICQGAQLGARTDRTGETALHLAARYARADAAKRLLDAGADTNAQDHSGRTPLHTAVTADAQGVFQILIRNRSTDLDARMADGSTALILAARLAVEGMVEELIASHADVNAVDELGKSALHWAAAVNNVEATLALLKNGANKDMQDSKEETPLFLAAREGSYEAAKLLLDHFANREITDHLDRLPRDVAQERLHQDIVRLLDQPSGPRSPPGPHGLGPLLCPPGAFLPGLKAAQSGSKKSRRPPGKAGLGPQGPRGRGKKLTLACPGPLADSSVTLSPVDSLDSPRPFGGPPASPGGFPLEGPYAAATATAVSLAQLGGPGRAGLGRQPPGGCVLSLGLLNPVAVPLDWARLPPPAPPGPSFLLPLAPGPQLLNPGTPVSPQERPPPYLAVPGHGEEYPAAGAHSSPPKARFLRVPSEHPYLTPSPESPEHWASPSPPSLSDWSESTPSPATATGAMATTTGALPAQPLPLSVPSSLAQAQTQLGPQPEVTPKRQVLA

SEQ ID NO: 9433 - protein, 117 aa, Homo sapiens
  SITE 1: note = misc_feature - Xaa can be any naturally occurring amino acid
XLMGEVATDWMDTECPEAKRLKVEEPGMGAEEAVDCRQWTQHHLVAADIRVAPAMALTPPQGDADADGMDVNVRGPDSHPKPLYRLGCPHGRWLNGTDPGGPPGSRGHGGRAHRQPC

SEQ ID NO: 9434 - protein, 177 aa, Homo sapiens
  SITE 1: note = misc_feature - Xaa can be any naturally occurring amino acid
XQLGARTDRTGETALHLAARYARADAAKRLLDAGADTNAQDHSGRTPLHTAVTADAQGVFQILIRNRSTDLDARMADGSTALILAARLAVEGMVEELIASHADVNAVDELGKSALHWAAAVNNVEATLALLKNGANKDMQDSKVSPSPWSTGCQQWHSAIAIQPGQQSETLSKNKTK

SEQ ID NO: 9435 - protein, 295 aa, Homo sapiens
MGRGVRVLLLLSLLHCAGGSEGRKTWRRRGQQPPPPPRTEAAPAAGQPVESFPLDFTAVEGNMDSFMAQVKSLAQSLYPCSAQQLNEDLRLHLLLNTSVTCNDGSPAGYYLKESRGSRRWLLFLEGGWYCFNRENCDSRYDTMRRLMSSRDWPRTRTGTGILSSQPEENPYWWNANMVFIPYCSSDVWSGASSKSEKNEYAFMGALIIQEVVRELLGRGLSGAKVLLLAGSSAGGTGVLLNVDRVAEQLEKLGYPAIQVRGLADSGWFLDNKQYRHTDCVDTITCAPTEAIRRGI

SEQ ID NO: 9436 - protein, 496 aa, Homo sapiens
MGRGVRVLLLLSLLHCAGGSEGRKTWRRRGQQPPPPPRTEAAPAAGQPVESFPLDFTAVEGNMDSFMAQVKSLAQSLYPCSAQQLNEDLRLHLLLNTSVTCNDGSPAGYYLKESRGSRRWLLFLEGGWYCFNRENCDSRYDTMRRLMSSRDWPRTRTGTGILSSQPEENPYWWNANMVFIPYCSSDVWSGASSKSEKNEYAFMGALIIQEVVRELLGRGLSGAKVLLLAGSSAGGTGVLLNVDRVAEQLEKLGYPAIQVRGLADSGWFLDNKQYRHTDCVDTITCAPTEAIRRGIRYWNGVVPERCRRQFQEGEEWNCFFGYKVYPTLRCPVFVVQWLFDEAQLTVDNVHLTGQPVQEGLRLYIQNLGRELRHTLKDVPASFAPACLSHEIIIRSHWTDVQVKGTSLPRALHCWDRSLHDSHKASKTPLKGCPVHLVDSCPWPHCNPSCPTVRDQFTGQEMNVAQFLMHMGFDMQTVAQPQGLEPSELLGMLSNGS

SEQ ID NO: 9437 - protein, 197 aa, Homo sapiens
MRRLMSSRDWPRTRTGTGILSSQPEENPYWWNANMVFIPYCSSDVWSGASSKSEKNEYAFMGALIIQEVVRELLGRGLSGAKVLLLAGSSAGGTGVLLNVDRVAEQLEKLGYPAIQVRGLADSGWFLDNKQYRHTDCVDTITCAPTEAIRRGIRYWNGVVPERCRRQFQEGEEWNCFFGYKVYPTLRCPVFVVQWLF

SEQ ID NO: 9438 - protein, 357 aa, Homo sapiens
MQSVQSTSFCLRKQCLCLTFLLLHLLGQVAATQRCPPQCPGRCPATPPTCAPGVRAVLDGCSCCLVCARQRGESCSDLEPCDESSGLYCDRSADPSNQTGICTAVEGDNCVFDGVIYRSGEKFQPSCKFQCTCRDGQIGCVPRCQLDVLLPEPNCPAPRKVEVPGECCEKWICGPDEEDSLGGLTLAAYRPEATLGVEVSDSSVNCIEQTTEWTACSKSCGMGFSTRVTNRNRQCEMLKQTRLCMVRPCEQEPEQPTDKKGKKCLRTKKSLKAIHLQFKNCTSLHTYKPRFCGVCSDGRCCTPHNTKTIQAEFQCSPGQIVKKPVMVIGTCTCHTNCPKNNEAFLQELELKTTRGKM

SEQ ID NO: 9439 - protein, 125 aa, Homo sapiens
MARSATLAAAALALCLLLAPPGLAWYKPAAGHSSYSVGRAAGLLSGLRRSPYARRSQPYRGAEPPGGAGASPELQLHPRLRSLAVCVQDVAPNLQRCERLPDGRGTYQCKANVFLSLRAADCLAA

SEQ ID NO: 9440 - protein, 156 aa, Homo sapiens
MARSATLAAAALALCLLLAPPGLAWYKPAAGHSSYSVGRAAGLLSGLRRSPYARRSQPYRGAEPPGGAGASPELQLHPRLRSLVSPACRGLMGGGGRTWVGVRRPLSLCLPAPQAVCVQDVAPNLQRCERLPDGRGTYQCKANVFLSLRAADCLAA

SEQ ID NO: 9441 - protein, 53 aa, Homo sapiens
GAQHRCPGRTGAVQGLRFCGWSYKGSECEPMPHPTLPAEQRTVLQRQCHLHQQ

SEQ ID NO: 9442 - protein, 201 aa, Homo sapiens
MRFLAATFLLLALSTAAQAEPVQFKDCGSVDGVIKEVNVSPCPTQPCQLSKGQSYSVNVTFTSNIQSKSSKAVVHGILMGVPVPFPIPEPDGCKSGINCPIQKDKTYSYLNKLPVKSEYPSIKLVVEWQLQDDKNQSLFCWEIPVQIMFPCLFSAHCPMLATEHRCLQLQMETKSLRFWSRRGMSVWLPSPAGAWRRTAPF

SEQ ID NO: 9443 - protein, 151 aa, Homo sapiens
MRFLAATFLLLALSTAAQAEPVQFKDCGSVDGVIKEVNVSPCPTQPCQLSKGQSYSVNVTFTSNIQSKSSKAVVHGILMGVPVPFPIPEPDGCKSGINCPIQKDKTYSYLNKLPVKSEYPSIKLVVEWQLQDDKNQSLFCWEIPVQIVSHL

SEQ ID NO: 9444 - protein, 174 aa, Homo sapiens
MRFLAATFLLLALSTAAQAEPVQFKDCGSVDGVIKEVNVSPCPTQPCQLSKGQSYSVNVTFTSNIQSKSSKAVVHGILMGVPVPFPIPEPDGCKSGINCPIQKDKTYSYLNKLPVKSEYPSIKLVVEWQLQDDKNQSLFCWEIPVQIVSLSGGERAWVEGRKWRRNQTETKSVP

SEQ ID NO: 9445 - protein, 221 aa, Homo sapiens
MRFLAATFLLLALSTAAQAEPVQFKDCGSVDGVIKEVNVSPCPTQPCQLSKGQSYSVNVTFTSNIQSKSSKAVVHGILMGVPVPFPIPEPDGCKSGINCPIQKDKTYSYLNKLPVKSEYPSIKLVVEWQLQDDKNQSLFCWEIPVQIVSLSGGFSSLSASLSSVHLANESAETLDSTSSSAASTTVTCSPMVSSDSLKRRCSVAETELRVAGSQWLSHVSF

SEQ ID NO: 9446 - protein, 148 aa, Homo sapiens
MRFLAATFLLLALSTAAQAEPVQFKDCGSVDGVIKEVNVSPCPTQPCQLSKGQSYSVNVTFTSNIQSKSSKAVVHGILMGVPVPFPIPEPDGCKSGINCPIQKDKTYSYLNKLPVKSEYPSIKLVVEWQLQDDKNQSLFCWEIPVSHL

SEQ ID NO: 9447 - protein, 122 aa, Homo sapiens
MRFLAATFLLLALSTAAQAEPVQFKDCGSVDGVIKEVNVSPCPTQPCQLSKGQSYSVNVTFTSNIQSKSSKAVVHGILMGVPVPFPIPEPDGCKSGINCPIQKDKTYSYLNKLPVKSEYPSV

SEQ ID NO: 9448 - protein, 125 aa, Homo sapiens
MRFLAATFLLLALSTAAQAEPVQFKDCGSVDGVIKEVNVSPCPTQPCQLSKGQSYSVNVTFTSNIQSKSSKAVVHGILMGVPVPFPIPEPDGCKSGINCPIQKDKTYSYLNKLPVKSEYPSVSHL

SEQ ID NO: 9449 - protein, 173 aa, Homo sapiens
  SITE 1: note = misc_feature - Xaa can be any naturally occurring amino acid
XPLRVRPPTWTQLSVRRICPSPASGLEDDASRRAWGPREAVRSLRAREEGSVDGVIKEVNVSPCPTQPCQLSKGQSYSVNVTFTSNIQSKSSKAVVHGILMGVPVPFPIPEPDGCKSGINCPIQKDKTYSYLNKLPVKSEYPSIKLVVEWQLQDDKNQSLFCWEIPVQIVSHL

SEQ ID NO: 9450 - protein, 113 aa, Homo sapiens
MDSRQAAALLVLLLLIDGGCAEGPGGQQEDQLSAEEDSEPLPPQDAQTSGSLLHYLLQAMERPGRSQAFLFQPQRFGRNTQGSWRNEWLSPRAGEGLNSQFWSLAAPQRFGKK

SEQ ID NO: 9451 - protein, 423 aa, Homo sapiens
MFIMNEKWDTNSSENWHPIWNVNDTKHHLYSDINITYVNYYLHQPQVAAIFIISYFLIFFLCMMGNTVVCFIVMRNKHMHTVTNLFILNLAISDLLVGIFCMPITLLDNIIAGWPFGNTMCKISGLVQGISVAASVFTLVAIAVDRFQCVVYPFKPKLTIKTAFVIIMIIWVLAITIMSPSAVMLHVQEEKYYRVRLNSQNKTSPVYWCREDWPNQEMRKIYTTVLFANIYLAPLSLIVIMYGRIGISLFRAAVPHTGRKNQEQWHVVSRKKQKIIKMLLIVALLFILSWLPLWTLMMLSDYADLSPNELQIINIYIYPFAHWLAFGNSSVNPIIYGFFNENFRRGFQEAFQLQLCQKRAKPMEAYALKAKSHVLINTSNQLVQESTFQNPHGETLLYRKSAEKPQQELVMEELKETTNSSEI

SEQ ID NO: 9452 - protein, 420 aa, Homo sapiens
MNEKWDTNSSENWHPIWNVNDTKHHLYSDINITYVNYYLHQPQVAAIFIISYFLIFFLCMMGNTVVCFIVMRNKHMHTVTNLFILNLAISDLLVGIFCMPITLLDNIIAGWPFGNTMCKISGLVQGISVAASVFTLVAIAVDRFQCVVYPFKPKLTIKTAFVIIMIIWVLAITIMSPSAVMLHVQEEKYYRVRLNSQNKTSPVYWCREDWPNQEMRKIYTTVLFANIYLAPLSLIVIMYGRIGISLFRAAVPHTGRKNQEQWHVVSRKKQKIIKMLLIVALLFILSWLPLWTLMMLSDYADLSPNELQIINIYIYPFAHWLAFGNSSVNPIIYGFFNENFRRGFQEAFQLQLCQKRAKPMEAYALKAKSHVLINTSNQLVQESTFQNPHGETLLYRKSAEKPQQELVMEELKETTNSSEI

SEQ ID NO: 9453 - protein, 522 aa, Homo sapiens
MNSFFGTPAASWCLLESDVSSAPDKEAGRERRALSVQQRGGPAWSGSLEWSRQSAGDRRRLGLSRQTAKSSWSRSRDRTCCCRRAWWILVPAADRARRERFIMNEKWDTNSSENWHPIWNVNDTKHHLYSDINITYVNYYLHQPQVAAIFIISYFLIFFLCMMGNTVVCFIVMRNKHMHTVTNLFILNLAISDLLVGIFCMPITLLDNIIAGWPFGNTMCKISGLVQGISVAASVFTLVAIAVDRFQCVVYPFKPKLTIKTAFVIIMIIWVLAITIMSPSAVMLHVQEEKYYRVRLNSQNKTSPVYWCREDWPNQEMRKIYTTVLFANIYLAPLSLIVIMYGRIGISLFRAAVPHTGRKNQEQWHVVSRKKQKIIKMLLIVALLFILSWLPLWTLMMLSDYADLSPNELQIINIYIYPFAHWLAFGNSSVNPIIYGFFNENFRRGFQEAFQLQLCQKRAKPMEAYALKAKSHVLINTSNQLVQESTFQNPHGETLLYRKSAEKPQQELVMEELKETTNSSEI

SEQ ID NO: 9454 - protein, 132 aa, Homo sapiens
MNSFFGTPAASWCLLESDVSSAPDKEAGRERRALSVQQRGGPAWSGSLEWSRQSAGDRRRLGLSRQTAKSSWSRSRDRTCCCRRAWWILVPAADRARRERMAIWKHDVQDQWIGPGNICRSFSLYVSCNCCR

SEQ ID NO: 9455 - protein, 1201 aa, Homo sapiens
MALGTTLRASLLLLGLLTEGLAQLAIPASVPRGFWALPENLTVVEGASVELRCGVSTPGSAVQWAKDGLLLGPDPRIPGFPRYRLEGDPARGEFHLHIEACDLSDDAEYECQVGRSEMGPELVSPRVILSILVPPKLLLLTPEAGTMVTWVAGQEYVVNCVSGDAKPAPDITILLSGQTISDISANVNEGSQQKLFTVEATARVTPRSSDNRQLLVCEASSPALEAPIKASFTVNVLFPPGPPVIEWPGLDEGHVRAGQSLELPCVARGGNPLATLQWLKNGQPVSTAWGTEHTQAVARSVLVMTVRPEDHGAQLSCEAHNSVSAGTQEHGITLQVTFPPSAIIILGSASQTENKNVTLSCVSKSSRPRVLLRWWLGWRQLLPMEETVMDGLHGGHISMSNLTFLARREDNGLTLTCEAFSEAFTKETFKKSLILNVKYPAQKLWIEGPPEGQKLRAGTRVRLVCLAIGGNPEPSLMWYKDSRTVTESRLPQESRRVHLGSVEKSGSTFSRELVLVTGPSDNQAKFTCKAGQLSASTQLAVQFPPTNVTILANASALRPGDALNLTCVSVSSNPPVNLSWDKEGERLEGVAAPPRRAPFKGSAAARSVLLQVSSRDHGQRVTCRAHSAELRETVSSFYRLNVLYRPEFLGEQVLVVTAVEQGEALLPVSVSANPAPEAFNWTFRGYRLSPAGGPRHRILSSGALHLWNVTRADDGLYQLHCQNSEGTAEARLRLDVHYAPTIRALQDPTEVNVGGSVDIVCTVDANPILPGMFNWERLGEDEEDQSLDDMEKISRGPTGRLRIHHAKLAQAGAYQCIVDNGVAPPARRLLRLVVRFAPQVEHPTPLTKVAAAGDSTSSATLHCRARGVPNIVFTWTKNGVPLDLQDPRYTEHTYHQGGVHSSLLTIANVSAAQDYALFTCTATNALGSDQTNIQLVSISRPDPPSGLKVVSLTPHSVGLEWKPGFDGGLPQRFCIRYEALGTPGFHYVDVVPPQATTFTLTGLQPSTRYRVWLLASNALGDSGLADKGTQLPITTPGLHQPSGEPEDQLPTEPPSGISEKTEAGSEEDRVRNEYEESQWTGERDTQSSTVSTTEAEPYYRSLRDFSPQLPPTQEEVSYSRGFTGEDEDMAFPGHLYDEVERTYPPSGAWGPLYDEVQMGPWDLHWPEDTYQDPRGIYDQVAGDLDTLEPDSLPFELRGHLV

SEQ ID NO: 9456 - protein, 1241 aa, Homo sapiens
MALGTTLRASLLLLGLLTEGLAQLAIPASVPRGFWALPENLTVVEGASVELRCGVSTPGSAVQWAKDGLLLGPDPRIPGFPRYRLEGDPARGEFHLHIEACDLSDDAEYECQVGRSEMGPELVSPRVILSILVPPKLLLLTPEAGTMVTWVAGQEYVVNCVSGDAKPAPDITILLSGQTISDISANVNEGSQQKLFTVEATARVTPRSSDNRQLLVCEASSPALEAPIKASFTVNVLFPPGPPVIEWPGLDEGHVRAGQSLELPCVARGGNPLATLQWLKNGQPVSTAWGTEHTQAVARSVLVMTVRPEDHGAQLSCEAHNSVSAGTQEHGITLQVTFPPSAIIILGSASQTENKNVTLSCVSKSSRPRVLLRWWLGWRQLLPMEETVMDGLHGGHISMSNLTFLARREDNGLTLTCEAFSEAFTKETFKKSLILNVKYPAQKLWIEGPPEGQKLRAGTRVRLVCLAIGGNPEPSLMWYKDSRTVTESRLPQESRRVHLGSVEKSGSTFSRELVLVTGPSDNQAKFTCKAGQLSASTQLAVQFPPTNVTILANASALRPGDALNLTCVSVSSNPPVNLSWDKEGERLEGVAAPPRRAPFKGSAAARSVLLQVSSRDHGQRVTCRAHSAELRETVSSFYRLNVLYRPEFLGEQVLVVTAVEQGEALLPVSVSANPAPEAFNWTFRGYRLSPAGGPRHRILSSGALHLWNVTRADDGLYQLHCQNSEGTAEARLRLDVHYAPTIRALQDPTEVNVGGSVDIVCTVDANPILPGMFNWERLGEDEEDQSLDDMEKISRGPTGRLRIHHAKLAQAGAYQCIVDNGVAPPARRLLRLVVRFAPQVEHPTPLTKVAAAGDSTSSATLHCRARGVPNIVFTWTKNGVPLDLQDPRYTEHTYHQGGVHSSLLTIANVSAAQDYALFTCTATNALGSDQTNIQLVSISRPDPPSGLKVVSLTPHSVGLEWKPGFDGGLPQRFCIRYEALGTPGFHYVDVVPPQATTFTLTGLQPSTRYRVWLLASNALGDSGLADKGTQLPITTPGLHQPSGEPEDQLPTEPPSGPSGLPLLPVLFALGGLLLLSNASCVGGVLWQRRLRRLAEGISEKTEAGSEEDRVRNEYEESQWTGERDTQSSTVSTTEAEPYYRSLRDFSPQLPPTQEEVSYSRGFTGEDEDMAFPGHLYDEVERTYPPSGAWGPLYDEVQMGPWDLHWPEDTYQDPRGIYDQVAGDLDTLEPDSLPFELRGHLV

SEQ ID NO: 9457 - protein, 609 aa, Homo sapiens
MDFLLALVLVSSLYLQAAAEFDGRWPRQIVSSIGLCRYGGRIDCCWGWARQSWGQCQPFYVLRQRIARIRCQLKAVCQPRCKHGECIGPNKCKCHPGYAGKTCNQDEHIPAPLDQGSEQPLFQPLDHQATSLPSRDLNECGLKPRPCKHRCMNTYGSYKCYCLNGYMLMPDGSCSSALTCSMANCQYGCDVVKGQIRCQCPSPGLQLAPDGRTCVDVDECATGRASCPRFRQCVNTFGSYICKCHKGFDLMYIGGKYQCHDIDECSLGQYQCSSFARCYNIRGSYKCKCKEGYQGDGLTCVYIPKVMIEPSGPIHVPKGNGTILKGDTGNNNWIPDVGSTWWPPKTPYIPPIITNRPTSKPTTRPTPKPTPIPTPPPPPPLPTELRTPLPPTTPERPTTGLTTIAPAASTPPGGITVDNRVQTDPQKPRGDVFIPRQPSNDLFEIFEIERGVSADDEAKDDPGVLVHSCNFDHGLCGWIREKDNDLHWEPIRDPAGGQYLTVSAAKAPGGKAARLVLPLGRLMHSGDLCLSFRHKVTGLHSGTLQVFVRKHGAHGAALWGRNGGHGWRQTQITLRGADIKSVVFKGEKRRGHTGEIGLDDVSLKKGHCS

SEQ ID NO: 9458 - protein, 582 aa, Homo sapiens
MDFLLALVLVSSLYLQAAAEFDGRWPRQIVSSIGLCRYGGRIDCCWGWARQSWGQCQPFYVLRQRIARIRCQLKAVCQPRCKHGECIGPNKCKCHPGYAGKTCNQDLNECGLKPRPCKHRCMNTYGSYKCYCLNGYMLMPDGSCSSALTCSMANCQYGCDVVKGQIRCQCPSPGLQLAPDGRTCVDVDECATGRASCPRFRQCVNTFGSYICKCHKGFDLMYIGGKYQCHDIDECSLGQYQCSSFARCYNIRGSYKCKCKEGYQGDGLTCVYIPKVMIEPSGPIHVPKGNGTILKGDTGNNNWIPDVGSTWWPPKTPYIPPIITNRPTSKPTTRPTPKPTPIPTPPPPPPLPTELRTPLPPTTPERPTTGLTTIAPAASTPPGGITVDNRVQTDPQKPRGDVFIPRQPSNDLFEIFEIERGVSADDEAKDDPGVLVHSCNFDHGLCGWIREKDNDLHWEPIRDPAGGQYLTVSAAKAPGGKAARLVLPLGRLMHSGDLCLSFRHKVTGLHSGTLQVFVRKHGAHGAALWGRNGGHGWRQTQITLRGADIKSVVFKGEKRRGHTGEIGLDDVSLKKGHCSEER

SEQ ID NO: 9459 - protein, 595 aa, Homo sapiens
MDFLLALVLVSSLYLQAAAEFDGRWPRQIVSSIGLCRYGGRIDCCWGWARQSWGQCQPVCQPRCKHGECIGPNKCKCHPGYAGKTCNQDEHIPAPLDQGSEQPLFQPLDHQATSLPSRDLNECGLKPRPCKHRCMNTYGSYKCYCLNGYMLMPDGSCSSALTCSMANCQYGCDVVKGQIRCQCPSPGLQLAPDGRTCVDVDECATGRASCPRFRQCVNTFGSYICKCHKGFDLMYIGGKYQCHDIDECSLGQYQCSSFARCYNIRGSYKCKCKEGYQGDGLTCVYIPKVMIEPSGPIHVPKGNGTILKGDTGNNNWIPDVGSTWWPPKTPYIPPIITNRPTSKPTTRPTPKPTPIPTPPPPPPLPTELRTPLPPTTPERPTTGLTTIAPAASTPPGGITVDNRVQTDPQKPRGDVFIPRQPSNDLFEIFEIERGVSADDEAKDDPGVLVHSCNFDHGLCGWIREKDNDLHWEPIRDPAGGQYLTVSAAKAPGGKAARLVLPLGRLMHSGDLCLSFRHKVTGLHSGTLQVFVRKHGAHGAALWGRNGGHGWRQTQITLRGADIKSVVFKGEKRRGHTGEIGLDDVSLKKGHCSEER

SEQ ID NO: 9460 - protein, 566 aa, Homo sapiens
MDFLLALVLVSSLYLQAAAEFDGRWPRQIVSSIGLCRYGGRIDCCWGWARQSWGQCQPVCQPRCKHGECIGPNKCKCHPGYAGKTCNQDEHIPAPLDQGSEQPLFQPLDHQATSLPSRDLNECGLKPRPCKHRCMNTYGSYKCYCLNGYMLMPDGSCSSALTCSMANCQYGCDVVKGQIRCQCPSPGLQLAPDGRTCVDVDECATGRASCPRFRQCVNTFGSYICKCHKGFDLMYIGGKYQCHDIDECSLGQYQCSSFARCYNIRGSYKCKCKEGYQGDGLTCVYIPKVMIEPSGPIHVPKGNGTILKGDTGNNNWIPDVGSTWWPPKTPYIPPIITNRPTSKPTTRPTPKPTPIPTPPPPPPLPTELRTPLPPTTPERPTTGLTTIAPAASTPPGGITVDNRVQTDPQKPRGDVFSVLVHSCNFDHGLCGWIREKDNDLHWEPIRDPAGGQYLTVSAAKAPGGKAARLVLPLGRLMHSGDLCLSFRHKVTGLHSGTLQVFVRKHGAHGAALWGRNGGHGWRQTQITLRGADIKSVVFKGEKRRGHTGEIGLDDVSLKKGHCSEER

SEQ ID NO: 9461 - protein, 509 aa, Homo sapiens
MDFLLALVLVSSLYLQAAAEFDGRWPRQIVSSIGLCRYGGRIDCCWGWARQSWGQCQPVCQPRCKHGECIGPNKCKCHPGYAGKTCNQDLNECGLKPRPCKHRCMNTYGSYKCYCLNGYMLMPDGSCSSALTCSMANCQYGCDVVKGQIRCQCPSPGLQLAPDGRTCVDVDECATGRASCPRFRQCVNTFGSYICKCHKGFDLMYIGGKYQCHDIDECSLGQYQCSSFARCYNIRGSYKCKCKEGYQGDGLTCVYIPKVMIEPSGPIHVPKGNGTILKGDTGNNNWIPDVGSTWWPPKTPYIPPIITNRPTSKPTTRPTPKPTPIPTPPPPPPLPTELRTPLPPTTPERPTTGLTTIAPAASTPPGGITVDNRVQTDPQKPRGDVFSVLVHSCNFDHGLCGWIREKDNDLHWEPIRDPAGGQYLTVSAAKAPGGKAARLVLPLGRLMHSGDLCLSFRHKVTGLHSGTLQVFVRKHGAHGAALWGRNGGHGWRQTQITLRGADIKSESQR

SEQ ID NO: 9462 - protein, 565 aa, Homo sapiens
MDFLLALVLVSSLYLQAAAEFDGRWPRQIVSSIGLCRYGGRIDCCWGWARQSWGQCQPVCQPRCKHGECIGPNKCKCHPGYAGKTCNQDLNECGLKPRPCKHRCMNTYGSYKCYCLNGYMLMPDGSCSSALTCSMANCQYGCDVVKGQIRCQCPSPGLQLAPDGRTCVDVDECATGRASCPRFRQCVNTFGSYICKCHKGFDLMYIGGKYQCHDIDECSLGQYQCSSFARCYNIRGSYKCKCKEGYQGDGLTCVYIPKVMIEPSGPIHVPKGNGTILKGDTGNNNWIPDVGSTWWPPKTPYIPPIITNRPTSKPTTRPTPKPTPIPTPPPPPPLPTELRTPLPPTTPERPTTGLTTIAPAASTPPGGITVDNRVQTDPQKPRGDVFIPRQPSNDLFEIFEIERGVSADDEAKDDPGVLVHSCNFDHGLCGWIREKDNDLHWEPIRDPAGGQYLTVSAAKAPGGKAARLVLPLGRLMHSGDLCLSFRHKVTGLHSGTLQVFVRKHGAHGAALWGRNGGHGWRQTQITLRGADIKSVVFKGEKRRGHTGEIGLDDVSLKKGHCSEER

SEQ ID NO: 9463 - protein, 536 aa, Homo sapiens
MDFLLALVLVSSLYLQAAAEFDGRWPRQIVSSIGLCRYGGRIDCCWGWARQSWGQCQPVCQPRCKHGECIGPNKCKCHPGYAGKTCNQDLNECGLKPRPCKHRCMNTYGSYKCYCLNGYMLMPDGSCSSALTCSMANCQYGCDVVKGQIRCQCPSPGLQLAPDGRTCVDVDECATGRASCPRFRQCVNTFGSYICKCHKGFDLMYIGGKYQCHDIDECSLGQYQCSSFARCYNIRGSYKCKCKEGYQGDGLTCVYIPKVMIEPSGPIHVPKGNGTILKGDTGNNNWIPDVGSTWWPPKTPYIPPIITNRPTSKPTTRPTPKPTPIPTPPPPPPLPTELRTPLPPTTPERPTTGLTTIAPAASTPPGGITVDNRVQTDPQKPRGDVFSVLVHSCNFDHGLCGWIREKDNDLHWEPIRDPAGGQYLTVSAAKAPGGKAARLVLPLGRLMHSGDLCLSFRHKVTGLHSGTLQVFVRKHGAHGAALWGRNGGHGWRQTQITLRGADIKSVVFKGEKRRGHTGEIGLDDVSLKKGHCSEER

SEQ ID NO: 9464 - protein, 61 aa, Homo sapiens
MNTYGSYKCYCLNGYMLMPDGSCSSALTCSMANCQYGCDVVKGQIRCQCPSPGLQLAPDGR

SEQ ID NO: 9465 - protein, 104 aa, Homo sapiens
  SITE 1: note = misc_feature - Xaa can be any naturally occurring amino acid
XGLCGWIREKDNDLHWEPIRDPAGITKMIKGLEKKIYDGKLKELGLLSLEKRRLRGKPLMVFKYMKGWHREGGDQLFSICTKNRTRGNWLRLEYKGAFLGRGHC

SEQ ID NO: 9466 - protein, 26 aa, Homo sapiens
  SITE 1: note = misc_feature - Xaa can be any naturally occurring amino acid
XNDLHWEPIRDPADNCSCLHAGGLDL

SEQ ID NO: 9467 - protein, 453 aa, Homo sapiens
  SITE 1: note = misc_feature - Xaa can be any naturally occurring amino acid
XWPRQIVSSIGLCRYGGRIDCCWGWARQSWGQCQPVCQPRCKHGECIGPNKCKCHPGYAGKTCNQDLNECGLKPRPCKHRCMNTYGSYKCYCLNGYMLMPDGSCSSALTCSMANCQYGCDVVKGQIRCQCPSPGLQLAPDGRTCVDVDECATGRASCPRFRQCVNTFGSYICKCHKGFDLMYIGGKYQCHDIDECSLGQYQCSSFARCYNIRGSYKCKCKEGYQGDGLTCVYIPKVMIEPSGPIHVPKGNGTILKGDTGNNNWIPDVGSTWWPPKTPYIPPIITNRPTSKPTTRPTPKPTPIPTPPPPPPLPTELRTPLPPTTPERPTTGLTTIAPAASTPPGGITVDNRVQTDPQKPRGDVFIPRQPSNDLFEIFEIERGVSADDEAKDDPGVLVHSCNFDHGLCGWIREKDNDLHWEPIRDPAEILQGTQFREIFIGCILSASCVTSYLGC

SEQ ID NO: 9468 - protein, 101 aa, Homo sapiens
MPLEDEVVPPQVLSEPNEEAGAALSPLPEVPPWTGEVSPAQRDGGALGRGPWDSSDRSALLKSKLRALLTAPRSLRRSSCFGGRMDRIGAQSGLGCNSFRY

SEQ ID NO: 9469 - protein, 151 aa, Homo sapiens
MSSFSTTTVSFLLLLAFQLLGQTRANPMYNAVSNADLMDFKNLLDHLEEKMPLEDEVVPPQVLSEPNEEAGAALSPLPEVPPWTGEVSPAQRDGGALGRGPWDSSDRSALLKSKLRALLTAPRSLRRSSCFGGRMDRIGAQSGLGCNSFRY

SEQ ID NO: 9470 - protein, 152 aa, Homo sapiens [sequence omitted]

SEQ ID NO: 9471 - protein, 134 aa, Homo sapiens
MDPQTAPSRALLLLLFLHLAFLGGRSHPLGSPGSASDLETSGLQEQRNHLQGKLSELQVEQTSLEPLQESPRPTGVWKSREVATEGIRGHRKMVLYTLRAPRSPKMVQGSGCFGRKMDRISSSSGLGCKVLRRH

SEQ ID NO: 9472 - protein, 126 aa, Homo sapiens
MHLSQLLACALLLTLLSLRPSEAKPGAPPKVPRTPPAEELAEPQAAGGGQKKGDKAPGGGGANLKGDRSRLLRDLRVDTKSRAAWARLLQEHPNARKYKGANKKGLSKGCFGLKLDRIGSMSGLGC

SEQ ID NO: 9473 - protein, 126 aa, Homo sapiens; identical to SEQ ID NO: 9472

SEQ ID NO: 9474 - protein, 89 aa, Homo sapiens
MISSVKLNLILVLSLSTMHVFWCYPVPSSKVSGKSDYFLILLNSCPTRLDRSKELAFLKPILEKMFVKRSFRNGVGTGMKKTSFQRAKS

SEQ ID NO: 9475 - protein, 432 aa, Homo sapiens
MPAGRAARTCALLALCLLGAGAQDFGPTRFICTSVPVDADMCAASVAAGGAEELRSSVLQLRETVLQQKETILSQKETIRELTAKLGRCESQSTLDPGAGEARAGGGRKQPGSGKNTMGDLSRTPAAETLSQLGQTLQSLKTRLENLEQYSRLNSSSQTNSLKDLLQSKIDELERQVLSRVNTLEEGKGGPRNDTEERVKIETALTSLHQRISELEKGQKDNRPGDKFQLTFPLRTNYMYAKVKKSLPEMYAFTVCMWLKSSATPGVGTPFSYAVPGQANELVLIEWGNNPMEILINDKVAKLPFVINDGKWHHICVTWTTRDGVWEAYQDGTQGGSGENLAPYHPIKPQGVLVLGQEQDTLGGGFDATQAFVGELAHFNIWDRKLTPGEVYNLATCSTKALSGNVIAWAESHIEIYGGATKWTFEACRQIN

SEQ ID NO: 9476 - protein, 431 aa, Homo sapiens
MLALLAASVALAVAAGAQDSPAPGSRFVCTALPPEAVHAGCPLPAMPMQGGAQSPEEELRAAVLQLRETVVQQKETLGAQREAIRELTGKLARCEGLAGGKARGAGATGKDTMGDLPRDPGHVVEQLSRSLQTLKDRLESLEHQLRANVSNAGLPGDFREVLQQRLGELERQLLRKVAELEDEKSLLHNETSAHRQKTESTLNALLQRVTELERGNSAFKSPDAFKVSLPLRTNYLYGKIKKTLPELYAFTICLWLRSSASPGIGTPFSYAVPGQANEIVLIEWGNNPIELLINDKVAQLPLFVSDGKWHHICVTWTTRDGMWEAFQDGEKLGTGENLAPWHPIKPGGVLILGQEQDTVGGRFDATQAFVGELSQFNIWDRVLRAQEIVNIANCSTNMPGNIIPWVDNNVDVFGGASKWPVETCEERLLDL

SEQ ID NO: 9477 - protein, 500 aa, Homo sapiens
LKFLAVLLAAGMLAFLGAVICIIASVPLAASPARALPGGADNASVASGAAASPGPQRSLSALHGAGGSAGPPALPGAPAASAHPLPPGPLFSRFLCTPLAAACPSGAQQGDAAGAAPGEREELLLLQSTAEQLRQTALQQEARIRADQDTIRELTGKLGRCESGLPRGLQGAGPRRDTMADGPWDSPALILELEDAVRALRDRIDRLEQELPARVNLSAAPAPVSAVPTGLHSKMDQLEGQLLAQVLALEKERVALSHSSRRQRQEVEKELDVLQGRVAELEHGSSAYSPPDAFKISIPIRNNYMYARVRKALPELYAFTACMWLRSRSSGTGQGTPFSYSVPGQANEIVLLEAGHEPMELLINDKVAQLPLSLKDNGWHHICIAWTTRDGLWSAYQDGELQGSGENLAAWHPIKPHGILILGQEQDTLGGRFDATQAFVGDIAQFNLWDHALTPAQVLGIANCTAPLLGNVLPWEDKLVEAFGGATKAAFDVCKGRAKA

SEQ ID NO: 9478 - protein, 500 aa, Homo sapiens; identical to SEQ ID NO: 9477

SEQ ID NO: 9479 - protein, 196 aa, Homo sapiens
MEIISSKLFILLTLATSSLLTSNIFCADELVMSNLHSKENYDKYSEPRGYPKGERSLNFEELKDWGPKNVIKMSTPAVNKMPHSFANLPLRFGRNVQEERSAGATANLPLRSGRNMEVSLVRRVPNLPQRFGRTTTAKSVCRMLSDLCQGSMHSPCANDLFYSMTCQHQEIQNPDQKQSRRLLFKKIDDAELKQEK

SEQ ID NO: 9480 - protein, 165 aa, Homo sapiens
LAWRPGERGAPASRPRLALLLLLLLLPLPSGAWYKHVASPRYHTVGRAAGLLMGLRRSPYLWRRALRAAAGPLARDTLSPEPAAREAPLLLPSWVQELWETRRRSSQAGIPVRAPRSPRAPEPALEPESLDFSGAGQRLRRDVSRPAVDPAANRLGLPCLAPGPF

SEQ ID NO: 9481 - protein, 113 aa, Homo sapiens
MGLRRSPYLWRRALRAAAGPLARDTLSPEPAAREAPLLLPSWVQELWETRRRSSQAGIPVRAPRSPRAPEPALEPESLDFSGAGQRLRRDVSRPAVDPAANRLGLPCLAPGPF

SEQ ID NO: 9482 - protein, 128 aa, Homo sapiens
MSRPLEGPRGHAASPGLLWATRVTSTLAGLHELALSDETRHNWFASQMNKGSCLSPARLLSCCPRGFRSCGRRDAGAPRQGSPSVRPGARAPQSLRWNRSPWTSAELARDFGETSPAQRWTPQQTALA

SEQ ID NO: 9483 - protein, 97 aa, Homo sapiens
MLGNKRLGLSGLTLALSLLVCLGALAEAYPSKPDNPGEDAPAEDMARYYSALRHYINLITRQRYGKRSSPETLISDLLMRESTENVPRTRLEDPAMW

SEQ ID NO: 9484 - protein, 97 aa, Homo sapiens; identical to SEQ ID NO: 9483

SEQ ID NO: 9485 - protein, 97 aa, Homo sapiens; identical to SEQ ID NO: 9483

SEQ ID NO: 9486 - protein, 35 aa, Homo sapiens
MAEFRFLKSGALPILSLLCLQALKFSLGCSRGSSE

SEQ ID NO: 9487 - protein, 63 aa, Homo sapiens
MAGKKVLIVYAHQEPKSFNGSLKNVAVDELSRQGCTVTVSDLYAMNLEPRATDKDITGTLSNP

SEQ ID NO: 9488 - protein, 139 aa, Homo sapiens
MAGKKVLIVYAHQEPKSFNGSLKNVAVDELSRQGCTVTVSDLYAMNLEPRATDKDITGTLSNPEVFNYGVETHEAYKQRSLASDITDEQKKVREADLVIFQFPLYWFSVPAILKGWMDRVLCQGFAFDIPGFYDSGLLQ

SEQ ID NO: 9489 - protein, 139 aa, Homo sapiens; identical to SEQ ID NO: 9488

SEQ ID NO: 9490 - protein, 231 aa, Homo sapiens
MAGKKVLIVYAHQEPKSFNGSLKNVAVDELSRQGCTVTVSDLYAMNLEPRATDKDITGTLSNPEVFNYGVETHEAYKQRSLASDITDEQKKVREADLVIFQFPLYWFSVPAILKGWMDRVLCQGFAFDIPGFYDSGLLQGKLALLSVTTGGTAEMYTKTGVNGDSRYFLWPLQHGTLHFCGFKVLAPQISFAPEIASEEERKGMVAAWSQRLQTIWKEEPIPCTAHWHFGQ

SEQ ID NO: 9491 - protein, 231 aa, Homo sapiens; identical to SEQ ID NO: 9490

SEQ ID NO: 9492 - protein, 231 aa, Homo sapiens; identical to SEQ ID NO: 9490

SEQ ID NO: 9493 - protein, 193 aa, Homo sapiens
MAGKKVLIVYAHQEPKSFNGSLKNVAVDELSRQGCTVTVSDLYAMNLEPRATDKDITGTLSNPEVFNYGVETHEAYKQRSLASDITDEQKKVREADLVIFQGKLALLSVTTGGTAEMYTKTGVNGDSRYFLWPLQHGTLHFCGFKVLAPQISFAPEIASEEERKGMVAAWSQRLQTIWKEEPIPCTAHWHFGQ

SEQ ID NO: 9494 - protein, 193 aa, Homo sapiens; identical to SEQ ID NO: 9493

SEQ ID NO: 9495 - protein, 1299 aa, Homo sapiens
MPKKKRLSAGRVPLILFLCQMISALEVPLDPKLLEDLVQPPTITQQSPKDYIIDPRENIVIQCEAKGKPPPSFSWTRNGTHFDIDKDPLVTMKPGTGTLIINIMSEGKAETYEGVYQCTARNERGAAVSNNIVVRPSRSPLWTKEKLEPITLQSGQSLVLPCRPPIGLPPPIIFWMDNSFQRLPQSERVSQGLNGDLYFSNVLPEDTREDYICYARFNHTQTIQQKQPISVKVISVDELNDTIAANLSDTEFYGAKSSRERPPTFLTPEGNASNKEELRGNVLSLECIAEGLPTPIIYWAKEDGMLPKNRTVYKNFEKTLQIIHVSEADSGNYQCIAKNALGAIHHTISVRVKAAPYWITAPQNLVLSPGEDGTLICRANGNPKPRISWLTNGVPIEIAPDDPSRKIDGDTIIFSNVQERSSAVYQCNASNEYGYLLANAFVNVLAEPPRILTPANTLYQVIANRPALLDCAFFGSPLPTIEWFKGAKGSALHEDIYVLHENGTLEIPVAQKDSTGTYTCVARNKLGMAKNEVHLEIKDPTWIVKQPEYAVVQRGSMVSFECKVKHDHTLSLTVLWLKDNRELPSDERFTVDKDHLVVADVSDDDSGTYTCVANTTLDSVSASAVLSVVAPTPTPAPVYDVPNPPFDLELTDQLDKSVQLSWTPGDDNNSPITRIHHEYEDAMHKPGLWHHQTEVSGTQTTAQLKLSPYVNYSFRVMAVNSIGKSLPSEASEQYLTKASEPDKNPTAVEGLGSEPDNLVITWKPLNGFESNGPGLQYKVSWRQKDGDDEWTSVVVANVSKYIVSGTPTFVPYLIKVQALNDMGFAPEPAVVMGHSGEDLPMVAPGNVRVNVVNSTLAEVHWDPVPLKSIRGHLQGYRIYYWKTQSSSKRNRRHIEKKILTFQGSKTHGMLPGLEPFSHYTLNVRVVNGKGEGPASPDRVFNTPEGVPSAPSSLKIVNPTLDSLTLEWDPPSHPNGILTEYTLKYQPINSTHELGPLVDLKIPANKTRWTLKNLNFSTRYKFYFYAQTSAGSGSQITEEAVTTVDEAGILPPDVGAGKVQAVNPRISNLTAAAAETYANISWEYEGPEHVNFYVEYGVAGSKEEWRKEIVNGSRSFFGLKGLMPGTAYKVRVGAVGDSGFVSSEDVFETGPAMASRQVDIATQGWFIGLMCAVALLILILLIVCFIRRNKGGKYPVKEKEDAHADPEIQPMKEDDGTFGEYSDAEDHKPLKKGSRTPSDRTVKKEDSDDSLVDYGEGVNGQFNEDGSFIGQYSGKKEKEPAEGNESSEAPSPVNAMNSFV

SEQ ID NO: 9496 - protein, 106 aa, Homo sapiens
MQLKIMPKKKRLSAGRVPLILFLCQMISALEVPLDLVQPPTITQQSPKDYIIDPRENIVIQCEAKGKPPPSFSWTRNGTHFDIDKDPLVTMKPGTGTLIINIMSEG

SEQ ID NO: 9497 - protein, 106 aa, Homo sapiens; identical to SEQ ID NO: 9496

SEQ ID NO: 9498 - protein, 1183 aa, Homo sapiens
MQLKIMPKKKRLSAGRVPLILFLCQMISALEVPLDLVQPPTITQQSPKDYIIDPRENIVIQCEAKGKPPPSFSWTRNGTHFDIDKDPLVTMKPGTGTLIINIMSEGKAETYEGVYQCTARNERGAAVSNNIVVRPSRSPLWTKEKLEPITLQSGQSLVLPCRPPIGLPPPIIFWMDNSFQRLPQSERVSQGLNGDLYFSNVLPEDTREDYICYARFNHTQTIQQKQPISVKVISVDELNDTIAANLSDTEFYGAKSSRERPPTFLTPEGNASNKEELRGNVLSLECIAEGLPTPIIYWAKEDGMLPKNRTVYKNFEKTLQIIHVSEADSGNYQCIAKNALGAIHHTISVRVKAAPYWITAPQNLVLSPGEDGTLICRANGNPKPRISWLTNGVPIEIAPDDPSRKIDGDTIIFSNVQERSSAVYQCNASNEYGYLLANAFVNVLAEPPRILTPANTLYQVIANRPALLDCAFFGSPLPTIEWFKGAKGSALHEDIYVLHENGTLEIPVAQKDSTGTYTCVARNKLGMAKNEVHLEIKDPTWIVKQPEYAVVQRGSMVSFECKVKHDHTLSLTVLWLKDNRELPSDERFTVDKDHLVVADVSDDDSGTYTCVANTTLDSVSASAVLSVVDVPNPPFDLELTDQLDKSVQLSWTPGDDNNSPITKFIIEYEDAMHKPGLWHHQTEVSGTQTTAQLKLSPYVNYSFRVMAVNSIGKSLPSEASEQYLTKASEPDKNPTAVEGLGSEPDNLVITWKPLNGFESNGPGLQYKVSWRQKDGDDEWTSVVVANVSKYIVSGTPTFVPYLIKVQALNDMGFAPEPAVVMGHSGEDLPMVAPGNVRVNVVNSTLAEVHWDPVPLKSIRGHLQGYRIYYWKTQSSSKRNRRHIEKKILTFQGSKTHGMLPGLEPFSHYTLNVRVVNGKGEGPASPDRVFNTPEGVPSAPSSLKIVNPTLDSLTLEWDPPSHPNGILTEYTLKYQPINSTHELGPLVDLKIPANKTRWTLKNLNFSTRYKFYFYAQTSAGSGSQITEEAVTTVDEAMASRQVDIATQGWFIGLMCAVALLILILLIVCFIRRNKGGKYPVKEKEDAHADPEIQPMKEDDGTFGEYSDAEDHKPLKKGSRTPSDRTVKKEDSDDSLVDYGEGVNGQFNEDGSFIGQYSGKKEKEPAEGNESSEAPSPVNAMNSFV

SEQ ID NO: 9499 - protein, 431 aa, Homo sapiens
MQLKIMPKKKRLSAGRVPLILFLCQMISALEVPLDLVQPPTITQQSPKDYIIDPRENIVIQCEAKGKPPPSFSWTRNGTHFDIDKDPLVTMKPGTGTLIINIMSEGKAETYEGVYQCTARNERGAAVSNNIVVRPSRSPLWTKEKLEPITLQSGQSLVLPCRPPIGLPPPIIFWMDNSFQRLPQSERVSQGLNGDLYFSNVLPEDTREDYICYARFNHTQTIQQKQPISVKVISVDELNDTIAANLSDTEFYGAKSSRERPPTFLTPEGNASNKEELRGNVLSLECIAEGLPTPIIYWAKEDGMLPKNRTVYKNFEKTLQIIHVSEADSGNYQCIAKNALGAIHHTISVRVKAAPYWITAPQNLVLSPGEDGTLICRANGNPKPRISWLTNGVPIEIAPDDPSRKIDGDTIIFSNVQERSSAVYQCNASNE

SEQ ID NO: 9500 - protein, 771 aa, Homo sapiens [sequence omitted]

SEQ ID NO: 9501 - protein, 61 aa, Homo sapiens
MQLKIMPKKKRLSAGRVPLILFLCQMISALEVPLDPKLLEDLVQPPTITQQSPKDYIIDPR

SEQ ID NO: 9502 - protein, 118 aa, Homo sapiens
MQLKIMPKKKRLSAGRVPLILFLCQMISALEVPLDPKLLEDLVQPPTITQQSPKDYIIDPRENIVIQCEAKGKPPPSFSWTRNGTHFDIDKDPLVTMKPGTGTLIINIMSEGKAETYE

SEQ ID NO: 9503 - protein, 1192 aa, Homo sapiens
MQLKIMPKKKRLSAGRVPLILFLCQMISALEVPLDPKLLEDLVQPPTITQQSPKDYIIDPRENIVIQCEAKGKPPPSFSWTRNGTHFDIDKDPLVTMKPGTGTLIINIMSEGKAETYEGVYQCTARNERGAAVSNNIVVRPSRSPLWTKEKLEPITLQSGQSLVLPCRPPIGLPPPIIFWMDNSFQRLPQSERVSQGLNGDLYFSNVLPEDTREDYICYARFNHTQTIQQKQPISVKVISAKSSRERPPTFLTPEGNASNKEELRGNVLSLECIAEGLPTPIIYWAKEDGMLPKNRTVYKNFEKTLQIIHVSEADSGNYQCIAKNALGAIHHTISVRVKAAPYWITAPQNLVLSPGEDGTLICRANGNPKPRISWLTNGVPIEIAPDDPSRKIDGDTIIFSNVQERSSAVYQCNASNEYGYLLANAFVNVLAEPPRILTPANTLYQVIANRPALLDCAFFGSPLPTIEWFKGAKGSALHEDIYVLHENGTLEIPVAQKDSTGTYTCVARNKLGMAKNEVHLEIKDPTWIVKQPEYAVVQRGSMVSFECKVKHDHTLSLTVLWLKDNRELPSDERFTVDKDHLVVADVSDDDSGTYTCVANTTLDSVSASAVLSVVAPTPTPAPVYDVPNPPFDLELTDQLDKSVQLSWTPGDDNNSPITKFIIEYEDAMHKPGLWHHQTEVSGTQTTAQLKLSPYVNYSFRVMAVNSIGKSLPSEASEQYLTKASEPDKNPTAVEGLGSEPDNLVITWKPLNGFESNGPGLQYKVSWRQKDGDDEWTSVVVANVSKYIVSGTPTFVPYLIKVQALNDMGFAPEPAVVMGHSGEDLPMVAPGNVRVNVVNSTLAEVHWDPVPLKSIRGHLQGYRIYYWKTQSSSKRNRRHIEKKILTFQGSKTHGMLPGLEPFSHYTLNVRVVNGKGEGPASPDRVFNTPEGVPSAPSSLKIVNPTLDSLTLEWDPPSHPNGILTEYTLKYQPINSTHELGPLVDLKIPANKTRWTLKNLNFSTRYKFYFYAQTSAGSGSQITEEAVTTVDEAGILPPDVGAGKAMASRQVDIATQGWFIGLMCAVALLILILLIVCFIRRNKGGKYPVKEKEDAHADPEIQPMKEDDGTFGEYSDAEDHKPLKKGSRTPSDRTVKKEDSDDSLVDYGEGVNGQFNEDGSFIGQYSGKKEKEPAEGNESSEAPSPVNAMNSFV

SEQ ID NO: 9504 - protein, 1304 aa, Homo sapiens
MQLKIMPKKKRLSAGRVPLILFLCQMISALEVPLDPKLLEDLVQPPTITQQSPKDYIIDPRENIVIQCEAKGKPPPSFSWTRNGTHFDIDKDPLVTMKPGTGTLIINIMSEGKAETYEGVYQCTARNERGAAVSNNIVVRPSRSPLWTKEKLEPITLQSGQSLVLPCRPPIGLPPPIIFWMDNSFQRLPQSERVSQGLNGDLYFSNVLPEDTREDYICYARFNHTQTIQQKQPISVKVISVDELNDTIAANLSDTEFYGAKSSRERPPTFLTPEGNASNKEELRGNVLSLECIAEGLPTPIIYWAKEDGMLPKNRTVYKNFEKTLQIIHVSEADSGNYQCIAKNALGAIHHTISVRVKAAPYWITAPQNLVLSPGEDGTLICRANGNPKPRISWLTNGVPIEIAPDDPSRKIDGDTIIFSNVQERSSAVYQCNASNEYGYLLANAFVNVLAEPPRILTPANTLYQVIANRPALLDCAFFGSPLPTIEWFKGAKGSALHEDIYVLHENGTLEIPVAQKDSTGTYTCVARNKLGMAKNEVHLEIKDPTWIVKQPEYAVVQRGSMVSFECKVKHDHTLSLTVLWLKDNRELPSDERFTVDKDHLVVADVSDDDSGTYTCVANTTLDSVSASAVLSVVAPTPTPAPVYDVPNPPFDLELTDQLDKSVQLSWTPGDDNNSPITKFIIEYEDAMHKPGLWHHQTEVSGTQTTAQLKLSPYVNYSFRVMAVNSIGKSLPSEASEQYLTKASEPDKNPTAVEGLGSEPDNLVITWKPLNGFESNGPGLQYKVSWRQKDGDDEWTSVVVANVSKYIVSGTPTFVPYLIKVQALNDMGFAPEPAVVMGHSGEDLPMVAPGNVRVNVVNSTLAEVHWDPVPLKSIRGHLQGYRIYYWKTQSSSKRNRRHIEKKILTFQGSKTHGMLPGLEPFSHYTLNVRVVNGKGEGPASPDRVFNTPEGVPSAPSSLKIVNPTLDSLTLEWDPPSHPNGILTEYTLKYQPINSTHELGPLVDLKIPANKTRWTLKNLNFSTRYKFYFYAQTSAGSGSQITEEAVTTVDEAGILPPDVGAGKVQAVNPRISNLTAAAAETYANISWEYEGPEHVNFYVEYGVAGSKEEWRKEIVNGSRSFFGLKGLMPGTAYKVRVGAVGDSGFVSSEDVFETGPAMASRQVDIATQGWFIGLMCAVALLILILLIVCFIRRNKGGKYPVKEKEDAHADPEIQPMKEDDGTFGEYSDAEDHKPLKKGSRTPSDRTVKKEDSDDSLVDYGEGVNGQFNEDGSFIGQYSGKKEKEPAEGNESSEAPSPVNAMNSFV

SEQ ID NO: 9505 - protein, 1211 aa, Homo sapiens
MQLKIMPKKKRLSAGRVPLILFLCQMISALEVPLDPKLLEDLVQPPTITQQSPKDYIIDPRENIVIQCEAKGKPPPSFSWTRNGTHFDIDKDPLVTMKPGTGTLIINIMSEGKAETYEGVYQCTARNERGAAVSNNIVVRPSRSPLWTKEKLEPITLQSGQSLVLPCRPPIGLPPPIIFWMDNSFQRLPQSERVSQGLNGDLYFSNVLPEDTREDYICYARFNHTQTIQQKQPISVKVISVDELNDTIAANLSDTEFYGAKSSRERPPTFLTPEGNASNKEELRGNVLSLECIAEGLPTPIIYWAKEDGMLPKNRTVYKNFEKTLQIIHVSEADSGNYQCIAKNALGAIHHTISVRVKAAPYWITAPQNLVLSPGEDGTLICRANGNPKPRISWLTNGVPIEIAPDDPSRKIDGDTIIFSNVQERSSAVYQCNASNEYGYLLANAFVNVLAEPPRILTPANTLYQVIANRPALLDCAFFGSPLPTIEWFKGAKGSALHEDIYVLHENGTLEIPVAQKDSTGTYTCVARNKLGMAKNEVHLEIKDPTWIVKQPEYAVVQRGSMVSFECKVKHDHTLSLTVLWLKDNRELPSDERFTVDKDHLVVADVSDDDSGTYTCVANTTLDSVSASAVLSVVAPTPTPAPVYDVPNPPFDLELTDQLDKSVQLSWTPGDDNNSPITKFIIEYEDAMHKPGLWHHQTEVSGTQTTAQLKLSPYVNYSFRVMAVNSIGKSLPSEASEQYLTKASEPDKNPTAVEGLGSEPDNLVITWKPLNGFESNGPGLQYKVSWRQKDGDDEWTSVVVANVSKYIVSGTPTFVPYLIKVQALNDMGFAPEPAVVMGHSGEDLPMVAPGNVRVNVVNSTLAEVHWDPVPLKSIRGHLQGYRIYYWKTQSSSKRNRRHIEKKILTFQGSKTHGMLPGLEPFSHYTLNVRVVNGKGEGPASPDRVFNTPEGVPSAPSSLKIVNPTLDSLTLEWDPPSHPNGILTEYTLKYQPINSTHELGPLVDLKIPANKTRWTLKNLNFSTRYKFYFYAQTSAGSGSQITEEAVTTVDEAGILPPDVGAGKAMASRQVDIATQGWFIGLMCAVALLILILLIVCFIRRNKGGKYPVKEKEDAHADPEIQPMKEDDGTFGEYSDAEDHKPLKKGSRTPSDRTVKKEDSDDSLVDYGEGVNGQFNEDGSFIGQYSGKKEKEPAEGNESSEAPSPVNAMNSFV

SEQ ID NO: 9506 - protein, 1304 aa, Homo sapiens; identical to SEQ ID NO: 9504

SEQ ID NO: 9507 - protein, 190 aa, Homo sapiens
  SITE 1: note = misc_feature - Xaa can be any naturally occurring amino acid
XGILPPDVGAGKVQAVNPRISNLTAAAAETYANISWEYEGPEHVNFYVEYGVAGTMASRQVDIATQGWFIGLMCAVALLILILLIVCFIRRNKGGKYPVKEKEDAHADPEIQPMKEDDGTFGEYSDAEDHKPLKKGSRTPSDRTVKKEDSDDSLVDYGEGVNGQFNEDGSFIGQYSGKKEKEPAEGNESS

SEQ ID NO: 9508 - protein, 296 aa, Homo sapiens
MEIYSPDMSEVAAERSSSPSTQLSADPSLDGLPAAEDMPEPQTEDGRTPGLVGLAVPCCACLEAERLRGCLNSEKICIVPILACLVSLCLCIAGLKWVFVDKIFEYDSPTHLDPGGLGQDPIISLDATAASAVWVSSEAYTSPVSRAQSESEVQVTVQGDKAVVSFEPSAAPTPKNRIFAFSFLPSTAPSFPSPTRNPEVRTPKSATQPQTTETNLQTAPKLSTSTSTTGTSHLVKCAEKEKTFCVNGGECFMVKDLSNPSRYLCKCPNEFTGDRCQNYVMASFYSTSTPFLSLPE

SEQ ID NO: 9509 - protein, 590 aa, Homo sapiens
MGKGRAGRVGTTALPPRLKEMKSQESAAGSKLVLRCETSSEYSSLRFKWFKNGNELNRKNKPQNIKIQKKPGKSELRINKASLADSGEYMCKVISKLGNDSASANITIVESNATSTSTTGTSHLVKCAEKEKTFCVNGGECFMVKDLSNPSRYLCKCPNEFTGDRCQNYVMASFYKHLGIEFMEAEELYQKRVLTITGICIALLVVGIMCVVAYCKTKKQRKKLHDRLRQSLRSERNNMMNIANGPHHPNPPPENVQLVNQYVSKNVISSEHIVEREAETSFSTSHYTSTAHHSTTVTQTPSHSWSNGHTESILSESHSVIVMSSVENSRHSSPTGGPRGRLNGTGGPRECNSFLRHARETPDSYRDSPHSERYVSAMTTPARMSPVDFHTPSSPKSPPSEMSPPVSSMTVSMPSMAVSPFMEEERPLLLVTPPRLREKKFDHHPQQFSSFHHNPAHDSNSLPASPLRIVEDEEYETTQEYEPAQEPVKKLANSRRAKRTKPNGHIANRLEVDSNTSSQSSNSESETEDERVGEDTPFLGIQNPLAASLEATPAFRLADSRTNPAGRFSTQEEIQARLSSVIANQDPIAV

SEQ ID NO: 9510 - protein, 481 aa, Homo sapiens
MGKGRAGRVGTTALPPRLKEMKSQESAAGSKLVLRCETSSEYSSLRFKWFKNGNELNRKNKPQNIKIQKKPGKSELRINKASLADSGEYMCKVISKLGNDSASANITIVESNEIITGMPASTEGAYVSSATSTSTTGTSHLVKCAEKEKTFCVNGGECFMVKDLSNPSRYLCKCPNEFTGDRCQNYVMASFYKHLGIEFMEAEELYQKRVLTITGICIALLVVGIMCVVAYCKTKKQRKKLHDRLRQSLRSERNNMMNIANGPHHPNPPPENVQLVNQYVSKNVISSEHIVEREAETSFSTSHYTSTAHHSTTVTQTPSHSWSNGHTESILSESHSVIVMSSVENSRHSSPTGGPRGRLNGTGGPRECNSFLRHARETPDSYRDSPHSERYVSAMTTPARMSPVDFHTPSSPKSPPSEMSPPVSSMTVSMPSMAVSPFMEEERPLLLVTPPRLREKKFDHHPQQFSSFHHNPAHDSNSLPA

SEQ ID NO: 9511 - protein, 193 aa, Homo sapiens
MKKRNEMIFLATLKNKALPPRLKEMKSQESAAGSKLVLRCETSSEYSSLRFKWFKNGNELNRKNKPQNIKIQKKPGKSELRINKASLADSGEYMCKVISKLGNDSASANITIVESNEIITGMPASTEGAYVSSESPIRISVSTEGANTSSSTSTSTTGTSHLVKCAEKEKTFCVNGGECFMVKDLSNPSRYLC

SEQ ID NO: 9512 - protein, 135 aa, Homo sapiens
MQIPKHISIEDITATSTSTTGTSHLVKCAEKEKTFCVNGGECFMVKDLSNPSRYLCKCPNEFTGDRCQNYVMASFYKAEELYQKRVLTITGICIALLVVGIMCVVAYCKTKKQRKKLHDRLRQSLRSERNNMMNI

SEQ ID NO: 9513 - protein, 101 aa, Homo sapiens
MQIPKHISIEDITATSTSTTGTSHLVKCAEKEKTFCVNGGECFMVKDLSNPSRYLCKCPNEFTGDRCQNYVMASFYKHLGIEFMEAEELYQKRVLTITGIC

SEQ ID NO: 9514 - protein, 129 aa, Homo sapiens
MQIPKHISIEDITATSTSTTGTSHLVKCAEKEKTFCVNGGECFMVKDLSNPSRYLCKCQPGFTGARCTENVPMKVQNQEKAEELYQKRVLTITGICIALLVVGIMCVVAYCKTKKQRKKLHDRLRQSLR

SEQ ID NO: 9515 - protein, 308 aa, Homo sapiens
MQIPKHISIEDITATSTSTTGTSHLVKCAEKEKTFCVNGGECFMVKDLSNPSRYLCKCQPGFTGARCTENVPMKVQNQEKAEELYQKRVLTITGICIALLVVGIMCVVAYCKTKKQRKKLHDRLRQSLRSERNNMMNIANGPHHPNPPPENVQLVNQYVSKNVISSEHIVEREAETSFSTSHYTSTAHHSTTVTQTPSHSWSNGHTESILSESHSVIVMSSVENSRHSSPTGGPRGRLNGTGGPRECNSFLRHARETPDSYRDSPHSERHNLIAELRRNKAHRSKCMQIQLSATHLRSSSIPHLGFIL

SEQ ID NO: 9516 - protein, 254 aa, Homo sapiens [sequence omitted]

SEQ ID NO: 9517 - protein, 422 aa, Homo sapiens
MRWRRAPRRSGRPGPRAQRPGSAARSSPPLPLLPLLLLLGTAALAPGAAAGNEAAPAGASVCYSSPPSVGSVQELAQRAAVVIEGKVHPQRRQQGALDRKAAAAAGEAGAWGGDREPPAAGPRALGPPAEEPLLAANGTVPSWPTAPVPSAGEPGEEAPYLVKVHQVWAVKAGGLKKDSLLTVRLGTWGHPAFPSCGRLKEDSRYIFFMEPDANSTSRAPAAFRASFPPLETGRNLKKEVSRVLCKRCALPPRLKEMKSQESAAGSKLVLRCETSSEYSSLRFKWFKNGNELNRKNKPQNIKIQKKPGKSELRINKASLADSGEYMCKVISKLGNDSASANITIVESNATSTSTTGTSHLVKCAEKEKTFCVNGGECFMVKDLSNPSRYLCKCPNEFTGDRCQNYVMASFYSTSTPFLSLPE

SEQ ID NO: 9518 - protein, 637 aa, Homo sapiens
MSERKEGRGKGKGKKKERGSGKKPESAAGSQSPALPPRLKEMKSQESAAGSKLVLRCETSSEYSSLRFKWFKNGNELNRKNKPQNIKIQKKPGKSELRINKASLADSGEYMCKVISKLGNDSASANITIVESNEIITGMPASTEGAYVSSESPIRISVSTEGANTSSSTSTSTTGTSHLVKCAEKEKTFCVNGGECFMVKDLSNPSRYLCKCPNEFTGDRCQNYVMASFYKAEELYQKRVLTITGICIALLVVGIMCVVAYCKTKKQRKKLHDRLRQSLRSERNNMMNIANGPHHPNPPPENVQLVNQYVSKNVISSEHIVEREAETSFSTSHYTSTAHHSTTVTQTPSHSWSNGHTESILSESHSVIVMSSVENSRHSSPTGGPRGRLNGTGGPRECNSFLRHARETPDSYRDSPHSERYVSAMTTPARMSPVDFHTPSSPKSPPSEMSPPVSSMTVSMPSMAVSPFMEEERPLLLVTPPRLREKKFDHHPQQFSSFHHNPAHDSNSLPASPLRIVEDEEYETTQEYEPAQEPVKKLANSRRAKRTKPNGHIANRLEVDSNTSSQSSNSESETEDERVGEDTPFLGIQNPLAASLEATPAFRLADSRTNPAGRFSTQEEIQARLSSVIANQDPIAV

SEQ ID NO: 9519 - protein, 420 aa, Homo sapiens
MSERKEGRGKGKGKKKERGSGKKPESAAGSQSPALPPRLKEMKSQESAAGSKLVLRCETSSEYSSLRFKWFKNGNELNRKNKPQNIKIQKKPGKSELRINKASLADSGEYMCKVISKLGNDSASANITIVESNEIITGMPASTEGAYVSSESPIRISVSTEGANTSSSTSTSTTGTSHLVKCAEKEKTFCVNGGECFMVKDLSNPSRYLCKCPNEFTGDRCQNYVMASFYKAEELYQKRVLTITGICIALLVVGIMCVVAYCKTKKQRKKLHDRLRQSLRSERNNMMNIANGPHHPNPPPENVQLVNQYVSKNVISSEHIVEREAETSFSTSHYTSTAHHSTTVTQTPSHSWSNGHTESILSESHSVIVMSSVENSRHSSPTGGPRGRLNGTGGPRECNSFLRHARETPDSYRDSPHSER

SEQ ID NO: 9520 - protein, 645 aa, Homo sapiens
MSERKEGRGKGKGKKKERGSGKKPESAAGSQSPALPPRLKEMKSQESAAGSKLVLRCETSSEYSSLRFKWFKNGNELNRKNKPQNIKIQKKPGKSELRINKASLADSGEYMCKVISKLGNDSASANITIVESNEIITGMPASTEGAYVSSESPIRISVSTEGANTSSSTSTSTTGTSHLVKCAEKEKTFCVNGGECFMVKDLSNPSRYLCKCPNEFTGDRCQNYVMASFYKHLGIEFMEAEELYQKRVLTITGICIALLVVGIMCVVAYCKTKKQRKKLHDRLRQSLRSERNNMMNIANGPHHPNPPPENVQLVNQYVSKNVISSEHIVEREAETSFSTSHYTSTAHHSTTVTQTPSHSWSNGHTESILSESHSVIVMSSVENSRHSSPTGGPRGRLNGTGGPRECNSFLRHARETPDSYRDSPHSERYVSAMTTPARMSPVDFHTPSSPKSPPSEMSPPVSSMTVSMPSMAVSPFMEEERPLLLVTPPRLREKKFDHHPQQFSSFHHNPAHDSNSLPASPLRIVEDEEYETTQEYEPAQEPVKKLANSRRAKRTKPNGHIANRLEVDSNTSSQSSNSESETEDERVGEDTPFLGIQNPLAASLEATPAFRLADSRTNPAGRFSTQEEIQARLSSVIANQDPIAV

SEQ ID NO: 9521 - protein, 640 aa, Homo sapiens
MSERKEGRGKGKGKKKERGSGKKPESAAGSQSPALPPRLKEMKSQESAAGSKLVLRCETSSEYSSLRFKWFKNGNELNRKNKPQNIKIQKKPGKSELRINKASLADSGEYMCKVISKLGNDSASANITIVESNEIITGMPASTEGAYVSSESPIRISVSTEGANTSSSTSTSTTGTSHLVKCAEKEKTFCVNGGECFMVKDLSNPSRYLCKCQPGFTGARCTENVPMKVQNQEKAEELYQKRVLTITGICIALLVVGIMCVVAYCKTKKQRKKLHDRLRQSLRSERNNMMNIANGPHHPNPPPENVQLVNQYVSKNVISSEHIVEREAETSFSTSHYTSTAHHSTTVTQTPSHSWSNGHTESILSESHSVIVMSSVENSRHSSPTGGPRGRLNGTGGPRECNSFLRHARETPDSYRDSPHSERYVSAMTTPARMSPVDFHTPSSPKSPPSEMSPPVSSMTVSMPSMAVSPFMEEERPLLLVTPPRLREKKFDHHPQQFSSFHHNPAHDSNSLPASPLRIVEDEEYETTQEYEPAQEPVKKLANSRRAKRTKPNGHIANRLEVDSNTSSQSSNSESETEDERVGEDTPFLGIQNPLAASLEATPAFRLADSRTNPAGRFSTQEEIQARLSSVIANQDPIAV

SEQ ID NO: 9522 - protein, 462 aa, Homo sapiens
MSERKEGRGKGKGKKKERGSGKKPESAAGSQSPALPPRLKEMKSQESAAGSKLVLRCETSSEYSSLRFKWFKNGNELNRKNKPQNIKIQKKPGKSELRINKASLADSGEYMCKVISKLGNDSASANITIVESNEIITGMPASTEGAYVSSESPIRISVSTEGANTSSSTSTSTTGTSHLVKCAEKEKTFCVNGGECFMVKDLSNPSRYLCKCQPGFTGARCTENVPMKVQNQEKAEELYQKRVLTITGICIALLVVGIMCVVAYCKTKKQRKKLHDRLRQSLRSERNNMMNIANGPHHPNPPPENVQLVNQYVSKNVISSEHIVEREAETSFSTSHYTSTAHHSTTVTQTPSHSWSNGHTESILSESHSVIVMSSVENSRHSSPTGGPRGRLNGTGGPRECNSFLRHARETPDSYRDSPHSERHNLIAELRRNKAHRSKCMQIQLSATHLRSSSIPHLGFIL

SEQ ID NO: 9523 - protein, 196 aa, Homo sapiens
PQTEDGRTPGLVGLAVPCCACLEAERLRGCLNSEKICIVPILACLVSLCLCIAGLKWVFVDKIFEYDSPTHLDPGGLGQDPIISLDATAASAVWVSSEAYTSPVSRAQSESEVQVTVQGDKAVVSFEPSAAPTPKNRIFAFSFLPSTAPSFPSPTRNPEVRTPKSATQPQTTETNLQTAPKLCAQMSLLVIAAKTT

SEQ ID NO: 9524 - protein, 713 aa, Homo sapiens
VPSAGEPGEEAPYLVKVHQVWAVKAGGLKKDSLLTVRLGTWGHPAFPSCGRLKEDSRYIFFMEPDANSTSRAPAAFRASFPPLETGRNLKKEVSRVLCKRCALPPRLKEMKSQESAAGSKLVLRCETSSEYSSLRFKWFKNGNELNRKNKPQNIKIQKKPGKSELRINKASLADSGEYMCKVISKLGNDSASANITIVESNEIITGMPASTEGAYVSSESPIRISVSTEGANTSSSTSTSTTGTSHLVKCAEKEKTFCVNGGECFMVKDLSNPSRYLCKCPNEFTGDRCQNYVMASFYKHLGIEFMEAEELYQKRVLTITGICIALLVVGIMCVVAYCKTKKQRKKLHDRLRQSLRSERNNMMNIANGPHHPNPPPENVQLVNQYVSKNVISSEHIVEREAETSFSTSHYTSTAHHSTTVTQTPSHSWSNGHTESILSESHSVIVMSSVENSRHSSPTGGPRGRLNGTGGPRECNSFLRHARETPDSYRDSPHSERYVSAMTTPARMSPVDFHTPSSPKSPPSEMSPPVSSMTVSMPSMAVSPFMEEERPLLLVTPPRLREKKFDHHPQQFSSFHHNPAHDSNSLPASPLRIVEDEEYETTQEYEPAQEPVKKLANSRRAKRTKPNGHIANRLEVDSNTSSQSSNSESETEDERVGEDTPFLGIQNPLAASLEATPAFRLADSRTNPAGRFSTQEEIQARLSSVIANQDPIAV

SEQ ID NO: 9525 - protein, 126 aa, Homo sapiens
  SITE 1: note = misc_feature - Xaa can be any naturally occurring amino acid
XASANITIVESNEIITGMPASTEGAYVSSESPIRISVSTEGANTSSSTSTSTTGTSHLVKCAEKEKTFCVNGGECFMVKDLSNPSRYLCKCQPGFTGARCTENVPMKVQNQESAQMSLLVIAAKTT

SEQ ID NO: 9526 - protein, 165 aa, Homo sapiens
MMRCCRRRCCCRQPPHALRPLLLLPLVLLPPLAAAAAGPNRCDTIYQGFAECLIRLGDSMGRGGELETICRSWNDFHACASQVLSGCPEEAAAVWESLQQEARQAPRPNNLHTLCGAPVHVRERGTGSETNQETLRATAPALPMAPAPPLLAAALALAYLLRPLA

SEQ ID NO: 9527 - protein, 87 aa, Homo sapiens
MTSMPVPLRSCQAVRRRQLQCGNHYSKKLARPPVRITCTLCAVPRCMFGSAAQAPKPTRRRCGLQRLHSPWPLRPHCWRLLWLWPTS

SEQ ID NO: 9528 - protein, 88 aa, Homo sapiens
  SITE 1: note = misc_feature - Xaa can be any naturally occurring amino acid
XRCCRRRCCCRQPPHALRPLLLLPLVLLPPLAAAAAGPNRCDTIYQGFAECLIRLGDSMGRGGELETICSTVDKEYLIVLREPGGWMS

SEQ ID NO: 9529 - protein, 923 aa, Homo sapiens
MERGLPLLCAVLALVLAPAGAFRNDKCGDTIKIESPGYLTSPGYPHSYHPSEKCEWLIQAPDPYQRIMINFNPHFDLEDRDCKYDYVEVFDGENENGHFRGKFCGKIAPPPVVSSGPFLFIKFVSDYETHGAGFSIRYEIFKRGPECSQNYTTPSGVIKSPGFPEKYPNSLECTYIVFVPKMSEIILEFESFDLEPDSNPPGGMFCRYDRLEIWDGFPDVGPHIGRYCGQKTPGRIRSSSGILSMVFYTDSAIAKEGFSANYSVLQSSVSEDFKCMEALGMESGEIHSDQITASSQYSTNWSAERSRLNYPENGWTPGEDSYREWIQVDLGLLRFVTAVGTQGAISKETKKKYYVKTYKIDVSSNGEDWITIKEGNKPVLFQGNTNPTDVVVAVFPKPLITRFVRIKPATWETGISMRFEVYGCKITDYPCSGMLGMVSGLISDSQITSSNQGDRNWMPENIRLVTSRSGWALPPAPHSYINEWLQIDLGEEKIVRGIIIQGGKHRENKVFMRKFKIGYSNNGSDWKMIMDDSKRKAKSFEGNNNYDTPELRTFPALSTRFIRIYPERATHGGLGLRMELLGCEVEAPTAGPTTPNGNLVDECDDDQANCHSGTGDDFQLTGGTTVLATEKPTVIDSTIQSEFPTYGFNCEFGWGSHKTFCHWEHDNHVQLKWSVLTSKTGPIQDHTGDGNFIYSQADENQKGKVARLVSPVVYSQNSAHCMTFWYHMSGSHVGTLRVKLRYQKPEEYDQLVWMAIGHQGDHWKEGRVLLHKSLKLYQVIFEGEIGKGNLGGIAVDDISINNHISQEDCAKPADLDKKNPEIKIDETGSTPGYEGEGEGDKNISRKPGNVLKTLDPILITIIAMSALGVLLGAVCGVVLYCACWHNGMSERNLSALENYNFELVDGVKLKKDKLNTQSTYSEA

SEQ ID NO: 9530 - protein, 641 aa, Homo sapiens
MERGLPLLCAVLALVLAPAGAFRNDKCGDTIKIESPGYLTSPGYPHSYHPSEKCEWLIQAPDPYQRIMINFNPHFDLEDRDCKYDYVEVFDGENENGHFRGKFCGKIAPPPVVSSGPFLFIKFVSDYETHGAGFSIRYEIFKRGPECSQNYTTPSGVIKSPGFPEKYPNSLECTYIVFVPKMSEIILEFESFDLEPDSNPPGGMFCRYDRLEIWDGFPDVGPHIGRYCGQKTPGRIRSSSGILSMVFYTDSAIAKEGFSANYSVLQSSVSEDFKCMEALGMESGEIHSDQITASSQYSTNWSAERSRLNYPENGWTPGEDSYREWIQVDLGLLRFVTAVGTQGAISKETKKKYYVKTYKIDVSSNGEDWITIKEGNKPVLFQGNTNPTDVVVAVFPKPLITRFVRIKPATWETGISMRFEVYGCKITDYPCSGMLGMVSGLISDSQITSSNQGDRNWMPENIRLVTSRSGWALPPAPHSYINEWLQIDLGEEKIVRGIIIQGGKHRENKVFMRKFKIGYSNNGSDWKMIMDDSKRKAKSFEGNNNYDTPELRTFPALSTRFIRIYPERATHGGLGLRMELLGCEVEGTINTDQECPCARALAKDAKKKKRWADSTHCRCVRSIHGEMWSSGKGVCSLDANL

SEQ ID NO: 9531 - protein, 704 aa, Homo sapiens
MERGLPLLCAVLALVLAPAGAFRNDKCGDTIKIESPGYLTSPGYPHSYHPSEKCEWLIQAPDPYQRIMINFNPHFDLEDRDCKYDYVEVFDGENENGHFRGKFCGKIAPPPVVSSGPFLFIKFVSDYETHGAGFSIRYEIFKRGPECSQNYTTPSGVIKSPGFPEKYPNSLECTYIVFVPKMSEIILEFESFDLEPDSNPPGGMFCRYDRLEIWDGFPDVGPHIGRYCGQKTPGRIRSSSGILSMVFYTDSAIAKEGFSANYSVLQSSVSEDFKCMEALGMESGEIHSDQITASSQYSTNWSAERSRLNYPENGWTPGEDSYREWIQVDLGLLRFVTAVGTQGAISKETKKKYYVKTYKIDVSSNGEDWITIKEGNKPVLFQGNTNPTDVVVAVFPKPLITRFVRIKPATWETGISMRFEVYGCKITDYPCSGMLGMVSGLISDSQITSSNQGDRNWMPENIRLVTSRSGWALPPAPHSYINEWLQIDLGEEKIVRGIIIQGGKHRENKVFMRKFKIGYSNNGSDWKMIMDDSKRKAKSFEGNNNYDTPELRTFPALSTRFIRIYPERATHGGLGLRMELLGCEVEAPTAGPTTPNGNLVDECDDDQANCHSGTGDDFQLTGAETIFIPLLYHFSSCLSWDQLTPVCVLVTPHGRELPRNRSCLARTRASSFPHVIWIDELFLIATTICNNNLSHFESQRLGLS

SEQ ID NO: 9532 - protein, 644 aa, Homo sapiens
MERGLPLLCAVLALVLAPAGAFRNDKCGDTIKIESPGYLTSPGYPHSYHPSEKCEWLIQAPDPYQRIMINFNPHFDLEDRDCKYDYVEVFDGENENGHFRGKFCGKIAPPPVVSSGPFLFIKFVSDYETHGAGFSIRYEIFKRGPECSQNYTTPSGVIKSPGFPEKYPNSLECTYIVFVPKMSEIILEFESFDLEPDSNPPGGMFCRYDRLEIWDGFPDVGPHIGRYCGQKTPGRIRSSSGILSMVFYTDSAIAKEGFSANYSVLQSSVSEDFKCMEALGMESGEIHSDQITASSQYSTNWSAERSRLNYPENGWTPGEDSYREWIQVDLGLLRFVTAVGTQGAISKETKKKYYVKTYKIDVSSNGEDWITIKEGNKPVLFQGNTNPTDVVVAVFPKPLITRFVRIKPATWETGISMRFEVYGCKITDYPCSGMLGMVSGLISDSQITSSNQGDRNWMPENIRLVTSRSGWALPPAPHSYINEWLQIDLGEEKIVRGIIIQGGKHRENKVFMRKFKIGYSNNGSDWKMIMDDSKRKAKSFEGNNNYDTPELRTFPALSTRFIRIYPERATHGGLGLRMELLGCEVEAPTAGPTTPNGNLVDECDDDQANCHSGTGDDFQLTGGTTVLATEKPTVIDSTIQSGIK

SEQ ID NO: 9533 - protein, 923 aa, Homo sapiens; identical to SEQ ID NO: 9529

SEQ ID NO: 9534 - protein, 609 aa, Homo sapiens
MERGLPLLCAVLALVLAPAGAFRNDKCGDTIKIESPGYLTSPGYPHSYHPSEKCEWLIQAPDPYQRIMINFNPHFDLEDRDCKYDYVEVFDGENENGHFRGKFCGKIAPPPVVSSGPFLFIKFVSDYETHGAGFSIRYEIFKRGPECSQNYTTPSGVIKSPGFPEKYPNSLECTYIVFVPKMSEIILEFESFDLEPDSNPPGGMFCRYDRLEIWDGFPDVGPHIGRYCGQKTPGRIRSSSGILSMVFYTDSAIAKEGFSANYSVLQSSVSEDFKCMEALGMESGEIHSDQITASSQYSTNWSAERSRLNYPENGWTPGEDSYREWIQVDLGLLRFVTAVGTQGAISKETKKKYYVKTYKIDVSSNGEDWITIKEGNKPVLFQGNTNPTDVVVAVFPKPLITRFVRIKPATWETGISMRFEVYGCKITDYPCSGMLGMVSGLISDSQITSSNQGDRNWMPENIRLVTSRSGWALPPAPHSYINEWLQIDLGEEKIVRGIIIQGGKHRENKVFMRKFKIGYSNNGSDWKMIMDDSKRKAKSFEGNNNYDTPELRTFPALSTRFIRIYPERATHGGLGLRMELLGCEVEGGTTVLATEKPTVIDSTIQSGIK

SEQ ID NO: 9535 - protein, 597 aa, Homo sapiens
MERGLPLLCAVLALVLAPAGAFRNDKCGDTIKIESPGYLTSPGYPHSYHPSEKCEWLIQAPDPYQRIMINFNPHFDLEDRDCKYDYVEVFDGENENGHFRGKFCGKIAPPPVVSSGPFLFIKFVSDYETHGAGFSIRYEIFKRGPECSQNYTTPSGVIKSPGFPEKYPNSLECTYIVFVPKMSEIILEFESFDLEPDSNPPGGMFCRYDRLEIWDGFPDVGPHIGRYCGQKTPGRIRSSSGILSMVFYTDSAIAKEGFSANYSVLQSSVSEDFKCMEALGMESGEIHSDQITASSQYSTNWSAERSRLNYPENGWTPGEDSYREWIQVDLGLLRFVTAVGTQGAISKETKKKYYVKTYKIDVSSNGEDWITIKEGNKPVLFQGNTNPTDVVVAVFPKPLITRFVRIKPATWETGISMRFEVYGCKITDYPCSGMLGMVSGLISDSQITSSNQGDRNWMPENIRLVTSRSGWALPPAPHSYINEWLQIDLGEEKIVRGIIIQGGKHRENKVFMRKFKIGYSNNGSDWKMIMDDSKRKAKVRAGDWEEVIPYVLDFNQGPLAFSRGRASYFLPAMTLEEVCDGVSKTLDSRKTGIWHEK

SEQ ID NO: 9536 - protein, 906 aa, Homo sapiens
MERGLPLLCAVLALVLAPAGAFRNDKCGDTIKIESPGYLTSPGYPHSYHPSEKCEWLIQAPDPYQRIMINFNPHFDLEDRDCKYDYVEVFDGENENGHFRGKFCGKIAPPPVVSSGPFLFIKFVSDYETHGAGFSIRYEIFKRGPECSQNYTTPSGVIKSPGFPEKYPNSLECTYIVFVPKMSEIILEFESFDLEPDSNPPGGMFCRYDRLEIWDGFPDVGPHIGRYCGQKTPGRIRSSSGILSMVFYTDSAIAKEGFSANYSVLQSSVSEDFKCMEALGMESGEIHSDQITASSQYSTNWSAERSRLNYPENGWTPGEDSYREWIQVDLGLLRFVTAVGTQGAISKETKKKYYVKTYKIDVSSNGEDWITIKEGNKPVLFQGNTNPTDVVVAVFPKPLITRFVRIKPATWETGISMRFEVYGCKITDYPCSGMLGMVSGLISDSQITSSNQGDRNWMPENIRLVTSRSGWALPPAPHSYINEWLQIDLGEEKIVRGIIIQGGKHRENKVFMRKFKIGYSNNGSDWKMIMDDSKRKAKSFEGNNNYDTPELRTFPALSTRFIRIYPERATHGGLGLRMELLGCEVEAPTAGPTTPNGNLVDECDDDQANCHSGTGDDFQLTGGTTVLATEKPTVIDSTIQSEFPTYGFNCEFGWGSHKTFCHWEHDNHVQLKWSVLTSKTGPIQDHTGDGNFIYSQADENQKGKVARLVSPVVYSQNSAHCMTFWYHMSGSHVGTLRVKLRYQKPEEYDQLVWMAIGHQGDHWKEGRVLLHKSLKLYQVIFEGEIGKGNLGGIAVDDISINNHISQEDCARSTPGYEGEGEGDKNISRKPGNVLKTLDPILITIIAMSALGVLLGAVCGVVLYCACWHNGMSERNLSALENYNFELVDGVKLKKDKLNTQSTYSEA

SEQ ID NO: 9537 - protein, 735 aa, Homo sapiens
MSEIILEFESFDLEPDSNPPGGMFCRYDRLEIWDGFPDVGPHIGRYCGQKTPGRIRSSSGILSMVFYTDSAIAKEGFSANYSVLQSSVSEDFKCMEALGMESGEIHSDQITASSQYSTNWSAERSRLNYPENGWTPGEDSYREWIQVDLGLLRFVTAVGTQGAISKETKKKYYVKTYKIDVSSNGEDWITIKEGNKPVLFQGNTNPTDVVVAVFPKPLITRFVRIKPATWETGISMRFEVYGCKITDYPCSGMLGMVSGLISDSQITSSNQGDRNWMPENIRLVTSRSGWALPPAPHSYINEWLQIDLGEEKIVRGIIIQGGKHRENKVFMRKFKIGYSNNGSDWKMIMDDSKRKAKSFEGNNNYDTPELRTFPALSTRFIRIYPERATHGGLGLRMELLGCEVEAPTAGPTTPNGNLVDECDDDQANCHSGTGGTTVLATEKPTVIDSTIQSEFPTYGFNCEFGWGSHKTFCHWEHDNHVQLKWSVLTSKTGPIQDHTGDGNFIYSQADENQKGKVARLVSPVVYSQNSAHCMTFWYHMSGSHVGTLRVKLRYQKPEEYDQLVWMAIGHQGDHWKEGRVLLHKSLKLYQVIFEGEIGKGNLGGIAVDDISINNHISQEDCAKPADLDKKNPEIKIDETGSTPGYEGEGEGDKNISRKPGNVLKTLDPILITIIAMSALGVLLGAVCGVVLYCACWHNGMSERNLSALENYNFELVDGVKLKKDKLNTQSTYSEA

SEQ ID NO: 9538 - protein, 105 aa, Homo sapiens
NHISQEDCARSTPGYEGEGEGDKNISRKPGNVLKTLDPILITIIAMSALGVLLGAVCGVVLYCACWHNGMSERNLSALENYNFELVDGVKLKKDKLNTQSTYSEA

SEQ ID NO: 9539 - protein, 60 aa, Homo sapiens
  SITE 1: note = misc_feature - Xaa can be any naturally occurring amino acid
XINEWLQIDLGEEKIVRGIIIQGGKHRENKVFMRKFKIGYSNNGSDWKMIMDDSKRKALI

SEQ ID NO: 9540 - protein, 170 aa, Homo sapiens
  SITE 1: note = misc_feature - Xaa can be any naturally occurring amino acid
XPGGMFCRYDRLEIWDGFPDVGPHIGRYCGQKTPGRIRSSSGILSMVFYTDSAIAKEGFSANYSVLQSSVSEDFKCMEALGMESGEIHSDQITASSQYSTNWSAERSRLNYPENGWTPGEDSYREWIQDAKYRLRVSVVRSKSSSSSTSLEPRPLSSLKLSFFSYKIKIT

SEQ ID NO: 9541 - protein, 77 aa, Homo sapiens
  SITE 1: note = misc_feature - Xaa can be any naturally occurring amino acid
XPTAGPTTPNGNLVDECDDDQANCHSGTGDDFQLTGGTTVLATEKPTVIDSTIQSARLEVSTLNLSLHNPPQQKALI

SEQ ID NO: 9542 - protein, 100 aa, Homo sapiens
  SITE 1: note = misc_feature - Xaa can be any naturally occurring amino acid
XTHGGLGLRMELLGCEVEAPTAGPTTPNGNLVDECDDDQANCHSGTGDDFQLTGGTTVLATEKPTVIDSTIQSGSRFFKHHHKQQSMRPQNLHHNSILLL

SEQ ID NO: 9543 - protein, 102 aa, Homo sapiens
MDMFPLTWVFLALYFSRHQVRGQPDPPCGGRLNSKDAGYITSPGYPQDYPSHQNCEWIVYAPEPNQKIVLNFNPHFEIEKHDCKYDFIEIRDGDSESADLLG

SEQ ID NO: 9544 - protein, 906 aa, Homo sapiens
MDMFPLTWVFLALYFSRHQVRGQPDPPCGGRLNSKDAGYITSPGYPQDYPSHQNCEWIVYAPEPNQKIVLNFNPHFEIEKHDCKYDFIEIRDGDSESADLLGKHCGNIAPPTIISSGSMLYIKFTSDYARQGAGFSLRYEIFKTGSEDCSKNFTSPNGTIESPGFPEKYPHNLDCTFTILAKPKMEIILQFLIFDLEHDPLQVGEGDCKYDWLDIWDGIPHVGPLIGKYCGTKTPSELRSSTGILSLTFHTDMAVAKDGFSARYYLVHQEPLENFQCNVPLGMESGRIANEQISASSTYSDGRWTPQQSRLHGDDNGWTPNLDSNKEYLQVDLRFLTMLTAIATQGAISRETQNGYYVKSYKLEVSTNGEDWMVYRHGKNHKVFQANNDATEVVLNKLHAPLLTRFVRIRPQTWHSGIALRLELFGCRVTDAPCSNMLGMLSGLIADSQISASSTQEYLWSPSAARLVSSRSGWFPRIPQAQPGEEWLQVDLGTPKTVKGVIIQGARGGDSITAVEARAFVRKFKVSYSLNGKDWEYIQDPRTQQPKLFEGNMHYDTPDIRRFDPIPAQYVRVYPERWSPAGIGMRLEVLGCDWTDSKPTVETLGPTVKSEETTTPYPTEEEATECGENCSFEDDKDLQLPSGFNCNFDFLEEPCGWMYDHAKWLRTTWASSSSPNDRTFPDDRNFLRLQSDSQREGQYARLISPPVHLPRSPVCMEFQYQATGGRGVALQVVREASQESKLLWVIREDQGGEWKHGRIILPSYDMEYQIVFEGVIGKGRSGEIAIDDIRISTDVPLENCMEPISAFAGENFKGGTLLPGTEPTVDTVPMQPIPAYWYYVMAAGGAVLVLVSVALALVLHYHRFRYAAKKTDHSITYKTSHYTNGAPLAVEPTLTIKLEQDRGSHC

SEQ ID NO: 9545 - protein, 926 aa, Homo sapiens
MDMFPLTWVFLALYFSRHQVRGQPDPPCGGRLNSKDAGYITSPGYPQDYPSHQNCEWIVYAPEPNQKIVLNFNPHFEIEKHDCKYDFIEIRDGDSESADLLGKHCGNIAPPTIISSGSMLYIKFTSDYARQGAGFSLRYEIFKTGSEDCSKNFTSPNGTIESPGFPEKYPHNLDCTFTILAKPKMEIILQFLIFDLEHDPLQVGEGDCKYDWLDIWDGIPHVGPLIGKYCGTKTPSELRSSTGILSLTFHTDMAVAKDGFSARYYLVHQEPLENFQCNVPLGMESGRIANEQISASSTYSDGRWTPQQSRLHGDDNGWTPNLDSNKEYLQVDLRFLTMLTAIATQGAISRETQNGYYVKSYKLEVSTNGEDWMVYRHGKNHKVFQANNDATEVVLNKLHAPLLTRFVRIRPQTWHSGIALRLELFGCRVTDAPCSNMLGMLSGLIADSQISASSTQEYLWSPSAARLVSSRSGWFPRIPQAQPGEEWLQVDLGTPKTVKGVIIQGARGGDSITAVEARAFVRKFKVSYSLNGKDWEYIQDPRTQQPKLFEGNMHYDTPDIRRFDPIPAQYVRVYPERWSPAGIGMRLEVLGCDWTDSKPTVETLGPTVKSEETTTPYPTEEEATECGENCSFEDDKDLQLPSGFNCNFDFLEEPCGWMYDHAKWLRTTWASSSSPNDRTFPDDRNFLRLQSDSQREGQYARLISPPVHLPRSPVCMEFQYQATGGRGVALQVVREASQESKLLWVIREDQGGEWKHGRIILPSYDMEYQIVFEGVIGKGRSGEIAIDDIRISTDVPLENCMEPISAFAVDIPEIHEREGYEDEIDDEYEVDWSNSSSATSGSGAPSTDKEKSWLYTLDPILITIIAMSSLGVLLGATCAGLLLYCTCSYSGLSSRSCTTLENYNFELYDGLKHKVKMNHQKCCSEA

SEQ ID NO: 9546 - protein, 931 aa, Homo sapiens
MDMFPLTWVFLALYFSRHQVRGQPDPPCGGRLNSKDAGYITSPGYPQDYPSHQNCEWIVYAPEPNQKIVLNFNPHFEIEKHDCKYDFIEIRDGDSESADLLGKHCGNIAPPTIISSGSMLYIKFTSDYARQGAGFSLRYEIFKTGSEDCSKNFTSPNGTIESPGFPEKYPHNLDCTFTILAKPKMEIILQFLIFDLEHDPLQVGEGDCKYDWLDIWDGIPHVGPLIGKYCGTKTPSELRSSTGILSLTFHTDMAVAKDGFSARYYLVHQEPLENFQCNVPLGMESGRIANEQISASSTYSDGRWTPQQSRLHGDDNGWTPNLDSNKEYLQVDLRFLTMLTAIATQGAISRETQNGYYVKSYKLEVSTNGEDWMVYRHGKNHKVFQANNDATEVVLNKLHAPLLTRFVRIRPQTWHSGIALRLELFGCRVTDAPCSNMLGMLSGLIADSQISASSTQEYLWSPSAARLVSSRSGWFPRIPQAQPGEEWLQVDLGTPKTVKGVIIQGARGGDSITAVEARAFVRKFKVSYSLNGKDWEYIQDPRTQQPKLFEGNMHYDTPDIRRFDPIPAQYVRVYPERWSPAGIGMRLEVLGCDWTDSKPTVETLGPTVKSEETTTPYPTEEEATECGENCSFEDDKDLQLPSGFNCNFDFLEEPCGWMYDHAKWLRTTWASSSSPNDRTFPDDRNFLRLQSDSQREGQYARLISPPVHLPRSPVCMEFQYQATGGRGVALQVVREASQESKLLWVIREDQGGEWKHGRIILPSYDMEYQIVFEGVIGKGRSGEIAIDDIRISTDVPLENCMEPISAFAGENFKVDIPEIHEREGYEDEIDDEYEVDWSNSSSATSGSGAPSTDKEKSWLYTLDPILITIIAMSSLGVLLGATCAGLLLYCTCSYSGLSSRSCTTLENYNFELYDGLKHKVKMNHQKCCSEA

SEQ ID NO: 9547 - protein, 901 aa, Homo sapiens
MDMFPLTWVFLALYFSRHQVRGQPDPPCGGRLNSKDAGYITSPGYPQDYPSHQNCEWIVYAPEPNQKIVLNFNPHFEIEKHDCKYDFIEIRDGDSESADLLGKHCGNIAPPTIISSGSMLYIKFTSDYARQGAGFSLRYEIFKTGSEDCSKNFTSPNGTIESPGFPEKYPHNLDCTFTILAKPKMEIILQFLIFDLEHDPLQVGEGDCKYDWLDIWDGIPHVGPLIGKYCGTKTPSELRSSTGILSLTFHTDMAVAKDGFSARYYLVHQEPLENFQCNVPLGMESGRIANEQISASSTYSDGRWTPQQSRLHGDDNGWTPNLDSNKEYLQVDLRFLTMLTAIATQGAISRETQNGYYVKSYKLEVSTNGEDWMVYRHGKNHKVFQANNDATEVVLNKLHAPLLTRFVRIRPQTWHSGIALRLELFGCRVTDAPCSNMLGMLSGLIADSQISASSTQEYLWSPSAARLVSSRSGWFPRIPQAQPGEEWLQVDLGTPKTVKGVIIQGARGGDSITAVEARAFVRKFKVSYSLNGKDWEYIQDPRTQQPKLFEGNMHYDTPDIRRFDPIPAQYVRVYPERWSPAGIGMRLEVLGCDWTDSKPTVETLGPTVKSEETTTPYPTEEEATECGENCSFEDDKDLQLPSGFNCNFDFLEEPCGWMYDHAKWLRTTWASSSSPNDRTFPDDRNFLRLQSDSQREGQYARLISPPVHLPRSPVCMEFQYQATGGRGVALQVVREASQESKLLWVIREDQGGEWKHGRIILPSYDMEYQIVFEGVIGKGRSGEIAIDDIRISTDVPLENCMEPISAFAGGTLLPGTEPTVDTVPMQPIPAYWYYVMAAGGAVLVLVSVALALVLHYHRFRYAAKKTDHSITYKTSHYTNGAPLAVEPTLTIKLEQDRGSHC

SEQ ID NO: 9548 - protein, 555 aa, Homo sapiens
MDMFPLTWVFLALYFSRHQVRGQPDPPCGGRLNSKDAGYITSPGYPQDYPSHQNCEWIVYAPEPNQKIVLNFNPHFEIEKHDCKYDFIEIRDGDSESADLLGKHCGNIAPPTIISSGSMLYIKFTSDYARQGAGFSLRYEIFKTGSEDCSKNFTSPNGTIESPGFPEKYPHNLDCTFTILAKPKMEIILQFLIFDLEHDPLQVGEGDCKYDWLDIWDGIPHVGPLIGKYCGTKTPSELRSSTGILSLTFHTDMAVAKDGFSARYYLVHQEPLENFQCNVPLGMESGRIANEQISASSTYSDGRWTPQQSRLHGDDNGWTPNLDSNKEYLQVDLRFLTMLTAIATQGAISRETQNGYYVKSYKLEVSTNGEDWMVYRHGKNHKVFQANNDATEVVLNKLHAPLLTRFVRIRPQTWHSGIALRLELFGCRVTDAPCSNMLGMLSGLIADSQISASSTQEYLWSPSAARLVSSRSGWFPRIPQAQPGEEWLQVDLGTPKTVKGVIIQGARGGDSITAVEARAFVRKFKVSYSLNGKDWEYIQDPRTQQPKVGCSWRPL

SEQ ID NO: 9549 - protein, 909 aa, Homo sapiens
MDMFPLTWVFLALYFSRHQVRGQPDPPCGGRLNSKDAGYITSPGYPQDYPSHQNCEWIVYAPEPNQKIVLNFNPHFEIEKHDCKYDFIEIRDGDSESADLLGKHCGNIAPPTIISSGSMLYIKFTSDYARQGAGFSLRYEIFKTGSEDCSKNFTSPNGTIESPGFPEKYPHNLDCTFTILAKPKMEIILQFLIFDLEHDPLQVGEGDCKYDWLDIWDGIPHVGPLIGKYCGTKTPSELRSSTGILSLTFHTDMAVAKDGFSARYYLVHQEPLENFQCNVPLGMESGRIANEQISASSTYSDGRWTPQQSRLHGDDNGWTPNLDSNKEYLQVDLRFLTMLTAIATQGAISRETQNGYYVKSYKLEVSTNGEDWMVYRHGKNHKVFQANNDATEVVLNKLHAPLLTRFVRIRPQTWHSGIALRLELFGCRVTDAPCSNMLGMLSGLIADSQISASSTQEYLWSPSAARLVSSRSGWFPRIPQAQPGEEWLQVDLGTPKTVKGVIIQGARGGDSITAVEARAFVRKFKVSYSLNGKDWEYIQDPRTQQPKLFEGNMHYDTPDIRRFDPIPAQYVRVYPERWSPAGIGMRLEVLGCDWTDSKPTVETLGPTVKSEETTTPYPTEEEATECGENCSFEDDKDLQLPSGFNCNFDFLEEPCGWMYDHAKWLRTTWASSSSPNDRTFPDDRNFLRLQSDSQREGQYARLISPPVHLPRSPVCMEFQYQATGGRGVALQVVREASQESKLLWVIREDQGGEWKHGRIILPSYDMEYQIVFEGVIGKGRSGEIAIDDIRISTDVPLENCMEPISAFADEYEVDWSNSSSATSGSGAPSTDKEKSWLYTLDPILITIIAMSSLGVLLGATCAGLLLYCTCSYSGLSSRSCTTLENYNFELYDGLKHKVKMNHQKCCSEA

SEQ ID NO: 9550 - protein, 197 aa, Homo sapiens
MQRWKAAALASVLCSSVLSIWMCREGLLLSHRLGPALVPLHRLPRTLDARIARLAQYRALLQGAPDAMELRELTPWAGRPPGPRRRAGPRRRRARARLGARPCGLRELEVRVSELGLGYASDETVLFRYCAGACEAAARVYDLGLRRLRQRRRLRRERVRAQPCCRPTAYEDEVSFLDAHSRYHTVHELSARECACV

SEQ ID NO: 9551 - protein, 214 aa, Homo sapiens [sequence omitted]

SEQ ID NO: 9552 - protein, 851 aa, Homo sapiens
GKEEYIATFKGSEYFCYDLSQNPIQSSSDEITLSFKTLQRNGLMLHTGKSADYVNLALKNGAVSLVINLGSGAFEALVEPVNGKFNDNAWHDVKVTRNLRQHSGIGHAMVNKLHCSVTISVDGILTTTGYTQEDYTMLGSDDFFYVGGSPSTADLPGSPVSNNFMGCLKEVVYKNNDVRLELSRLAKQGDPKMKIHGVVAFKCENVATLDPITFETPESFISLPKWNAKKTGSISFDFRTTEPNGLILFSHGKPRHQKDAKHPQMIKVDFFAIEMLDGHLYLLLDMGSGTIKIKALLKKVNDGEWYHVDFQRDGRSGTISVNTLRTPYTAPGESEILDLDDELYLGGLPENKAGLVFPTEVWTALLNYGYVGCIRDLFIDGQSKDIRQMAEVQSTAGVKPSCSKETAKPCLSNPCKNNGMCRDGWNRYVCDCSGTGYLGRSCEREATVLSYDGSMFMKIQLPVVMHTEAEDVSLRFRSQRAYGILMATTSRDSADTLRLELDAGRVKLTVNLDCIRINCNSSKGPETLFAGYNLNDNEWHTVRVVRRGKSLKLTVDDQQAMTGQMAGDHTRLEFHNIETGIITERRYLSSVPSNFIGHLQSLTFNGMAYIDLCKNGDIDYCELNARFGFRNIIADPVTFKTKSSYVALATLQAYTSMHLFFQFKTTSLDGLILYNSGDGNDFIVVELVKGYLHYVFDLGNGANLIKGSSNKPLNDNQWHNVMISRDTSNLHTVKIDTKITTQITAGARNLDLKSDLYIGGVAKETYKSLPKLVHAKEGFQGCLASVDLNGRLPDLISDALFCNGQIERGCEGPSTTCQEDSCSNQGVCLQQWDGFSCDCSMTSFSGPLCND

SEQ ID NO: 9553 - protein, 836 aa, Homo sapiens
GKEEYIATFKGSEYFCYDLSQNPIQSSSDEITLSFKTLQRNGLMLHTGKSADYVNLALKNGAVSLVINLGSGAFEALVEPVNGKFNDNAWHDVKVTRNLRQVTISVDGILTTTGYTQEDYTMLGSDDFFYVGGSPSTADLPGSPVSNNFMGCLKEVVYKNNDVRLELSRLAKQGDPKMKIHGVVAFKCENVATLDPITFETPESFISLPKWNAKKTGSISFDFRTTEPNGLILFSHGKPRHQKDAKHPQMIKVDFFAIEMLDGHLYLLLDMGSGTIKIKALLKKVNDGEWYHVDFQRDGRSGTISVNTLRTPYTAPGESEILDLDDELYLGGLPENKAGLVFPTEVWTALLNYGYVGCIRDLFIDGQSKDIRQMAEVQSTAGVKPSCSKETAKPCLSNPCKNNGMCRDGWNRYVCDCSGTGYLGRSCEREATVLSYDGSMFMKIQLPVVMHTEAEDVSLRFRSQRAYGILMATTSRDSADTLRLELDAGRVKLTVNLDCIRINCNSSKGPETLFAGYNLNDNEWHTVRVVRRGKSLKLTVDDQQAMTGQMAGDHTRLEFHNIETGIITERRYLSSVPSNFIGHLQSLTFNGMAYIDLCKNGDIDYCELNARFGFRNIIADPVTFKTKSSYVALATLQAYTSMHLFFQFKTTSLDGLILYNSGDGNDFIVVELVKGYLHYVFDLGNGANLIKGSSNKPLNDNQWHNVMISRDTSNLHTVKIDTKITTQITAGARNLDLKSDLYIGGVAKETYKSLPKLVHAKEGFQGCLASVDLNGRLPDLISDALFCNGQIERGCEGPSTTCQEDSCSNQGVCLQQWDGFSCDCSMTSFSGPLCND

SEQ ID NO: 9554 - protein, 198 aa, Homo sapiens
MAAENDANIAIVGNVRLVGEVPSSMTTESTATAMQSEMSTSIMETTTTLATSTARRGKPPTKEPISQTTDDILVASAECPSDDEDIDPCEPSSGGLANPTRAGGREPYPGSAEVIRESSSTTGMVVGIVAAAALCILILLYAMYKYRNRDEGSYHVDESRNYISNSAQSNGAVVKEKQPSSAKSSNKNKKNKDKEYYV

SEQ ID NO: 9555 - protein, 139 aa, Homo sapiens
MDMRWHCENLQTTDDILVASAECPSDDEDIDPCEPSSANPTRAGGREPYPGSAEVIRESSSTTGMVVGIVAAAALCILILLYAMYKYRNRDEGSYHVDESRNYISNSAQSNGAVVKEKQPSSAKSSNKNKKNKDKEYYV

SEQ ID NO: 9556 - protein, 142 aa, Homo sapiens
MDMRWHCENLQTTDDILVASAECPSDDEDIDPCEPSSGGLANPTRAGGREPYPGSAEVIRESSSTTGMVVGIVAAAALCILILLYAMYKYRNRDEGSYHVDESRNYISNSAQSNGAVVKEKQPSSAKSSNKNKKNKDKEYYV

SEQ ID NO: 9557 - protein, 62 aa, Homo sapiens
MDMRWHCENLQTTDDILVASAECPSDDEDIDPCEPSSGTKQTMWKTSRDHRILPNARRERKD

SEQ ID NO: 9558 - protein, 143 aa, Homo sapiens
MDMRWHCENLQVTTDDILVASAECPSDDEDIDPCEPSSGGLANPTRAGGREPYPGSAEVIRESSSTTGMVVGIVAAAALCILILLYAMYKYRNRDEGSYHVDESRNYISNSAQSNGAVVKEKQPSSAKSSNKNKKNKDKEYYV

SEQ ID NO: 9559 - protein, 1477 aa, Homo sapiens
MGTALLQRGGCFLLCLSLLLLGCWAELGSGLEFPGAEGQWTRFPKWNACCESEMSFQLKTRSARGLVLYFDDEGFCDFLELILTRGGRLQLSFSIFCAEPATLLADTPVNDGAWHSVRIRRQFRNTTLFIDQVEAKWVEVKSKRRDMTVFSGLFVGGLPPELRAAALKLTLASVREREPFKGWIRDVRVNSSQVLPVDSGEVKLDDEPPNSGGGSPCEAGEEGEGGVCLNGGVCSVVDDQAVCDCSRTGFRGKDCSQEDNNVEGLAHLMMGDQGKSKGKEEYIATFKGSEYFCYDLSQNPIQSSSDEITLSFKTLQRNGLMLHTGKSADYVNLALKNGAVSLVINLGSGAFEALVEPVNGKFNDNAWHDVKVTRNLRQHSGIGHAMVTISVDGILTTTGYTQEDYTMLGSDDFFYVGGSPSTADLPGSPVSNNFMGCLKEVVYKNNDVRLELSRLAKQGDPKMKIHGVVAFKCENVATLDPITFETPESFISLPKWNAKKTGSISFDFRTTEPNGLILFSHGKPRHQKDAKHPQMIKVDFFAIEMLDGHLYLLLDMGSGTIKIKALLKKVNDGEWYHVDFQRDGRSGTISVNTLRTPYTAPGESEILDLDDELYLGGLPENKAGLVFPTEVWTALLNYGYVGCIRDLFIDGQSKDIRQMAEVQSTAGVKPSCSKETAKPCLSNPCKNNGMCRDGWNRYVCDCSGTGYLGRSCEREATVLSYDGSMFMKIQLPVVMHTEAEDVSLRFRSQRAYGILMATTSRDSADTLRLELDAGRVKLTVNLDCIRINCNSSKGPETLFAGYNLNDNEWHTVRVVRRGKSLKLTVDDQQAMTGQMAGDHTRLEFHNIETGIITERRYLSSVPSNFIGHLQSLTFNGMAYIDLCKNGDIDYCELNARFGFRNIIADPVTFKTKSSYVALATLQAYTSMHLFFQFKTTSLDGLILYNSGDGNDFIVVELVKGYLHYVFDLGNGANLIKGSSNKPLNDNQWHNVMISRDTSNLHTVKIDTKITTQITAGARNLDLKSDLYIGGVAKETYKSLPKLVHAKEGFQGCLASVDLNGRLPDLISDALFCNGQIERGCEGPSTTCQEDSCSNQGVCLQQWDGFSCDCSMTSFSGPLCNDPGTTYIFSKGGGQITYKWPPNDRPSTRADRLAIGFSTVQKEAVLVRVDSSSGLGDYLELHIHQGKIGVKFNVGTDDIAIEESNAIINDGKYHVVRFTRSGGNATLQVDSWPVIERYPAGRQLTIFNSQATIIIGGKEQGQPFQGQLSGLYYNGLKVLNMAAENDANIAIVGNVRLVGEVPSSMTTESTATAMQSEMSTSIMETTTTLATSTARRGKPPTKEPISQTTDDILVASAECPSDDEDIDPCEPSSGGLANPTRAGGREPYPGSAEVIRESSSTTGMVVGIVAAAALCILILLYAMYKYRNRDEGSYHVDESRNYISNSAQSNGAVVKEKQPSSAKSSNKNKKNKDKEYYV

SEQ ID NO: 9560 - protein, 278 aa, Homo sapiens
MGTALLQRGGCFLLCLSLLLLGCWAELGSGLEFPGAEGQWTRFPKWNACCESEMSFQLKTRSARGLVLYFDDEGFCDFLELILTRGGRLQLSFSIFCAEPATLLADTPVNDGAWHSVRIRRQFRNTTLFIDQVEAKWVEVKSKRRDMTVFSGLFVGGLPPELRAAALKLTLASVREREPFKGWIRDVRVNSSQVLPVDSGEVKLDDEPPNSGGGSPCEAGEEGEGGVCLNGGVCSVVDDQAVCDCSRTGFRGKDCSQEDNNVEGLAHLMMGDQGKSKD

SEQ ID NO: 9561 - protein, 1547 aa, Homo sapiens
MGTALLQRGGCFLLCLSLLLLGCWAELGSGLEFPGAEGQWTRFPKWNACCESEMSFQLKTRSARGLVLYFDDEGFCDFLELILTRGGRLQLSFSIFCAEPATLLADTPVNDGAWHSVRIRRQFRNTTLFIDQVEAKWVEVKSKRRDMTVFSGLFVGGLPPELRAAALKLTLASVREREPFKGWIRDVRVNSSQVLPVDSGEVKLDDEPPNSGGGSPCEAGEEGEGGVCLNGGVCSVVDDQAVCDCSRTGFRGKDCSQEIKFGLQCVLPVLLHDNDQGKYCCINTAKPLTEKDNNVEGLAHLMMGDQGKSKGKEEYIATFKGSEYFCYDLSQNPIQSSSDEITLSFKTLQRNGLMLHTGKSADYVNLALKNGAVSLVINLGSGAFEALVEPVNGKFNDNAWHDVKVTRNLRQHSGIGHAMVNKLHCSVTISVDGILTTTGYTQEDYTMLGSDDFFYVGGSPSTADLPGSPVSNNFMGCLKEVVYKNNDVRLELSRLAKQGDPKMKIHGVVAFKCENVATLDPITFETPESFISLPKWNAKKTGSISFDFRTTEPNGLILFSHGKPRHQKDAKHPQMIKVDFFAIEMLDGHLYLLLDMGSGTIKIKALLKKVNDGEWYHVDFQRDGRSGTISVNTLRTPYTAPGESEILDLDDELYLGGLPENKAGLVFPTEVWTALLNYGYVGCIRDLFIDGQSKDIRQMAEVQSTAGVKPSCSKETAKPCLSNPCKNNGMCRDGWNRYVCDCSGTGYLGRSCEREATVLSYDGSMFMKIQLPVVMHTEAEDVSLRFRSQRAYGILMATTSRDSADTLRLELDAGRVKLTVNLDCIRINCNSSKGPETLFAGYNLNDNEWHTVRVVRRGKSLKLTVDDQQAMTGQMAGDHTRLEFHNIETGIITERRYLSSVPSNFIGHLQSLTFNGMAYIDLCKNGDIDYCELNARFGFRNIIADPVTFKTKSSYVALATLQAYTSMHLFFQFKTTSLDGLILYNSGDGNDFIVVELVKGYLHYVFDLGNGANLIKGSSNKPLNDNQWHNVMISRDTSNLHTVKIDTKITTQITAGARNLDLKSDLYIGGVAKETYKSLPKLVHAKEGFQGCLASVDLNGRLPDLISDALFCNGQIERGCEGPSTTCQEDSCSNQGVCLQQWDGFSCDCSMTSFSGPLCNDPGTTYIFSKGGGQITYKWPPNDRPSTRADRLAIGFSTVQKEAVLVRVDSSSGLGDYLELHIHQGKIGVKFNVGTDDIAIEESNAIINDGKYHVVRFTRSGGNATLQVDSWPVIERYPAGNNDNERLAIARQRIPYRLGRVVDEWLLDKGRQLTIFNSQATIIIGGKEQGQPFQGQLSGLYYNGLKVLNMAAENDANIAIVGNVRLVGEVPSSMTTESTATAMQSEMSTSIMETTTTLATSTARRGKPPTKEPISQTTDDILVASAECPSDDEDIDPCEPSSGGLANPTRAGGREPYPGSAEVIRESSSTTGMVVGIVAAAALCILILLYAMYKYRNRDEGSYHVDESRNYISNSAQSNGAVVKEKQPSSAKSSNKNKKNKDKEYYV

SEQ ID NO: 9562 - protein, 1495 aa, Homo sapiens
MGTALLQRGGCFLLCLSLLLLGCWAELGSGLEFPGAEGQWTRFPKWNACCESEMSFQLKTRSARGLVLYFDDEGFCDFLELILTRGGRLQLSFSIFCAEPATLLADTPVNDGAWHSVRIRRQFRNTTLFIDQVEAKWVEVKSKRRDMTVFSGLFVGGLPPELRAAALKLTLASVREREPFKGWIRDVRVNSSQVLPVDSGEVKLDDEPPNSGGGSPCEAGEEGEGGVCLNGGVCSVVDDQAVCDCSRTGFRGKDCSQEDNNVEGLAHLMMGDQGKEEYIATFKGSEYFCYDLSQNPIQSSSDEITLSFKTLQRNGLMLHTGKSADYVNLALKNGAVSLVINLGSGAFEALVEPVNGKFNDNAWHDVKVTRNLRQVTISVDGILTTTGYTQEDYTMLGSDDFFYVGGSPSTADLPGSPVSNNFMGCLKEVVYKNNDVRLELSRLAKQGDPKMKIHGVVAFKCENVATLDPITFETPESFISLPKWNAKKTGSISFDFRTTEPNGLILFSHGKPRHQKDAKHPQMIKVDFFAIEMLDGHLYLLLDMGSGTIKIKALLKKVNDGEWYHVDFQRDGRSGTISVNTLRTPYTAPGESEILDLDDELYLGGLPENKAGLVFPTEVWTALLNYGYVGCIRDLFIDGQSKDIRQMAEVQSTAGVKPSCSKETAKPCLSNPCKNNGMCRDGWNRYVCDCSGTGYLGRSCEREATVLSYDGSMFMKIQLPVVMHTEAEDVSLRFRSQRAYGILMATTSRDSADTLRLELDAGRVKLTVNLDCIRINCNSSKGPETLFAGYNLNDNEWHTVRVVRRGKSLKLTVDDQQAMTGQMAGDHTRLEFHNIETGIITERRYLSSVPSNFIGHLQSLTFNGMAYIDLCKNGDIDYCELNARFGFRNIIADPVTFKTKSSYVALATLQAYTSMHLFFQFKTTSLDGLILYNSGDGNDFIVVELVKGYLHYVFDLGNGANLIKGSSNKPLNDNQWHNVMISRDTSNLHTVKIDTKITTQITAGARNLDLKSDLYIGGVAKETYKSLPKLVHAKEGFQGCLASVDLNGRLPDLISDALFCNGQIERGCEGPSTTCQEDSCSNQGVCLQQWDGFSCDCSMTSFSGPLCNDPGTTYIFSKGGGQITYKWPPNDRPSTRADRLAIGFSTVQKEAVLVRVDSSSGLGDYLELHIHQGKIGVKFNVGTDDIAIEESNAIINDGKYHVVRFTRSGGNATLQVDSWPVIERYPAGNNDNERLAIARQRIPYRLGRVVDEWLLDKGRQLTIFNSQATIIIGGKEQGQPFQGQLSGLYYNGLKVLNMAAENDANIAIVGNVRLVGEVPSSMTTESTATAMQSEMSTSIMETTTTLATSTARRGKPPTKEPISQTTDDILVASAECPSDDEDIDPCEPSSGGLANPTRAGGREPYPGSAEVIRESSSTTGMVVGIVAAAALCILILLYAMYKYRNRDEGSYHVDESRNYISNSAQSNGAVVKEKQPSSAKSSNKNKKNKDKEYYV

SEQ ID NO: 9563 - protein, 1507 aa, Homo sapiens
MGTALLQRGGCFLLCLSLLLLGCWAELGSGLEFPGAEGQWTRFPKWNACCESEMSFQLKTRSARGLVLYFDDEGFCDFLELILTRGGRLQLSFSIFCAEPATLLADTPVNDGAWHSVRIRRQFRNTTLFIDQVEAKWVEVKSKRRDMTVFSGLFVGGLPPELRAAALKLTLASVREREPFKGWIRDVRVNSSQVLPVDSGEVKLDDEPPNSGGGSPCEAGEEGEGGVCLNGGVCSVVDDQAVCDCSRTGFRGKDCSQEDNNVEGLAHLMMGDQGKSKGKEEYIATFKGSEYFCYDLSQNPIQSSSDEITLSFKTLQRNGLMLHTGKSADYVNLALKNGAVSLVINLGSGAFEALVEPVNGKFNDNAWHDVKVTRNLRQHSGIGHAMVTISVDGILTTTGYTQEDYTMLGSDDFFYVGGSPSTADLPGSPVSNNFMGCLKEVVYKNNDVRLELSRLAKQGDPKMKIHGVVAFKCENVATLDPITFETPESFISLPKWNAKKTGSISFDFRTTEPNGLILFSHGKPRHQKDAKHPQMIKVDFFAIEMLDGHLYLLLDMGSGTIKIKALLKKVNDGEWYHVDFQRDGRSGTISVNTLRTPYTAPGESEILDLDDELYLGGLPENKAGLVFPTEVWTALLNYGYVGCIRDLFIDGQSKDIRQMAEVQSTAGVKPSCSKETAKPCLSNPCKNNGMCRDGWNRYVCDCSGTGYLGRSCEREATVLSYDGSMFMKIQLPVVMHTEAEDVSLRFRSQRAYGILMATTSRDSADTLRLELDAGRVKLTVNLDCIRINCNSSKGPETLFAGYNLNDNEWHTVRVVRRGKSLKLTVDDQQAMTGQMAGDHTRLEFHNIETGIITERRYLSSVPSNFIGHLQSLTFNGMAYIDLCKNGDIDYCELNARFGFRNIIADPVTFKTKSSYVALATLQAYTSMHLFFQFKTTSLDGLILYNSGDGNDFIVVELVKGYLHYVFDLGNGANLIKGSSNKPLNDNQWHNVMISRDTSNLHTVKIDTKITTQITAGARNLDLKSDLYIGGVAKETYKSLPKLVHAKEGFQGCLASVDLNGRLPDLISDALFCNGQIERGCEGPSTTCQEDSCSNQGVCLQQWDGFSCDCSMTSFSGPLCNDPGTTYIFSKGGGQITYKWPPNDRPSTRADRLAIGFSTVQKEAVLVRVDSSSGLGDYLELHIHQGKIGVKFNVGTDDIAIEESNAIINDGKYHVVRFTRSGGNATLQVDSWPVIERYPAGNNDNERLAIARQRIPYRLGRVVDEWLLDKGRQLTIFNSQATIIIGGKEQGQPFQGQLSGLYYNGLKVLNMAAENDANIAIVGNVRLVGEVPSSMTTESTATAMQSEMSTSIMETTTTLATSTARRGKPPTKEPISQTTDDILVASAECPSDDEDIDPCEPSSGGLANPTRAGGREPYPGSAEVIRESSSTTGMVVGIVAAAALCILILLYAMYKYRNRDEGSYHVDESRNYISNSAQSNGAVVKEKQPSSAKSSNKNKKNKDKEYYV

SEQ ID NO: 9564 - protein, 1496 aa, Homo sapiens
MGTALLQRGGCFLLCLSLLLLGCWAELGSGLEFPGAEGQWTRFPKWNACCESEMSFQLKTRSARGLVLYFDDEGFCDFLELILTRGGRLQLSFSIFCAEPATLLADTPVNDGAWHSVRIRRQFRNTTLFIDQVEAKWVEVKSKRRDMTVFSGLFVGGLPPELRAAALKLTLASVREREPFKGWIRDVRVNSSQVLPVDSGEVKLDDEPPNSGGGSPCEAGEEGEGGVCLNGGVCSVVDDQAVCDCSRTGFRGKDCSQEDNNVEGLAHLMMGDQGKSKGKEEYIATFKGSEYFCYDLSQNPIQSSSDEITLSFKTLQRNGLMLHTGKSADYVNLALKNGAVSLVINLGSGAFEALVEPVNGKFNDNAWHDVKVTRNLRQVTISVDGILTTTGYTQEDYTMLGSDDFFYVGGSPSTADLPGSPVSNNFMGCLKEVVYKNNDVRLELSRLAKQGDPKMKIHGVVAFKCENVATLDPITFETPESFISLPKWNAKKTGSISFDFRTTEPNGLILFSHGKPRHQKDAKHPQMIKVDFFAIEMLDGHLYLLLDMGSGTIKIKALLKKVNDGEWYHVDFQRDGRSGTISVNTLRTPYTAPGESEILDLDDELYLGGLPENKAGLVFPTEVWTALLNYGYVGCIRDLFIDGQSKDIRQMAEVQSTAGVKPSCSKETAKPCLSNPCKNNGMCRDGWNRYVCDCSGTGYLGRSCEREATVLSYDGSMFMKIQLPVVMHTEAEDVSLRFRSQRAYGILMATTSRDSADTLRLELDAGRVKLTVNLDCIRINCNSSKGPETLFAGYNLNDNEWHTVRVVRRGKSLKLTVDDQQAMTGQMAGDHTRLEFHNIETGIITERRYLSSVPSNFIGHLQSLTFNGMAYIDLCKNGDIDYCELNARFGFRNIIADPVTFKTKSSYVALATLQAYTSMHLFFQFKTTSLDGLILYNSGDGNDFIVVELVKGYLHYVFDLGNGANLIKGSSNKPLNDNQWHNVMISRDTSNLHTVKIDTKITTQITAGARNLDLKSDLYIGGVAKETYKSLPKLVHAKEGFQGCLASVDLNGRLPDLISDALFCNGQIERGCEGPSTTCQEDSCSNQGVCLQQWDGFSCDCSMTSFSGPLCNDPGTTYIFSKGGGQITYKWPPNDRPSTRADRLAIGFSTVQKEAVLVRVDSSSGLGDYLELHIHQGKIGVKFNVGTDDIAIEESNAIINDGKYHVVRFTRSGGNATLQVDSWPVIERYPAGNNDNERLAIARQRIPYRLGRVVDEWLLDKGRQLTIFNSQATIIIGGKEQGQPFQGQLSGLYYNGLKVLNMAAENDANIAIVGNVRLVGEVPSSMTTESTATAMQSEMSTSIMETTTTLATSTARRGKPPTKEPISQTTDDILVASAECPSDDEDIDPCEPSSANPTRAGGREPYPGSAEVIRESSSTTGMVVGIVAAAALCILILLYAMYKYRNRDEGSYHVDESRNYISNSAQSNGAVVKEKQPSSAKSSNKNKKNKDKEYYV

SEQ ID NO: 9565 - protein, 459 aa, Homo sapiens
MGTALLQRGGCFLLCLSLLLLGCWAELGSGLEFPGAEGQWTRFPKWNACCESEMSFQLKTRSARGLVLYFDDEGFCDFLELILTRGGRLQLSFSIFCAEPATLLADTPVNDGAWHSVRIRRQFRNTTLFIDQVEAKWVEVKSKRRDMTVFSGLFVGGLPPELRAAALKLTLASVREREPFKGWIRDVRVNSSQVLPVDSGEVKLDDEPPNSGGGSPCEAGEEGEGGVCLNGGVCSVVDDQAVCDCSRTGFRGKDCSQGKEEYIATFKGSEYFCYDLSQNPIQSSSDEITLSFKTLQRNGLMLHTGKSADYVNLALKNGAVSLVINLGSGAFEALVEPVNGKFNDNAWHDVKVTRNLRQVTISVDGILTTTGYTQEDYTMLGSDDFFYVGGSPSTADLPGSPVSNNFMGCLKEVNIVAIRIIPNSWSHHFRSSMKAPLLKTRCSRVKRHNFKFNILLLFM

SEQ ID NO: 9566 - protein, 277 aa, Homo sapiens
MGTALLQRGGCFLLCLSLLLLGCWAELGSGLEFPGAEGQWTRFPKWNACCESEMSFQLKTRSARGLVLYFDDEGFCDFLELILTRGGRLQLSFSIFCAEPATLLADTPVNDGAWHSVRIRRQFRNTTLFIDQVEAKWVEVKSKRRDMTVFSGLFVGGLPPELRAAALKLTLASVREREPFKGWIRDVRVNSSQVLPVDSGEVKLDDEPPNSGGGSPCEAGEEGEGGVCLNGGVCSVVDDQAVCDCSRTGFRGKDCSQDNNVEGLAHLMMGDQGKSKD

SEQ ID NO: 9567 - protein, 293 aa, Homo sapiens
MGTALLQRGGCFLLCLSLLLLGCWAELGSGLEFPGAEGQWTRFPKWNACCESEMSFQLKTRSARGLVLYFDDEGFCDFLELILTRGGRLQLSFSIFCAEPATLLADTPVNDGAWHSVRIRRQFRNTTLFIDQVEAKWVEVKSKRRDMTVFSGLFVGGLPPELRAAALKLTLASVREREPFKGWIRDVRVNSSQVLPVDSGEVKLDDEPPNSGGGSPCEAGEEGEGGVCLNGGVCSVVDDQAVCDCSRTGFRGKDCSQEDNNVEGLAHLMMGDQGKSKEMNDYLNYKKVKICYT

SEQ ID NO: 9568 - protein, 1499 aa, Homo sapiens
MGTALLQRGGCFLLCLSLLLLGCWAELGSGLEFPGAEGQWTRFPKWNACCESEMSFQLKTRSARGLVLYFDDEGFCDFLELILTRGGRLQLSFSIFCAEPATLLADTPVNDGAWHSVRIRRQFRNTTLFIDQVEAKWVEVKSKRRDMTVFSGLFVGGLPPELRAAALKLTLASVREREPFKGWIRDVRVNSSQVLPVDSGEVKLDDEPPNSGGGSPCEAGEEGEGGVCLNGGVCSVVDDQAVCDCSRTGFRGKDCSQEDNNVEGLAHLMMGDQGKSKGKEEYIATFKGSEYFCYDLSQNPIQSSSDEITLSFKTLQRNGLMLHTGKSADYVNLALKNGAVSLVINLGSGAFEALVEPVNGKFNDNAWHDVKVTRNLRQVTISVDGILTTTGYTQEDYTMLGSDDFFYVGGSPSTADLPGSPVSNNFMGCLKEVVYKNNDVRLELSRLAKQGDPKMKIHGVVAFKCENVATLDPITFETPESFISLPKWNAKKTGSISFDFRTTEPNGLILFSHGKPRHQKDAKHPQMIKVDFFAIEMLDGHLYLLLDMGSGTIKIKALLKKVNDGEWYHVDFQRDGRSGTISVNTLRTPYTAPGESEILDLDDELYLGGLPENKAGLVFPTEVWTALLNYGYVGCIRDLFIDGQSKDIRQMAEVQSTAGVKPSCSKETAKPCLSNPCKNNGMCRDGWNRYVCDCSGTGYLGRSCEREATVLSYDGSMFMKIQLPVVMHTEAEDVSLRFRSQRAYGILMATTSRDSADTLRLELDAGRVKLTVNLDCIRINCNSSKGPETLFAGYNLNDNEWHTVRVVRRGKSLKLTVDDQQAMTGQMAGDHTRLEFHNIETGIITERRYLSSVPSNFIGHLQSLTFNGMAYIDLCKNGDIDYCELNARFGFRNIIADPVTFKTKSSYVALATLQAYTSMHLFFQFKTTSLDGLILYNSGDGNDFIVVELVKGYLHYVFDLGNGANLIKGSSNKPLNDNQWHNVMISRDTSNLHTVKIDTKITTQITAGARNLDLKSDLYIGGVAKETYKSLPKLVHAKEGFQGCLASVDLNGRLPDLISDALFCNGQIERGCEGPSTTCQEDSCSNQGVCLQQWDGFSCDCSMTSFSGPLCNDPGTTYIFSKGGGQITYKWPPNDRPSTRADRLAIGFSTVQKEAVLVRVDSSSGLGDYLELHIHQGKIGVKFNVGTDDIAIEESNAIINDGKYHVVRFTRSGGNATLQVDSWPVIERYPAGNNDNERLAIARQRIPYRLGRVVDEWLLDKGRQLTIFNSQATIIIGGKEQGQPFQGQLSGLYYNGLKVLNMAAENDANIAIVGNVRLVGEVPSSMTTESTATAMQSEMSTSIMETTTTLATSTARRGKPPTKEPISQTTDDILVASAECPSDDEDIDPCEPSSGGLANPTRAGGREPYPGSAEVIRESSSTTGMVVGIVAAAALCILILLYAMYKYRNRDEGSYHVDESRNYISNSAQSNGAVVKEKQPSSAKSSNKNKKNKDKEYYV

SEQ ID NO: 9569 - protein, 56 aa, Homo sapiens
MTSGSKCPSTDSASLLPRKSRGLMAYILPLVQLTSSVGEDCSFQISTFLFDLSSIS

SEQ ID NO: 9570 - protein, 176 aa, Homo sapiens
MTSGSKCPSTDSGKEEYIATFKGSEYFCYDLSQNPIQSSSDEITLSFKTLQRNGLMLHTGKSADYVNLALKNGAVSLVINLGSGAFEALVEPVNGKFNDNAWHDVKVTRNLRQVTISVDGILTTTGYTQEDYTMLGSDDFFYVGGSPSTADLPGSPIQHESTFAEDPMFQSQTAQL

SEQ ID NO: 9571 - protein, 903 aa, Homo sapiens
MTSGSKCPSTDSGKEEYIATFKGSEYFCYDLSQNPIQSSSDEITLSFKTLQRNGLMLHTGKSADYVNLALKNGAVSLVINLGSGAFEALVEPVNGKFNDNAWHDVKVTRNLRQVTISVDGILTTTGYTQEDYTMLGSDDFFYVGGSPSTADLPGSPVSNNFMGCLKEVVYKNNDVRLELSRLAKQGDPKMKIHGVVAFKCENVATLDPITFETPESFISLPKWNAKKTGSISFDFRTTEPNGLILFSHGKPRHQKDAKHPQMIKVDFFAIEMLDGHLYLLLDMGSGTIKIKALLKKVNDGEWYHVDFQRDGRSGTISVNTLRTPYTAPGESEILDLDDELYLGGLPENKAGLVFPTEVWTALLNYGYVGCIRDLFIDGQSKDIRQMAEVQSTAGVKPSCSKETAKPCLSNPCKNNGMCRDGWNRYVCDCSGTGYLGRSCEREATVLSYDGSMFMKIQLPVVMHTEAEDVSLRFRSQRAYGILMATTSRDSADTLRLELDAGRVKLTVNLGKGPETLFAGYNLNDNEWHTVRVVRRGKSLKLTVDDQQAMTGQMAGDHTRLEFHNIETGIITERRYLSSVPSNFIGHLQSLTFNGMAYIDLCKNGDIDYCELNARFGFRNIIADPVTFKTKSSYVALATLQAYTSMHLFFQFKTTSLDGLILYNSGDGNDFIVVELVKGYLHYVFDLGNGANLIKGSSNKPLNDNQWHNVMISRDTSNLHTVKIDTKITTQITAGARNLDLKSDLYIGGVAKETYKSLPKLVHAKEGFQGCLASVDLNGRLPDLISDALFCNGQIERGCEGPSTTCQEDSCSNQGVCLQQWDGFSCDCSMTSFSGPLCNDPGTTYIFSKGGGQITYKWPPNDRPSTRADRLAIGFSTVQKEAVLVRVDSSSGLGDYLELHITLQ

SEQ ID NO: 9572 - protein, 75 aa, Homo sapiens
MVVGIVAAAALCILILLYAMYKYRNRDEGSYHVDESRNYISNSAQSNGAVVKEKQPSSAKSSNKNKKNKDKEYYV

SEQ ID NO: 9573 - protein, 472 aa, Homo sapiens
MYQRMLRCGAELGSPGGGGGGGGGGGAGGRLALLWIVPLTLSGLLGVAWGASSLGAHHIHHFHGSSKHHSVPIAIYRSPASLRGGHAGTTYIFSKGGGQITYKWPPNDRPSTRADRLAIGFSTVQKEAVLVRVDSSSGLGDYLELHIHQGKIGVKFNVGTDDIAIEESNAIINDGKYHVVRFTRSGGNATLQVDSWPVIERYPAGNNDNERLAIARQRIPYRLGRVVDEWLLDKGRQLTIFNSQATIIIGGKEQGQPFQGQLSGLYYNGLKVLNMAAENDANIAIVGNVRLVGEVPSSMTTESTATAMQSEMSTSIMETTTTLATSTARRGKPPTKEPISQTTDDILVASAECPSDDEDIDPCEPSSGGLANPTRAGGREPYPGSAEVIRESSSTTGMVVGIVAAAALCILILLYAMYKYRNRDEGSYHVDESRNYISNSAQSNGAVVKEKQPSSAKSSNKNKKNKDKEYYV

SEQ ID NO: 9574 - protein, 469 aa, Homo sapiens
MYQRMLRCGAELGSPGGGGGGGGGGGAGGRLALLWIVPLTLSGLLGVAWGASSLGAHHIHHFHGSSKHHSVPIAIYRSPASLRGGHAGTTYIFSKGGGQITYKWPPNDRPSTRADRLAIGFSTVQKEAVLVRVDSSSGLGDYLELHIHQGKIGVKFNVGTDDIAIEESNAIINDGKYHVVRFTRSGGNATLQVDSWPVIERYPAGNNDNERLAIARQRIPYRLGRVVDEWLLDKGRQLTIFNSQATIIIGGKEQGQPFQGQLSGLYYNGLKVLNMAAENDANIAIVGNVRLVGEVPSSMTTESTATAMQSEMSTSIMETTTTLATSTARRGKPPTKEPISQTTDDILVASAECPSDDEDIDPCEPSSANPTRAGGREPYPGSAEVIRESSSTTGMVVGIVAAAALCILILLYAMYKYRNRDEGSYHVDESRNYISNSAQSNGAVVKEKQPSSAKSSNKNKKNKDKEYYV

SEQ ID NO: 9575 - protein, 442 aa, Homo sapiens
MYQRMLRCGAELGSPGGGGGGGGGGGAGGRLALLWIVPLTLSGLLGVAWGASSLGAHHIHHFHGSSKHHSVPIAIYRSPASLRGGHAGTTYIFSKGGGQITYKWPPNDRPSTRADRLAIGFSTVQKEAVLVRVDSSSGLGDYLELHIHQGKIGVKFNVGTDDIAIEESNAIINDGKYHVVRFTRSGGNATLQVDSWPVIERYPAGRQLTIFNSQATIIIGGKEQGQPFQGQLSGLYYNGLKVLNMAAENDANIAIVGNVRLVGEVPSSMTTESTATAMQSEMSTSIMETTTTLATSTARRGKPPTKEPISQTTDDILVASAECPSDDEDIDPCEPSSGGLANPTRAGGREPYPGSAEVIRESSSTTGMVVGIVAAAALCILILLYAMYKYRNRDEGSYHVDESRNYISNSAQSNGAVVKEKQPSSAKSSNKNKKNKDKEYYV

SEQ ID NO: 9576 - protein, 136 aa, Homo sapiens
SSQVLPVDSGEVKLDDEPPNSGGGSPCEAGEEGEGGVCLNGGVCSVVDDQAVCDCSRTGFRGKDCSQEIKFGLQCVLPVLLHDNDQGKYCCINTAKPLTEKDNNVEGLAHLMMGDQGKSKEKLEIFRWIRKDFTNF

SEQ ID NO: 9577 - protein, 123 aa, Homo sapiens
TLSGLLGVAWGASSLGAHHIHHFHGSSKHHSVPIAIYRSPASLRGGHAGTTYIFSKGGGQITYKWPPNDRPSTRADRLAIGFSTVQKEAVLVRVDSSSGLGDYLELHIAFESFTASRSSASRC

SEQ ID NO: 9578 - protein, 33 aa, Homo sapiens
  SITE 1: note = misc_feature - Xaa can be any naturally occurring amino acid
XFQRDGRSDFPFASSLVPPSTQNSCPGTISVNT

SEQ ID NO: 9579 - protein, 126 aa, Homo sapiens
  SITE 1: note = misc_feature - Xaa can be any naturally occurring amino acid
XPELRAAALKLTLASVREREPFKGWIRDVRVNSSQVLPVDSGEVKLDDEPPNSGGGSPCEAGEEGEGGVCLNGGVCSVVDDQAVCDCSRTGFRGKDCSQGLAHLMMGDQGMGSVPFPLCFQCFLVL

SEQ ID NO: 9580 - protein, 169 aa, Homo sapiens
  SITE 1: note = misc_feature - Xaa can be any naturally occurring amino acid
XSNNFMGCLKEVVYKNNDVRLELSRLAKQGDPKMKIHGVVAFKCENVATLDPITFETPESFISLPKWNAKKTGSISFDFRTTEPNGLILFSHGKPRHQKDAKHPQMIKVDFFAIEMLDGHLYLLLDMGSGTIKIKALLKKVNDGEWYHVDFQRDGRSGQMAGDHTRLEF

SEQ ID NO: 9581 - protein, 155 aa, Homo sapiens
  SITE 1: note = misc_feature - Xaa can be any naturally occurring amino acid
XVFSGLFVGGLPPELRAAALKLTLASVREREPFKGWIRDVRVNSSQVLPVDSGEVKLDDEPPNSGGGSPCEAGEEGEGGVCLNGGVCSVVDDQAVCDCSRTGFRGKDCSQEDNNVEGLAHLMMGDQGKSKELMLILLCSITTQGLETAKSLIMCT

SEQ ID NO: 9582 - protein, 276 aa, Homo sapiens
LLLLLLGAAEGARVSSSLSTTHHVHHFHSKHGTVPIAINRMPFLTRGGHAGTTYIFGKGGALITYTWPPNDRPSTRMDRLAVGFSTHQRSAVLVRVDSASGLGDYLQLHIDQGTVGVIFNVGTDDITIDEPNAIVSDGKYHVVRFTRSGGNATLQVDSWPVNERYPAGRQLTIFNSQAAIKIGGRDQGRPFQGQVSGLYYNGLKVLALAAESDPNVRTEGHLRLVGEGPSVLLSAETTATTLLADMATTIMETTTTMATTTTRRGRSPTLRDSTTQ

SEQ ID NO: 9583 - protein, 1712 aa, Homo sapiens
MASGSRWRPTPPPLLLLLLLALAARADGLEFGGGPGQWARYARWAGAASSGELSFSLRTNATRALLLYLDDGGDCDFLELLLVDGRLRLRFTLSCAEPATLQLDTPVADDRWHMVLLTRDARRTALAVDGEARAAEVRSKRREMQVASDLFVGGIPPDVRLSALTLSTVKYEPPFRGLLANLKLGERPPALLGSQGLRGATADPLCAPARNPCANGGLCTVLAPGEVGCDCSHTGFGGKFCSEEEHPMEGPAHLTLNSEVGSLLFSEGGAGRGGAGDVHQPTKGKEEFVATFKGNEFFCYDLSHNPIQSSTDEITLAFRTLQRNGLMLHTGKSADYVNLSLKSGAVWLVINLGSGAFEALVEPVNGKFNDNAWHDVRVTRNLRQHAGIGHAMVNKLHYLVTISVDGILTTTGYTQEDYTMLGSDDFFYIGGSPNTADLPGSPVSNNFMGCLKDVVYKNNDFKLELSRLAKEGDPKMKLQGDLSFRCEDVAALDPVTFESPEAFVALPRWSAKRTGSISLDFRTTEPNGLLLFSQGRRAGGGAGSHSSAQRADYFAMELLDGHLYLLLDMGSGGIKLRASSRKVNDGEWCHVDFQRDGRKGSISVNSRSTPFLATGDSEILDLESELYLGGLPEGGRVDLPLPPEVWTAALRAGYVGCVRDLFIDGRSRDLRGLAEAQGAVGVAPFCSRETLKQCASAPCRNGGVCREGWNRFICDCIGTGFLGRVCEREATVLSYDGSMYMKIMLPNAMHTEAEDVSLRFMSQRAYGLMMATTSRESADTLRLELDGGQMKLTVNLDCLRVGCAPSKGPETLFAGHKLNDNEWHTVRVVRRGKSLQLSVDNVTVEGQMAGAHMRLEFHNIETGIMTERRFISVVPSNFIGHLSGLVFNGQPYMDQCKDGDITYCELNARFGLRAIVADPVTFKSRSSYLALATLQAYASMHLFFQFKTTAPDGLLLFNSGNGNDFIVIELVKGYIHYVFDLGNGPSLMKGNSDKPVNDNQWHNVVVSRDPGNVHTLKIDSRTVTQHSNGARNLDLKGELYIGGLSKNMFSNLPKLVASRDGFQGCLASVDLNGRLPDLIADALHRIGQVERGCDGPSTTCTEESCANQGVCLQQWDGFTCDCTMTSYGGPVCNDPGTTYIFGKGGALITYTWPPNDRPSTRMDRLAVGFSTHQRSAVLVRVDSASGLGDYLQLHIDQGTVGVIFNVGTDDITIDEPNAIVSDGKYHVVRFTRSGGNATLQVDSWPVNERYPAGNFDNERLAIARQRIPYRLGRVVDEWLLDKGRQLTIFNSQAAIKIGGRDQGRPFQGQVSGLYYNGLKVLALAAESDPNVRTEGHLRLVGEGPSVLLSAETTATTLLADMATTIMETTTTMATTTTRRGRSPTLRDSTTQNTDDLLVASAECPSDDEDLEECEPSTGGELILPIITEDSLDPPPVATRSPFVPPPPTFYPFLTGVGATQDTLPPPAARRPPSGGPCQAERDDSDCEEPIEASGFASGEVFDSSLPPTDDEDFYTTFPLVTDRTTLLSPRKPAPRPNLRTDGATGAPGVLFAPSAPAPNLPAGKMNHRDPLQPLLENPPLGPGAPTSFEPRRPPPLRPGVTSAPGFPHLPTANPTGPGERGPPGAVEVIRESSSTTGMVVGIVAAAALCILILLYAMYKYRNRDEGSYQVDQSRNYISNSAQSNGAVVKEKAPAAPKTPSKAKKNKDKEYYV

SEQ ID NO: 9584 - protein, 1642 aa, Homo sapiens
MASGSRWRPTPPPLLLLLLLALAARADGLEFGGGPGQWARYARWAGAASSGELSFSLRTNATRALLLYLDDGGDCDFLELLLVDGRLRLRFTLSCAEPATLQLDTPVADDRWHMVLLTRDARRTALAVDGEARAAEVRSKRREMQVASDLFVGGIPPDVRLSALTLSTVKYEPPFRGLLANLKLGERPPALLGSQGLRGATADPLCAPARNPCANGGLCTVLAPGEVGCDCSHTGFGGKFCSEEEHPMEGPAHLTLNSEGKEEFVATFKGNEFFCYDLSHNPIQSSTDEITLAFRTLQRNGLMLHTGKSADYVNLSLKSGAVWLVINLGSGAFEALVEPVNGKFNDNAWHDVRVTRNLRQHAGIGHAMVTISVDGILTTTGYTQEDYTMLGSDDFFYIGGSPNTADLPGSPVSNNFMGCLKDVVYKNNDFKLELSRLAKEGDPKMKLQGDLSFRCEDVAALDPVTFESPEAFVALPRWSAKRTGSISLDFRTTEPNGLLLFSQGRRAGGGAGSHSSAQRADYFAMELLDGHLYLLLDMGSGGIKLRASSRKVNDGEWCHVDFQRDGRKGSISVNSRSTPFLATGDSEILDLESELYLGGLPEGGRVDLPLPPEVWTAALRAGYVGCVRDLFIDGRSRDLRGLAEAQGAVGVAPFCSRETLKQCASAPCRNGGVCREGWNRFICDCIGTGFLGRVCEREATVLSYDGSMYMKIMLPNAMHTEAEDVSLRFMSQRAYGLMMATTSRESADTLRLELDGGQMKLTVNLGKGPETLFAGHKLNDNEWHTVRVVRRGKSLQLSVDNVTVEGQMAGAHMRLEFHNIETGIMTERRFISVVPSNFIGHLSGLVFNGQPYMDQCKDGDITYCELNARFGLRAIVADPVTFKSRSSYLALATLQAYASMHLFFQFKTTAPDGLLLFNSGNGNDFIVIELVKGYIHYVFDLGNGPSLMKGNSDKPVNDNQWHNVVVSRDPGNVHTLKIDSRTVTQHSNGARNLDLKGELYIGGLSKNMFSNLPKLVASRDGFQGCLASVDLNGRLPDLIADALHRIGQVERGCDGPSTTCTEESCANQGVCLQQWDGFTCDCTMTSYGGPVCNDPGTTYIFGKGGALITYTWPPNDRPSTRMDRLAVGFSTHQRSAVLVRVDSASGLGDYLQLHIDQGTVGVIFNVGTDDITIDEPNAIVSDGKYHVVRFTRSGGNATLQVDSWPVNERYPAGRQLTIFNSQAAIKIGGRDQGRPFQGQVSGLYYNGLKVLALAAESDPNVRTEGHLRLVGEGPSVLLSAETTATTLLADMATTIMETTTTMATTTTRRGRSPTLRDSTTQNTDDLLVASAECPSDDEDLEECEPSTGGELILPIITEDSLDPPPVATRSPFVPPPPTFYPFLTGVGATQDTLPPPAARRPPSGGPCQAERDDSDCEEPIEASGFASGEVFDSSLPPTDDEDFYTTFPLVTDRTTLLSPRKPAPRPNLRTDGATGAPGVLFAPSAPAPNLPAGKMNHRDPLQPLLENPPLGPGAPTSFEPRRPPPLRPGVTSAPGFPHLPTANPTGPGERGPPGAVEVIRESSSTTGMVVGIVAAAALCILILLYAMYKYRNRDEGSYQVDQSRNYISNSAQSNGAVVKEKAPAAPKTPSKAKKNKDKEYYV

SEQ ID NO: 9585 - protein, 1712 aa, Homo sapiens; identical to SEQ ID NO: 9583

SEQ ID NO: 9586 - protein, 1705 aa, Homo sapiens
MASGSRWRPTPPPLLLLLLLALAARADGLEFGGGPGQWARYARWAGAASSGELSFSLRTNATRALLLYLDDGGDCDFLELLLVDGRLRLRFTLSCAEPATLQLDTPVADDRWHMVLLTRDARRTALAVDGEARAAEVRSKRREMQVASDLFVGGIPPDVRLSALTLSTVKYEPPFRGLLANLKLGERPPALLGSQGLRGATADPLCAPARNPCANGGLCTVLAPGEVGCDCSHTGFGGKFCSEEEHPMEGPAHLTLNSEVGSLLFSEGGAGRGGAGDVHQPTKGKEEFVATFKGNEFFCYDLSHNPIQSSTDEITLAFRTLQRNGLMLHTGKSADYVNLSLKSGAVWLVINLGSGAFEALVEPVNGKFNDNAWHDVRVTRNLRQHAGIGHAMVTISVDGILTTTGYTQEDYTMLGSDDFFYIGGSPNTADLPGSPVSNNFMGCLKDVVYKNNDFKLELSRLAKEGDPKMKLQGDLSFRCEDVAALDPVTFESPEAFVALPRWSAKRTGSISLDFRTTEPNGLLLFSQGRRAGGGAGSHSSAQRADYFAMELLDGHLYLLLDMGSGGIKLRASSRKVNDGEWCHVDFQRDGRKGSISVNSRSTPFLATGDSEILDLESELYLGGLPEGGRVDLPLPPEVWTAALRAGYVGCVRDLFIDGRSRDLRGLAEAQGAVGVAPFCSRETLKQCASAPCRNGGVCREGWNRFICDCIGTGFLGRVCEREATVLSYDGSMYMKIMLPNAMHTEAEDVSLRFMSQRAYGLMMATTSRESADTLRLELDGGQMKLTVNLDCLRVGCAPSKGPETLFAGHKLNDNEWHTVRVVRRGKSLQLSVDNVTVEGQMAGAHMRLEFHNIETGIMTERRFISVVPSNFIGHLSGLVFNGQPYMDQCKDGDITYCELNARFGLRAIVADPVTFKSRSSYLALATLQAYASMHLFFQFKTTAPDGLLLFNSGNGNDFIVIELVKGYIHYVFDLGNGPSLMKGNSDKPVNDNQWHNVVVSRDPGNVHTLKIDSRTVTQHSNGARNLDLKGELYIGGLSKNMFSNLPKLVASRDGFQGCLASVDLNGRLPDLIADALHRIGQVERGCDGPSTTCTEESCANQGVCLQQWDGFTCDCTMTSYGGPVCNDPGTTYIFGKGGALITYTWPPNDRPSTRMDRLAVGFSTHQRSAVLVRVDSASGLGDYLQLHIDQGTVGVIFNVGTDDITIDEPNAIVSDGKYHVVRFTRSGGNATLQVDSWPVNERYPAGNFDNERLAIARQRIPYRLGRVVDEWLLDKGRQLTIFNSQAAIKIGGRDQGRPFQGQVSGLYYNGLKVLALAAESDPNVRTEGHLRLVGEGPSVLLSAETTATTLLADMATTIMETTTTMATTTTRRGRSPTLRDSTTQNTDDLLVASAECPSDDEDLEECEPSTGGELILPIITEDSLDPPPVATRSPFVPPPPTFYPFLTGVGATQDTLPPPAARRPPSGGPCQAERDDSDCEEPIEASGFASGEVFDSSLPPTDDEDFYTTFPLVTDRTTLLSPRKPAPRPNLRTDGATGAPGVLFAPSAPAPNLPAGKMNHRDPLQPLLENPPLGPGAPTSFEPRRPPPLRPGVTSAPGFPHLPTANPTGPGERGPPGAVEVIRESSSTTGMVVGIVAAAALCILILLYAMYKYRNRDEGSYQVDQSRNYISNSAQSNGAVVKEKAPAAPKTPSKAKKNKDKEYYV

SEQ ID NO: 9587 - protein, 666 aa, Homo sapiens
MPPGGSGPGGCPRRPPALAGPLPPPPPPPPPPLLPLLPLLLLLLLGAAEGARVSSSLSTTHHVHHFHSKHGTVPIAINRMPFLTRGGHAGTTYIFGKGGALITYTWPPNDRPSTRMDRLAVGFSTHQRSAVLVRVDSASGLGDYLQLHIDQGTVGVIFNVGTDDITIDEPNAIVSDGKYHVVRFTRSGGNATLQVDSWPVNERYPAGNFDNERLAIARQRIPYRLGRVVDEWLLDKGRQLTIFNSQAAIKIGGRDQGRPFQGQVSGLYYNGLKVLALAAESDPNVRTEGHLRLVGEGPSVLLSAETTATTLLADMATTIMETTTTMATTTTRRGRSPTLRDSTTQNTDDLLVASAECPSDDEDLEECEPSTGGELILPIITEDSLDPPPVATRSPFVPPPPTFYPFLTGVGATQDTLPPPAARRPPSGGPCQAERDDSDCEEPIEASGFASGEVFDSSLPPTDDEDFYTTFPLVTDRTTLLSPRKPAPRPNLRTDGATGAPGVLFAPSAPAPNLPAGKMNHRDPLQPLLENPPLGPGAPTSFEPRRPPPLRPGVTSAPGFPHLPTANPTGPGERGPPGAVEVIRESSSTTGMVVGIVAAAALCILILLYAMYKYRNRDEGSYQVDQSRNYISNSAQSNGAVVKEKAPAAPKTPSKAKKNKDKEYYV

SEQ ID NO: 9588 - protein, 293 aa, Homo sapiens [sequence omitted]

SEQ ID NO: 9589 - protein, 215 aa, Homo sapiens
  SITE 1: note = misc_feature - Xaa can be any naturally occurring amino acid
XADPLCAPARNPCANGGLCTVLAPGEVGCDCSHTGFGGKFCSEEEHPMEVGSLLFSEGGAGRGGAGDVHQPTKGKEEFVATFKGNEFFCYDLSHNPIQSSTDEITLAFRTLQRNGLMLHTGKSADYVNLSLKSGAVWLVINLGSGAFEALVEPVNGKFNDNAWHDVRVTRNLRQVTISVDGILTTTGYTQEDYTMLGSDDFFYIGGSPNTADLPG

SEQ ID NO: 9590 - protein, 206 aa, Homo sapiens
  SITE 1: note = misc_feature - Xaa can be any naturally occurring amino acid
XCSEEEHPMEGPAHLTLNSEVGSLLFSEGGAGRGGAGDVHQPTKGKEEFVATFKGNEFFCYDLSHNPIQSSTDEITLAFRTLQRNGLMLHTGKSADYVNLSLKSGAVWLVINLGSGAFEALVEPVNGKFNDNAWHDVRVTRNLRQVTISVDGILTTTGYTQEDYTMLGSDDFFYIGGSPNTADLPGSPVSNNFMGCLKDVVYKNND

SEQ ID NO: 9591 - protein, 331 aa, Homo sapiens
MDRAAVARVGAVASASVCALVAGVVLAQYIFTLKRKTGRKTKIIEMMPEFQKSSVRIKNPTRVEEIICGLIKGGAAKLQIITDFDMTLSRFSYKGKRCPTCHNIIDNCKLVTDECRKKLLQLKEKYYAIEVDPVLTVEEKYPYMVEWYTKSHGLLVQQALPKAKLKEIVAESDVMLKEGYENFFDKLQQHSIPVFIFSAGIGDVLEEVIRQAGVYHPNVKVVSNFMDFDETGVLKGFKGELIHVFNKHDGALRNTEYFNQLKDNSNIILLGDSQGDLRMADGVANVEHILKIGYLNDRVDELLEKYMDSYDIVLVQDESLEVANSILQKIL

SEQ ID NO: 9592 - protein, 331 aa, Homo sapiens; identical to SEQ ID NO: 9591

SEQ ID NO: 9593 - protein, 42 aa, Homo sapiens
MPEFQKSSVRIKNPTRVEEIICGLIKGGAAKLQIITDFDMTL

SEQ ID NO: 9594 - protein, 285 aa, Homo sapiens
MPEFQKSSVRIKNPTRVEEIICGLIKGGAAKLQIITDFDMTLSRFSYKGKRCPTCHNIIDNCKLVTDECRKKLLQLKEKYYAIEVDPVLTVEEKYPYMVEWYTKSHGLLVQQALPKAKLKEIVAESDVMLKEGYENFFDKLQQHSIPVFIFSAGIGDVLEEVIRQAGVYHPNVKVVSNFMDFDETGVLKGFKGELIHVFNKHDGALRNTEYFNQLKDNSNIILLGDSQGDLRMADGVANVEHILKIGYLNDRVDELLEKYMDSYDIVLVQDESLEVANSILQKIL

SEQ ID NO: 9595 - protein, 285 aa, Homo sapiens; identical to SEQ ID NO: 9594

SEQ ID NO: 9596 - protein, 54 aa, Homo sapiens
MRAPSMDRAAVARVGAVASASVCALVAGVVLAQYIFTLKRKTGRKTKIIEMKIG

SEQ ID NO: 9597 - protein, 336 aa, Homo sapiens
MRAPSMDRAAVARVGAVASASVCALVAGVVLAQYIFTLKRKTGRKTKIIEMMPEFQKSSVRIKNPTRVEEIICGLIKGGAAKLQIITDFDMTLSRFSYKGKRCPTCHNIIDNCKLVTDECRKKLLQLKEKYYAIEVDPVLTVEEKYPYMVEWYTKSHGLLVQQALPKAKLKEIVAESDVMLKEGYENFFDKLQQHSIPVFIFSAGIGDVLEEVIRQAGVYHPNVKVVSNFMDFDETGVLKGFKGELIHVFNKHDGALRNTEYFNQLKDNSNIILLGDSQGDLRMADGVANVEHILKIGYLNDRVDELLEKYMDSYDIVLVQDESLEVANSILQKIL

SEQ ID NO: 9598 - protein, 297 aa, Homo sapiens
MTNQESAVHVKMMPEFQKSSVRIKNPTRVEEIICGLIKGGAAKLQIITDFDMTLSRFSYKGKRCPTCHNIIDNCKLVTDECRKKLLQLKEKYYAIEVDPVLTVEEKYPYMVEWYTKSHGLLVQQALPKAKLKEIVAESDVMLKEGYENFFDKLQQHSIPVFIFSAGIGDVLEEVIRQAGVYHPNVKVVSNFMDFDETGVLKGFKGELIHVFNKHDGALRNTEYFNQLKDNSNIILLGDSQGDLRMADGVANVEHILKIGYLNDRVDELLEKYMDSYDIVLVQDESLEVANSILQKIL

SEQ ID NO: 9599 - protein, 297 aa, Homo sapiens; identical to SEQ ID NO: 9598

SEQ ID NO: 9600 - protein, 297 aa, Homo sapiens; identical to SEQ ID NO: 9598

SEQ ID NO: 9601 - protein, 205 aa, Homo sapiens
MTNQESAVHVKMMPEFQKSSVRIKNPTRVEEIICGLIKGGAAKLQIITDFDMTLSRFSYKGKRCPTCHNIIDNCKLVTDECRKKLLQLKEKYYAIEVDPVLTVEEKYPYMVEWYTKSHGLLVQQALPKAKLKEIVAESDVMLKEGYENFFDKLQQHSIPVFIFSAGIGDVLEEVIRQAGVYHPNVKVVSNFMDFDETVRISNRSS

SEQ ID NO: 9602 - protein, 548 aa, Homo sapiens
MTMAAAAVVARGAGARAATAAALRGGCGTAARGRPCAGPARPLCTAPGTAPDMKRYLWERYREAKRSTEELVPSIMSNLLNPDAIFSNNEMSLSDIEIYGFDYDYTLVFYSKHLHTLIFNAARDLLINEHRYPAEIRKYEYDPNFAIRGLHYDVQRAVLMKIDAFHYIQLGTVYRGLSVVPDEEVIEMYEGSHVPLEQMSDFYGKSSHGNTMKQFMDIFSLPEMTLLSCVNEYFLKNNIDYEPVHLYKDVKDSIRDVHIKGIMYRAIEADIEKYICYAEQTRAVLAKLADHGKKMFLITNSPSSFVDKGMSYIVGKDWRDLFDVVIVQAEKPNFFNDKRRPFRKMNEKGVLLWDKIHKLQKGQIYKQGNLYEFLKLTGWRGSRVLYFGDHIYSDLADLTLKHGWRTGAIIPELRSELKIMNTEQYIQTMTWLQTLTGLLEQMQVHRDAESQLVLQEWKKERKEMREMTKSFFNAQFGSLFRTDQNPTYFLRRLSRFADIYMASLSCLLNYDVSHTFYPRRTPLQHELPAWSERPPTFGTPLLQEAQAK

SEQ ID NO: 9603 - protein, 135 aa, Homo sapiens
  SITE 1: note = misc_feature - Xaa can be any naturally occurring amino acid
XAKLADHGKKMFLITNSPSSFVDKGMSYIVGKDWRDLFDVVIVQAEKPNFFNDKRRPFRKMNEKGVLLWDKIHKLQKGQIYKQGNLYEFLKLTGWRGSRVLYFGDHIYSDLATMVNDSRPSVSAGVVTHGNYFQN

SEQ ID NO: 9604 - protein, 122 aa, Homo sapiens
  SITE 1: note = misc_feature - Xaa can be any naturally occurring amino acid
XTMTWLQTLTGLLEQMQVHRDAESQLVLQEWKKERKEMREMTKSFFNAQFGSLFRTDQNPTYFLRRLSRFADIYMASLSCLLNYDVSHTFYPRRTPLQHELPAWSERPPTFGTPLLQEAQAK

SEQ ID NO: 9605 - protein, 264 aa, Homo sapiens
MCPRAARAPATLLLALGAVLWPAAGAWELTILHTNDVHSRLEQTSEDSSKCVNASRCMGGVARLFTKVQQIRRAEPNVLLLDAGDQYQGTIWFTVYKGAEVAHFMNALRYDAMALGNHEFDNGVEGLIEPLLKEAKFPILSANIKAKGPLASQISGLYLPYKVLPVGDEVVGIVGYTSKETPFLSNPGTNLVFEDEITALQPEVDKLKTLNVNKIIALGHSGFEMDKLIAQKVRGVDVVVGGHSNTFLYTGNCFKRIAWARMSR

SEQ ID NO: 9606 - protein, 574 aa, Homo sapiens
MCPRAARAPATLLLALGAVLWPAAGAWELTILHTNDVHSRLEQTSEDSSKCVNASRCMGGVARLFTKVQQIRRAEPNVLLLDAGDQYQGTIWFTVYKGAEVAHFMNALRYDAMALGNHEFDNGVEGLIEPLLKEAKFPILSANIKAKGPLASQISGLYLPYKVLPVGDEVVGIVGYTSKETPFLSNPGTNLVFEDEITALQPEVDKLKTLNVNKIIALGHSGFEMDKLIAQKVRGVDVVVGGHSNTFLYTGNPPSKEVPAGKYPFIVTSDDGRKVPVVQAYAFGKYLGYLKIEFDERGNVISSHGNPILLNSSIPEDPSIKADINKWRIKLDNYSTQELGKTIVYLDGSSQSCRFRECNMGNLICDAMINNNLRHTDEMFWNHVSMCILNGGGIRSPIDERNNGTITWENLAAVLPFGGTFDLVQLKGSTLKKAFEHSVHRYGQSTGEFLQVGGIHVVYDLSRKPGDRVVKLDVLCTKCRVPSYDPLKMDEVYKVILPNFLANGGDGFQMIKDELLRHDSGDQDINVVSTYISKMKVIYPAVEGRIKFSTGSHCHGSFSLIFLSLWAVIFVLYQ

SEQ ID NO: 9607 - protein, 524 aa, Homo sapiens
MCPRAARAPATLLLALGAVLWPAAGAWELTILHTNDVHSRLEQTSEDSSKCVNASRCMGGVARLFTKVQQIRRAEPNVLLLDAGDQYQGTIWFTVYKGAEVAHFMNALRYDAMALGNHEFDNGVEGLIEPLLKEAKFPILSANIKAKGPLASQISGLYLPYKVLPVGDEVVGIVGYTSKETPFLSNPGTNLVFEDEITALQPEVDKLKTLNVNKIIALGHSGFEMDKLIAQKVRGVDVVVGGHSNTFLYTGNPPSKEVPAGKYPFIVTSDDGRKVPVVQAYAFGKYLGYLKIEFDERGNVISSHGNPILLNSSIPEDPSIKADINKWRIKLDNYSTQELGKTIVYLDGSSQSCRFRECNMGNLICDAMINNNLRHTDEMFWNHVSMCILNGGGIRSPIDERNNGIHVVYDLSRKPGDRVVKLDVLCTKCRVPSYDPLKMDEVYKVILPNFLANGGDGFQMIKDELLRHDSGDQDINVVSTYISKMKVIYPAVEGRIKFSTGSHCHGSFSLIFLSLWAVIFVLYQ

SEQ ID NO: 9608 - protein, 230 aa, Homo sapiens
  SITE 1: note = misc_feature - Xaa can be any naturally occurring amino acid
XDVVVGGHSNTFLYTGNPPSKEVPAGKYPFIVTSDDGRKVPVVQAYAFGKYLGYLKIEFDERGNVISSHGNPILLNSSIPEDPSIKADINKWRIKLDNYSTQELGKTIVYLDGSSQSCRFRECNMGNLICDAMINNNLRHTDEMFWNHVSMCILNGGGIRSPIDERNNGIHVVYDLSRKPGDRVVKLDVLCTKCRVPSYDPLKMDEVYKVILPNFLANGGDGFQMIKDEL

SEQ ID NO: 9609 - protein, 179 aa, Homo sapiens
  SITE 1: note = misc_feature - Xaa can be any naturally occurring amino acid
XNPILLNSSIPEDPSIKADINKWRIKLDNYSTQELGKTIVYLDGSSQSCRFRECNMGNLICDAMINNNLRHTDEMFWNHVSMCILNGGGIRSPIDERNNGTITWENLAAVLPFGGTFDLVQLKGSTLKKAFEHSVHRYGQSTGEFLQVGDLKECCPICINQDDSWKEQPTAQTYLNTWF

SEQ ID NO: 9610 - protein, 257 aa, Homo sapiens
MSILFYVIFLAYLRGIQGNNMDQRSLPEDSLNSLIIKLIQADILKNKLSKQMVDVKENYQSTLPKAEAPREPERGGPAKSAFQPVIAMDTELLRQQRRYNSPRVLLSDSTPLEPPPLYLMEDYVGSPVVANRTSRRKRYAEHKSHRGEYSVCDSESLWVTDKSSAIDIRGHQVTVLGEIKTGNSPVKQYFYETRCKEARPVKNGCRGIDDKHWNSQCKTSQTYVRALTSENNKLVGWRWIRIDTSCVCALSRKIGRT

SEQ ID NO: 9611 - protein, 270 aa, Homo sapiens
MVTFATILQVNKVMSILFYVIFLAYLRGIQGNNMDQRSLPEDSLNSLIIKLIQADILKNKLSKQMVDVKENYQSTLPKAEAPREPERGGPAKSAFQPVIAMDTELLRQQRRYNSPRVLLSDSTPLEPPPLYLMEDYVGSPVVANRTSRRKRYAEHKSHRGEYSVCDSESLWVTDKSSAIDIRGHQVTVLGEIKTGNSPVKQYFYETRCKEARPVKNGCRGIDDKHWNSQCKTSQTYVRALTSENNKLVGWRWIRIDTSCVCALSRKIGRT

SEQ ID NO: 9612 - protein, 143 aa, Homo sapiens
MLPLPSCSLPILLLFLLPSVPIESQPPPSTLPPFLAPEWDLLSPRVVLSRGAPAGPPLLFLLEAGAFRESAGAPANRSRRGVSETAPASRRGELAVCDAVSGWVTDRRTAVDLRGREVEVLGEVPAAGGSPLRQYFFETRCKA

SEQ ID NO: 9613 - protein, 210 aa, Homo sapiens
MLPLPSCSLPILLLFLLPSVPIESQPPPSTLPPFLAPEWDLLSPRVVLSRGAPAGPPLLFLLEAGAFRESAGAPANRSRRGVSETAPASRRGELAVCDAVSGWVTDRRTAVDLRGREVEVLGEVPAAGGSPLRQYFFETRCKADNAEEGGPGAGGGGCRGVDRRHWVSECKAKQSYVRALTADAQGRVGWRWIRIDTACVCTLLSRTGRA

SEQ ID NO: 9614 - protein, 316 aa, Homo sapiens
MGVCGYLFLPWKCLVVVSLRLLFLVPTGVPVRSGDATFPKAMDNVTVRQGESATLRCTIDNRVTRVAWLNRSTILYAGNDKWCLDPRVVLLSNTQTQYSIEIQNVDVYDEGPYTCSVQTDNHPKTSRVHLIVQVSPKIVEISSDISINEGNNISLTCIATGRPEPTVTWRHISPKAVGFVSEDEYLEIQGITREQSGDYECSASNDVAAPVVRRVKVTVNYPPYISEAKGTGVPVGQKGTLQCEASAVPSAEFQWYKDDKRLIEGKKGVKVENRPFLSKLIFFNVSEHDYGNYTCVASNKLGHTNASIMLFGETVL

SEQ ID NO: 9615 - protein, 344 aa, Homo sapiens
MGVCGYLFLPWKCLVVVSLRLLFLVPTGVPVRSGDATFPKAMDNVTVRQGESATLRCTIDNRVTRVAWLNRSTILYAGNDKWCLDPRVVLLSNTQTQYSIEIQNVDVYDEGPYTCSVQTDNHPKTSRVHLIVQVSPKIVEISSDISINEGNNISLTCIATGRPEPTVTWRHISPKAVGFVSEDEYLEIQGITREQSGDYECSASNDVAAPVVRRVKVTVNYPPYISEAKGTGVPVGQKGTLQCEASAVPSAEFQWYKDDKRLIEGKKGVKVENRPFLSKLIFFNVSEHDYGNYTCVASNKLGHTNASIMLFGPGAVSEVSNGTSRRAGCVWLLPLLVLHLLLKF

SEQ ID NO: 9616 - protein, 355 aa, Homo sapiens
MGVCGYLFLPWKCLVVVSLRLLFLVPTGVPVRSGDATFPKAMDNVTVRQGESATLRCTIDNRVTRVAWLNRSTILYAGNDKWCLDPRVVLLSNTQTQYSIEIQNVDVYDEGPYTCSVQTDNHPKTSRVHLIVQVSPKIVEISSDISINEGNNISLTCIATGRPEPTVTWRHISPKAVGFVSEDEYLEIQGITREQSGDYECSASNDVAAPVVRRVKVTVNYPPYISEAKGTGVPVGQKGTLQCEASAVPSAEFQWYKDDKRLIEGKKGVKVENRPFLSKLIFFNVSEHDYGNYTCVASNKLGHTNASIMLFEVKTTALTPWKGPGAVSEVSNGTSRRAGCVWLLPLLVLHLLLKF

SEQ ID NO: 9617 - protein, 344 aa, Homo sapiens
MKTIQPKMHNSISWAIFTGLAALCLFQGVPVRSGDATFPKAMDNVTVRQGESATLRCTIDNRVTRVAWLNRSTILYAGNDKWCLDPRVVLLSNTQTQYSIEIQNVDVYDEGPYTCSVQTDNHPKTSRVHLIVQVSPKIVEISSDISINEGNNISLTCIATGRPEPTVTWRHISPKAVGFVSEDEYLEIQGITREQSGDYECSASNDVAAPVVRRVKVTVNYPPYISEAKGTGVPVGQKGTLQCEASAVPSAEFQWYKDDKRLIEGKKGVKVENRPFLSKLIFFNVSEHDYGNYTCVASNKLGHTNASIMLFGPGAVSEVSNGTSRRAGCVWLLPLLVLHLLLKF

SEQ ID NO: 9618 - protein, 18 aa, Homo sapiens
MNGKRNGEGGKRWKWKGT

SEQ ID NO: 9619 - protein, 36 aa, Homo sapiens
MNGKRNGEGGKRWKWKGTGVPVRSGDATFPKAMDNV

SEQ ID NO: 9620 - protein, 191 aa, Homo sapiens
MNGKRNGEGGKRWKWKGTGVPVRSGDATFPKAMDNVTVRQGESATLRCTIDNRVTRVAWLNRSTILYAGNDKWCLDPRVVLLSNTQTQYSIEIQNVDVYDEGPYTCSVQTDNHPKTSRVHLIVQVSPKIVEISSDISINEGNNISLTCIATGRPEPTVTWRHISPKAVGFVSEDEYLEIQGITREQSGDYE

SEQ ID NO: 9621 - protein, 179 aa, Homo sapiens
VGFVSEDEYLEIQGITREQSGDYECSASNDVAAPVVRRVKVTVNYPPYISEAKGTGVPVGQKGTLQCEASAVPSAEFQWYKDDKRLIEGKKGVKVENRPFLSKLIFFNVSEHDYGNYTCVASNKLGHTNASIMLFEVKTTALTPWKGPGAVSEVSNGTSRRAGCVWLLPLLVLHLLLKF

SEQ ID NO: 9622 - protein, 168 aa, Homo sapiens
VGFVSEDEYLEIQGITREQSGDYECSASNDVAAPVVRRVKVTVNYPPYISEAKGTGVPVGQKGTLQCEASAVPSAEFQWYKDDKRLIEGKKGVKVENRPFLSKLIFFNVSEHDYGNYTCVASNKLGHTNASIMLFGPGAVSEVSNGTSRRAGCVWLLPLLVLHLLLKF

SEQ ID NO: 9623 - protein, 119 aa, Homo sapiens
  SITE 1: note = misc_feature - Xaa can be any naturally occurring amino acid
XSAEFQWYKDDKRLIEGKKGVKVENRPFLSKLIFFNVSEHDYGNYTCVASNKLGHTNASIMLFELNEPTSSTLLQEVKTTALTPWKGPGAVSEVSNGTSRRAGCVWLLPLLVLHLLLKF

SEQ ID NO: 9624 - protein, 153 aa, Homo sapiens
HYCKEGYYRDMGKPITHRKACKACDCHPVGAAGKTCNQTTGQCPCKDGVTGITCNRCAKGYQQSRSPIAPCIKIPVAPPTTAASSVEEPEAARQPNTFQAEGLSLLPGAAEKEGARCWGYRRRLGHRVAQAECRGPRSWAWGRITSSFSFASN

SEQ ID NO: 9625 - protein, 604 aa, Homo sapiens
MMRAVWEALAALAAVACLVGAVRGGPGLSMFAGQAAQPDPCSDENGHPRRCIPDFVNAAFGKDVRVSSTCGRPPARYCVVSERGEERLRSCHLCNASDPKKAHPPAFLTDLNNPHNLTCWQSENYLQFPHNVTLTLSLGKKFEVTYVSLQFCSPRPESMAIYKSMDYGRTWVPFQFYSTQCRKMYNRPHRAPITKQNEQEAVCTDSHTDMRPLSGGLIAFSTLDGRPSAHDFDNSPVLQDWVTATDIRVAFSRLHTFGDENEDDSELARDSYFYAVSDLQVGGRCKCNGHAARCVRDRDDSLVCDCRHNTAGPECDRCKPFHYDRPWQRATAREANECVACNCNLHARRCRFNMELYKLSGRKSGGVCLNCRHNTAGRHCHYCKEGYYRDMGKPITHRKACKACDCHPVGAAGKTCNQTTGQCPCKDGVTGITCNRCAKGYQQSRSPIAPCIKIPVAPPTTAASSVEEPEDCDSYCKASKGKLKINMKKYCKKDYAVQIHILKADKAGDWWKFTVNIISVYKQGTSRIRRGDQSLWIRSRDIACKCPKIKPLKKYLLLGNAEDSPDQSGIVADKSSLVIQWRDTWARRLRKFQQREKKGKCKKA

SEQ ID NO: 9626 - protein, 580 aa, Homo sapiens
MPGWPWGLLLTAGTLFAALSPGPPAPADPCHDEGGAPRGCVPGLVNAALGREVLASSTCGRPATRACDASDPRRAHSPALLTSPGGTASPLCWRSESLPRAPLNVTLTVPLGKAFELVFVSLRFCSAPPASVALLKSQDHGRSWAPLGFFSSHCDLDYGRLPAPANGPAGPGPEALCFPAPLAQPDGSGLLAFSMQDSSPPGLDLDSSPVLQDWVTATDVRVVLTRPSTAGDPRDMEAVVPYSYAATDLQVGGRCKCNGHASRCLLDTQGHLICDCRHGTEGPDCGRCKPFYCDRPWQRATARESHACLACSCNGHARRCRFNMELYRLSGRRSGGVCLNCRHNTAGRHCHYCREGFYRDPGRALSDRRACRACDCHPVGAAGKTCNQTTGQCPCKDGVTGLTCNRCAPGFQQSRSPVAPCVKTPIPGPTEDSSPVQPQDCDSHCKPARGSYRISLKKFCKKDYAVQVAVGARGEARGAWTRFPVAVLAVFRSGEERARRGSSALWVPAGDAACGCPRLLPGRRYLLLGGGPGAAAGGAGGRGPGLIAARGSLVLPWRDAWTRRLRRLQRRERRGRCSAA

SEQ ID NO: 9627 - protein, 176 aa, Homo sapiens
MGNLALGRKLWADTTCGQNATELYCFYSENTDLTCRQPKCDKCNAAYPHLAHLPSAMADSSFRFPRTWWQSAEDVHREKIQLDLEAEFYFTHLIVMFKSPRPAAMVLDRSQDFGKTWKPYKYFATNCSATFGLEDDVVKKGAICTSKYSSPFPCTGGEVIFKALSPPYDTENPYSA

SEQ ID NO: 9628 - protein, 591 aa, Homo sapiens
MGNLALGRKLWADTTCGQNATELYCFYSENTDLTCRQPKCDKCNAAYPHLAHLPSAMADSSFRFPRTWWQSAEDVHREKIQLDLEAEFYFTHLIVMFKSPRPAAMVLDRSQDFGKTWKPYKYFATNCSATFGLEDDVVKKGAICTSKYSSPFPCTGGEVIFKALSPPYDTENPYSAKVQEQLKITNLRVQLLKRQSCPCQRNDLNEEPQHFTHYAIYDFIVKGSCFCNGHADQCIPVHGFRPVKAPGTFHMVHGKCMCKHNTAGSHCQHCAPLYNDRPWEAADGKTGAPNECRTCKCNGHADTCHFDVNVWEASGNRSGGVCDDCQHNTEGQYCQRCKPGFYRDLRRPFSAPDACKPCSCHPVGSAVLPANSVTFCDPSNGDCPCKPGVAGRRCDRCMVGYWGFGDYGCRPCDCAGSCDPITGDCISSHTDIDWYHEVPDFRPVHNKSEPAWEWEDAQGFSALLHSGKCECKEQTLGNAKAFCGMKYSYVLKIKILSAHDKGTHVEVNVKIKKVLKSTKLKIFRGKRTLYPESWTDRGCTCPILNPGLEYLVAGHEDIRTGKLIVNMKSFVQHWKPSLGRKVMDILKRECK

SEQ ID NO: 9629 - protein, 591 aa, Homo sapiens; identical to SEQ ID NO: 9628

SEQ ID NO: 9630 - protein, 628 aa, Homo sapiens
MGSCARLLLLWGCTVVAAGLSGVAGVSSRCEKACNPRMGNLALGRKLWADTTCGQNATELYCFYSENTDLTCRQPKCDKCNAAYPHLAHLPSAMADSSFRFPRTWWQSAEDVHREKIQLDLEAEFYFTHLIVMFKSPRPAAMVLDRSQDFGKTWKPYKYFATNCSATFGLEDDVVKKGAICTSKYSSPFPCTGGEVIFKALSPPYDTENPYSAKVQEQLKITNLRVQLLKRQSCPCQRNDLNEEPQHFTHYAIYDFIVKGSCFCNGHADQCIPVHGFRPVKAPGTFHMVHGKCMCKHNTAGSHCQHCAPLYNDRPWEAADGKTGAPNECRTCKCNGHADTCHFDVNVWEASGNRSGGVCDDCQHNTEGQYCQRCKPGFYRDLRRPFSAPDACKPCSCHPVGSAVLPANSVTFCDPSNGDCPCKPGVAGRRCDRCMVGYWGFGDYGCRPCDCAGSCDPITGDCISSHTDIDWYHEVPDFRPVHNKSEPAWEWEDAQGFSALLHSGKCECKEQTLGNAKAFCGMKYSYVLKIKILSAHDKGTHVEVNVKIKKVLKSTKLKIFRGKRTLYPESWTDRGCTCPILNPGLEYLVAGHEDIRTGKLIVNMKSFVQHWKPSLGRKVMDILKRECK

SEQ ID NO: 9631 - protein, 605 aa, Homo sapiens
MGSCARLLLLWGCTVVAAGLSGVAGVSSRCEKACNPRMGNLALGRKLWADTTCGQNATELYCFYSENTDLTCRQPKCDKCNAAYPHLAHLPSAMADSSFRFPRTWWQSAEDVHREKIQLDLEAEFYFTHLIVMFKSPRPAAMVLDRSQDFGKTWKPYKYFATNCSATFGLEDDVVKKGAICTSKYSSPFPCTGGEVIFKALSPPYDTENPYSAKVQEQLKITNLRVQLLKRQSCPCQRNDLNEEPQHFTHYAIYDFIVKGSCFCNGHADQCIPVHGFRPVKAPGTFHMVHGKCMCKHNTAGSHCQHCAPLYNDRPWEAADGKTGAPNECRTCKCNGHADTCHFDVNVWEASGNRSGGVCDDCQHNTEGQYCQRCKPGFYRDLRRPFSAPDACKPCSCHPVGSAVLPANSVTFCDPSNGDCPCKPGVAGRRCDRCMVGYWGFGDYGCRPCDCAGSCDPITGDCISSHTDIDWYHEVPDFRPVHNKSEPAWEWEDAQGFSALLHSVLKIKILSAHDKGTHVEVNVKIKKVLKSTKLKIFRGKRTLYPESWTDRGCTCPILNPGLEYLVAGHEDIRTGKLIVNMKSFVQHWKPSLGRKVMDILKRECK

SEQ ID NO: 9632 - protein, 75 aa, Homo sapiens
MPCQRIPEATTTLATTPGAYSSDPQCQNYCNMSDTRVHMSLRRYCQQDHVLRAQVLASEAAGPAWQRLAVRVLAV

SEQ ID NO: 9633 - protein, 489 aa, Homo sapiens
MPVTFALLLLLGQATADPCYDPQGRPQFCLPPVTQLAAVAASCPQACALSPGNHLGARETCNGSLTLALGGPFLLTSVSLRFCTPGPPALILSAAWASGGPWRLLWHRPAWPGALGGPERVTFHSTPGPKATVAASHLRVEFGGQAGLAAAGLRGRCQCHGHAARCAARARPPRCHCRHHTTGPGCESCRPSHRDWPWRPATPRHPHPCLPCSCNQHARRCRFNSELFRLSGGRSGGVCERCRHHTAGRHCHYCQPGFWRDPSQPIFSRRACRACQCHPIGATGGTCNQTSGQCTCKLGVTGLTCNRCGPGYQQSRSPRMPCQRIPEATTTLATTPGAYSSDPQCQNYCNMSDTRVHMSLRRYCQQDHVLRAQVLASEAAGPAWQRLAVRVLAVYKQRAQPVRRGDQDAWVPRADLTCGCLRLQPGTDYLLLGSAVGDPDPTRLILDRHGLALPWRPRWARPLKRLQQEERAGGCRGVRAPTPSPRPEH

SEQ ID NO: 9634 - protein, 480 aa, Homo sapiens
MYLSRFLSIHALWVTVSSVMQPYPLVWGHYDLCKTQIYTEEGKVWDYMACQPESTDMTKYLKVKLDPPDITCGDPPETFCAMGNPYMCNNECDASTPELAHPPELMFDFEGRHPSTFWQSATWKEYPKPLQVNITLSWSKTIELTDNIVITFESGRPDQMILEKSLDYGRTWQPYQYYATDCLDAFHMDPKSVKDLSQHTVLEIICTEEYSTGYTTNSKIIHFEIKDRFAFFAGPRLRNMASLYGQLDTTKKLRDFFTVTDLRIRLLRPAVGEIFVDELHLARYFYAISDIKVRGRCKCNLHATVCVYDNSKLTCECEHNTTGPDCGKCKKNYQGRPWSPGSYLPIPKGTANTCIPSISSIGNPPKFNRIWPNISSLEVSNPKQVAPKLALSTVSSVQVANHKRANVCDNELLHCQNGGTCHNNVRCLCPAAYTGILCEKLRCEEAGSCGSDSGQGAPPHGSPALLLLTTLLGTASPLVF

SEQ ID NO: 9635 - protein, 539 aa, Homo sapiens
MYLSRFLSIHALWVTVSSVMQPYPLVWGHYDLCKTQIYTEEGKVWDYMACQPESTDMTKYLKVKLDPPDITCGDPPETFCAMGNPYMCNNECDASTPELAHPPELMFDFEGRHPSTFWQSATWKEYPKPLQVNITLSWSKTIELTDNIVITFESGRPDQMILEKSLDYGRTWQPYQYYATDCLDAFHMDPKSVKDLSQHTVLEIICTEEYSTGYTTNSKIIHFEIKDRFAFFAGPRLRNMASLYGQLDTTKKLRDFFTVTDLRIRLLRPAVGEIFVDELHLARYFYAISDIKVRGRCKCNLHATVCVYDNSKLTCECEHNTTGPDCGKCKKNYQGRPWSPGSYLPIPKGTANTCIPSISSIGNCECFGHSNRCSYIDLLNTVICVSCKHNTRGQHCELCRLGYFRNASAQLDDENVCIECYCNPLGSIHDRCNGSGFCECKTGTTGPKCDECLPGNSWHYGCQPNVCDNELLHCQNGGTCHNNVRCLCPAAYTGILCEKLRCEEAGSCGSDSGQGAPPHGSPALLLLTTLLGTASPLVF

SEQ ID NO: 9636 - protein, 539 aa, Homo sapiens; identical to SEQ ID NO: 9635

SEQ ID NO: 9637 - protein, 460 aa, Homo sapiens
MYLSRFLSIHALWVTVSSVMQPYPLVWGHYDLCKTQIYTEEGKVWDYMACQPESTDMTKYLKVKLDPPDITCGDPPETFCAMGNPYMCNNECDASTPELAHPPELMFDFEGRHPSTFWQSATWKEYPKPLQVNITLSWSKTIELTDNIVITFESGRPDQMILEKSLDYGRTWQPYQYYATDCLDAFHMDPKSVKDLSQHTVLEIICTEEYSTGYTTNSKIIHFEIKDRFAFFAGPRLRNMASLYGQLDTTKKLRDFFTVTDLRIRLLRPAVGEIFVDELHLARYFYAISDIKVRGRCKCNLHATVCVYDNSKLTCECEHNTTGPDCGKCKKNYQGRPWSPGSYLPIPKGTANTCIPSISSIGNPPKFNRIWPNISSLEVSNPKQANVCDNELLHCQNGGTCHNNVRCLCPAAYTGILCEKLRCEEAGSCGSDSGQGAPPHGSPALLLLTTLLGTASPLVF

SEQ ID NO: 9638 - protein, 480 aa, Homo sapiens; identical to SEQ ID NO: 9634

SEQ ID NO: 9639 - protein, 438 aa, Homo sapiens
MYLSRFLSIHALWVTVSSVMQPYPLVWGHYDLCKTQIYTEEGKVWDYMACQPESTDMTKYLKVKLDPPDITCGDPPETFCAMGNPYMCNNECDASTPELAHPPELMFDFEGRHPSTFWQSATWKEYPKPLQVNITLSWSKTIELTDNIVITFESGRPDQMILEKSLDYGRTWQPYQYYATDCLDAFHMDPKSVKDLSQHTVLEIICTEEYSTGYTTNSKIIHFEIKDRFAFFAGPRLRNMASLYGQLDTTKKLRDFFTVTDLRIRLLRPAVGEIFVDELHLARYFYAISDIKVRGRCKCNLHATVCVYDNSKLTCECEHNTTGPDCGKCKKNYQGRPWSPGSYLPIPKGTANTCIPSISSIGTNVCDNELLHCQNGGTCHNNVRCLCPAAYTGILCEKLRCEEAGSCGSDSGQGAPPHGSPALLLLTTLLGTASPLVF

SEQ ID NO: 9640 - protein, 494 aa, Homo sapiens
MYLSRFLSIHALWVTVSSVMQPYPLVWGHYDLCKTQIYTEEGKVWDYMACQPESTDMTKYLKVKLDPPDITCGDPPETFCAMGNPYMCNNECDASTPELAHPPELMFDFEGRHPSTFWQSATWKEYPKPLQVNITLSWSKTIELTDNIVITFESGRPDQMILEKSLDYGRTWQPYQYYATDCLDAFHMDPKSVKDLSQHTVLEIICTEEYSTGYTTNSKIIHFEIKDRFAFFAGPRLRNMASLYGQLDTTKKLRDFFTVTDLRIRLLRPAVGEIFVDELHLARYFYAISDIKVRGRCKCNLHATVCVYDNSKLTCECEHNTTGPDCGKCKKNYQGRPWSPGSYLPIPKGTANTCIPSISSIGNCECFGHSNRCSYIDLLNTVICVSCKHNTRGQHCELCRLGYFRNASAQLDDENVCIANVCDNELLHCQNGGTCHNNVRCLCPAAYTGILCEKLRCEEAGSCGSDSGQGAPPHGSPALLLLTTLLGTASPLVF

SEQ ID NO: 9641 - protein, 422 aa, Homo sapiens
MLHLLALFLHCLPLASGDYDICKSWVTTDEGPTWEFYACQPKVMRLKDYVKVKVEPSGITCGDPPERFCSHENPYLCSNECDASNPDLAHPPRLMFDKEEEGLATYWQSITWSRYPSPLEANITLSWNKTVELTDDVVMTFEYGRPTVMVLEKSLDNGRTWQPYQFYAEDCMEAFGMSARRARDMSSSSAHRVLCTEEYSRWAGSKKEKHVRFEVRDRFAIFAGPDLRNMDNLYTRLESAKGLKEFFTLTDLRMRLLRPALGGTYVQRENLYKYFYAISNIEVIGRCKCNLHANLCSMREGSLQCECEHNTTGPDCGKCKKNFRTRSWRAGSYLPLPHGSPNACATAGSFGTLQTPPPGRSPSALRGSRRGLANVKEPAGSRPQISEMLLGCTVTLHQGSVGPHIPPKLSLPDPGGPWLGSQ

SEQ ID NO: 9642 - protein, 530 aa, Homo sapiens
MLHLLALFLHCLPLASGDYDICKSWVTTDEGPTWEFYACQPKVMRLKDYVKVKVEPSGITCGDPPERFCSHENPYLCSNECDASNPDLAHPPRLMFDKEEEGLATYWQSITWSRYPSPLEANITLSWNKTVELTDDVVMTFEYGRPTVMVLEKSLDNGRTWQPYQFYAEDCMEAFGMSARRARDMSSSSAHRVLCTEEYSRWAGSKKEKHVRFEVRDRFAIFAGPDLRNMDNLYTRLESAKGLKEFFTLTDLRMRLLRPALGGTYVQRENLYKYFYAISNIEVIGRCKCNLHANLCSMREGSLQCECEHNTTGPDCGKCKKNFRTRSWRAGSYLPLPHGSPNACATAGSFGNCECYGHSNRCSYIDFLNVVTCVSCKHNTRGQHCQHCRLGYYRNGSAELDDENVCIECNCNQIGSVHDRCNETGFCECREGAAGPKCDDCLPTHYWRQGCYPNVCDDDQLLCQNGGTCLQNQRCACPRGYTGVRCEQPRCDPADDDGGLDCDRAPGAAPRPATLLGCLLLLGLAARLGR

SEQ ID NO: 9643 - protein, 170 aa, Homo sapiens
MMAGMKIQLVCMLLLAFSSWSLCSDSEEEMKALEADFLTNMHTSKISKAHVPSWKMTLLNVCSLVNNLNSPAEETGEVHEEELVARRKLPTALDGFSLEAMLTIYQLHKICHSRAFQHWELIQEDILDTGNDKNGKEEVIKRKIPYILKRQLYENKPRRPYILKRDSYYY

SEQ ID NO: 9644 - protein, 95 aa, Homo sapiens
MMAGMKIQLVCMLLLAFSSWSLCSDSEEEMKALEADFLTNMHTSKLIQEDILDTGNDKNGKEEVIKRKIPYILKRQLYENKPRRPYILKRDSYYY

SEQ ID NO: 9645 - protein, 103 aa, Homo sapiens
MGIWQRLLLFGGVSLRAGGGATAPLGGSRAMVCGRQLSGAGSETLKQRRTQIMSRGLPKQKPIEGVKQVIVVASGKGGVGKSTTAVETGFHRVNQDGLHLLIS

SEQ ID NO: 9646 - protein, 319 aa, Homo sapiens
MGIWQRLLLFGGVSLRAGGGATAPLGGSRAMVCGRQLSGAGSETLKQRRTQIMSRGLPKQKPIEGVKQVIVVASGKGGVGKSTTAVNLALALAANDSSKAIGLLDVDVYGPSVPKMMNLKGNPELSQSNLMRPLLNYGIACMSMGFLVEESEPVVWRGLMVMSAIEKLLRQVDWGQLDYLVVDMPPGTGDVQLSVSQNIPITGAVIVSTPQDIALMDAHKGAEMFRRVHVPVLGLVQNMSVFQCPKCKHKTHIFGADGARKLAQTLGLEVLGDIPLHLNIREASDTGQPIVFSQPESDEAKAYLRIAVEVVRRLPSPSE

SEQ ID NO: 9647 - protein, 173 aa, Homo sapiens
MGIWQRLLLFGGVSLRAGGGATAPLGGSRAMVCGRQLSGAGSETLKQRRTQIMSRGLPKQKPIEGVKQVIVVASGKGGVGKSTTAVNLALALAANDSSKAIGLLDVDVYGPSVPKMMNLKGNPELSQSNLMRPLLNYGIACMSMGFLVEESEPVVWRGLMVMSAIEKLLRQVL

SEQ ID NO: 9648 - protein, 167 aa, Homo sapiens
MGIWQRLLLFGGVSLRAGGGATAPLGGSRAMVCGRQLSGAGSETLKQRRTQIMSRGLPKQKPIEGVKQVIVVASGKGGVGKSTTAVNLALALAANDSVLGLVQNMSVFQCPKCKHKTHIFGADGARKLAQTLGLEVLGDIPLHLNIREASDTGQPIVFSQPESDEAK

SEQ ID NO: 9649 - protein, 54 aa, Homo sapiens
MMRIEVKVKMMLSGAGSETLKQRRTQIMSRGLPKQKPIEGVKQVIVVASGKGGV

SEQ ID NO: 9650 - protein, 133 aa, Homo sapiens
MSRGLPKQKPIEGVKQVIVVASGKGGVGKSTTAVNLALALAANDSSKAIGLLDVDVYGPSVPKMMNLKGNPELSQSNLMRPLLNYGIACMSMGFLVEESEPVVWRGLMVMSAIEKLLRQVDWGQLDYLVVDMP

SEQ ID NO: 9651 - protein, 130 aa, Homo sapiens
VSLRAGGGATAPLGGSRAMVCGRQLSGAGSETLKQRRTQIMSRGLPKQKPIEGVKQVIVVASGKGGVGKSTTAVNLALALAANDSSKAIGLLDVDVYGPSVPKMMNLKGNPELSQSISQRCCRSCSRPPQ

SEQ ID NO: 9652 - protein, 111 aa, Homo sapiens
MPPSGPRGTLLLLPLLLLLLLRAVLAVPLERGAPNKEETPATESPDTGLYYHRYLQEVIDVLETDGHFREKLQAANAEDIKSGKLSRELDFVSHHVRTKLDELKRQEVSRL

SEQ ID NO: 9653 - protein, 124 aa, Homo sapiens
MPPSGPRGTLLLLPLLLLLLLRAVLAVPLERGAPNKEETPATESPDTGLYYHRYLQEVIDVLETDGHFREKLQAANAEDIKSGKLSRELDFVSHHVRTKLDELKRQEVSRLRMLLKAKMDAEQD

SEQ ID NO: 9654 - protein, 268 aa, Homo sapiens
MPPSGPRGTLLLLPLLLLLLLRAVLAVPLERGAPNKEETPATESPDTGLYYHRYLQEVIDVLETDGHFREKLQAANAEDIKSGKLSRELDFVSHHVRTKLDELKRQEVSRLRMLLKAKMDAEQDPNVQVDHLNLLKQFEHLDPQNQHTFEARDLELLIQTATRDLAQYDAAHHEEFKRYEMLKEHERRRYLESLGEEQRKEAERKLEEQQRRHREHPKVNVPGSQAQLKEVWEELDGLDPNRDLTHPVLGPLRYLAILFPSDINSDGV

SEQ ID NO: 9655 - protein, 461 aa, Homo sapiens
MPPSGPRGTLLLLPLLLLLLLRAVLAVPLERGAPNKEETPATESPDTGLYYHRYLQEVIDVLETDGHFREKLQAANAEDIKSGKLSRELDFVSHHVRTKLDELKRQEVSRLRMLLKAKMDAEQDPNVQVDHLNLLKQFEHLDPQNQHTFEARDLELLIQTATRDLAQYDAAHHEEFKRYEMLKEHERRRYLESLGEEQRKEAERKLEEQQRRHREHPKVNVPGSQAQLKEVWEELDGLDPNRFNPKTFFILHDINSDGVLDEQELEALFTKELEKVYDPKNEEDDMREMEEERLRMREHVMKNVDTNQDRLVTLEEFLASTQRKEFGDTGEGWETVEMHPAYTEEELRRFEEELAAREAELNAKAQRLSQETEALGRSQGRLEAQKRELQQAVLHMEQRKQQQQQQQGHKAPAAHPEGQLKFHPDTDDVPVPAPAGDQKEVDTSEKKLLERLPEVEVPQHL

SEQ ID NO: 9656 - protein, 461 aa, Homo sapiens; identical to SEQ ID NO: 9655

SEQ ID NO: 9657 - protein, 75 aa, Homo sapiens
MPPSGPRGTLLLLPLLLLLLLRAVLAVPLERGAPNKEETPATESPVSGPALLSSQVFAVVLQLLQTPVPVGRMLQ

SEQ ID NO: 9658 - protein, 295 aa, Homo sapiens
  SITE 1: note = misc_feature - Xaa can be any naturally occurring amino acid
XPPSGPRGTLLLLPLLLLLLLRAVLAVPLERGAPNKEETPATESPDTGLYYHRYLQEVIDVLETDGHFREKLQAANAEDIKSGKLSRELDFVSHHVRTKLDELKRQEFEHLDPQNQHTFEARDLELLIQTATRDLAQYDAAHHEEFKRYEMLKEHERRRYLESLGEEQRKEAERKLEEQQRRHREHPKVNVPGSQAQLKEVWEELDGLDPNRFNPKTFFILHDINSDGVLDEQELEALFTKELEKVYDPKNEEDDMREMEEERLRMREHVMKNVDTNQDRLVTLEEFLASTQRKE

SEQ ID NO: 9659 - protein, 34 aa, Homo sapiens
MRWRTILLQYCFLLITCLLTALEAVPIDIDKTKV

SEQ ID NO: 9660 - protein, 34 aa, Homo sapiens; identical to SEQ ID NO: 9659

SEQ ID NO: 9661 - protein, 39 aa, Homo sapiens
MRWRTILLQYCFLLITCLLTALEAVPIDIDKTKVQNIHP

SEQ ID NO: 9662 - protein, 69 aa, Homo sapiens
MRWRTILLQYCFLLITCLLTALEAVPIDIDKTKVQNIHPVESAKIEPPDTGLYYDEYLKQVIDVLETDK

SEQ ID NO: 9663 - protein, 69 aa, Homo sapiens; identical to SEQ ID NO: 9662

SEQ ID NO: 9664 - protein, 90 aa, Homo sapiens
MRWRTILLQYCFLLITCLLTALEAVPIDIDKTKVQNIHPVESAKIEPPDTGLYYDEYLKQVIDVLETDKHFREKLQKADIEEIKSGRLSK

SEQ ID NO: 9665 - protein, 195 aa, Homo sapiens
MRWRTILLQYCFLLITCLLTALEAVPIDIDKTKVQNIHPVESAKIEPPDTGLYYDEYLKQVIDVLETDKHFREKLQKADIEEIKSGRLSKELDLVSHHVRTKLDELKRQEVGRLRMLIKAKLDSLQDIGMDHQALLKQFDHLNHLNPDKFESTDLDMLIKAATSDLEHYDKTRHEEFKKYEMMKEHERREYLKTL

SEQ ID NO: 9666 - protein, 198 aa, Homo sapiens
MRWRTILLQYCFLLITCLLTALEAVPIDIDKTKVQNIHPVESAKIEPPDTGLYYDEYLKQVIDVLETDKHFREKLQKADIEEIKSGRLSKELDLVSHHVRTKLDELKRQEVGRLRMLIKAKLDSLQDIGMDHQALLKQFDHLNHLNPDKFESTDLDMLIKAATSDLEHYDKTRHEEFKKYEMMKEHERREYLKTLNEE

SEQ ID NO: 9667 - protein, 420 aa, Homo sapiens
MRWRTILLQYCFLLITCLLTALEAVPIDIDKTKVQNIHPVESAKIEPPDTGLYYDEYLKQVIDVLETDKHFREKLQKADIEEIKSGRLSKELDLVSHHVRTKLDELKRQEVGRLRMLIKAKLDSLQDIGMDHQALLKQFDHLNHLNPDKFESTDLDMLIKAATSDLEHYDKTRHEEFKKYEMMKEHERREYLKTLNEEKRKEEESKFEEMKKKHENHPKVNHPGSKDQLKEVWEETDGLDPNDFDPKTFFKLHDVNSDGFLDEQELEALFTKELEKVYDPKNEEDDMVEMEEERLRMREHVMNEVDTNKDRLVTLEEFLKATEKKEFLEPDSWETLDQQQFFTEEELKEYENIIALQENELKKKADELQKQKEELQRQHDQLEAQKLEYHQVIQQMEQKKLQQGIPPSGPAGELKFEPRV

SEQ ID NO: 9668 - protein, 390 aa, Homo sapiens
MRWRTILLQYCFLLITCLLTALEAVPIDIDKTKVQNIHPVESAKIEPPDTGLYYDEYLKQVIDVLETDKHFREKLQKADIEEIKSGRLSKELDLVSHHVRTKLDELKRQEVGRLRMLIKAKLDSLQDIGMDHQALLKQFDHLNHLNPDKFESTDLDMLIKAATSDLEHYDKTRHEEFKKYEMMKEHERREYLKTLNEEKRKEEESKFEEMKKKHENHPKVNHPGSKDQLKEVWEETDGLDPNDFDPKTFFKLHDVNSDGFLDEQELEALFTKELEKVYDPKNEEDDMVEMEEERLRMREHVMNETLDQQQFFTEEELKEYENIIALQENELKKKADELQKQKEELQRQHDQLEAQKLEYHQVIQQMEQKKLQQGIPPSGPAGELKFEPHI

SEQ ID NO: 9669 - protein, 420 aa, Homo sapiens
MRWRTILLQYCFLLITCLLTALEAVPIDIDKTKVQNIHPVESAKIEPPDTGLYYDEYLKQVIDVLETDKHFREKLQKADIEEIKSGRLSKELDLVSHHVRTKLDELKRQEVGRLRMLIKAKLDSLQDIGMDHQALLKQFDHLNHLNPDKFESTDLDMLIKAATSDLEHYDKTRHEEFKKYEMMKEHERREYLKTLNEEKRKEEESKFEEMKKKHENHPKVNHPGSKDQLKEVWEETDGLDPNDFDPKTFFKLHDVNSDGFLDEQELEALFTKELEKVYDPKNEEDDMVEMEEERLRMREHVMNEVDTNKDRLVTLEEFLKATEKKEFLEPDSWETLDQQQFFTEEELKEYENIIALQENELKKKADELQKQKEELQRQHDQLEAQKLEYHQVIQQMEQKKLQQGIPPSGPAGELKFEPHI

SEQ ID NO: 9670 - protein, 338 aa, Homo sapiens
MRWRTILLQYCFLLITCLLTALEAVPIDIDKTKVQNIHPVESAKIEPPDTGLYYDEYLKQVIDVLETDKHFREKLQKADIEEIKSGRLSKELDLVSHHVRTKLDELKRQEVGRLRMLIKAKLDSLQDIGMDHQALLKQFDHLNHLNPDKFESTDLDMLIKAATSDLEHYDKTRHEEFKKYEMMKEHERREYLKTLNEEKRKEEESKFEEMKKKHENHPKVNHPGSKDQLKEVWEETDGLDPNDFDPKTFFKLHDVNSDGFLDEQELEALFTKELEKVYDPKNEEDDMVEMEEERLRMREHVMNEVDTNKDRLVTLEEFLKATEKKEFLEPDSWESPSI

SEQ ID NO: 9671 - protein, 420 aa, Homo sapiens; identical to SEQ ID NO: 9669

SEQ ID NO: 9672 - protein, 231 aa, Homo sapiens
MRWRTILLQYCFLLITCLLTALEAVPIDIDKTKVQNIHPVESAKIEPPDTGLYYDEYLKQVIDVLETDKHFREKLQKADIEEIKSGRLSKELDLVSHHVRTKLDELKRQEVGRLRMLIKAKLDSLQDIGMDHQALLKQFDHLNHLNPDKFESTDLDMLIKAATSDLEHYDKTRHEEFKKYEMMKEHERREYLKTLNEEKRKEEESKFEEMKKKHENHPKVNHPVHREAKIN

SEQ ID NO: 9673 - protein, 73 aa, Homo sapiens
  SITE 1: note = misc_feature - Xaa can be any naturally occurring amino acid
XEERLRMREHVMNEVDTNKDRLVTLEEFLKATEKKEFLEPDSWEVIQQMEQKKLQQGIPPSGPAGELKFEPHI

SEQ ID NO: 9674 - protein, 198 aa, Homo sapiens
  SITE 1: note = misc_feature - Xaa can be any naturally occurring amino acid
XTLNEEKRKEEESKFEEMKKKHENHPKVNHPGSKDQLKEVWEETDGLDPNDFDPKTFFKLHDVNSDGFLDEQELEALFTKELEKVYDPKNEEDDMVEMEEERLRMREHVMNETLDQQQFFTEEELKEYENIIALQENELKKKADELQKQKEELQRQHDQLEAQKLEYHQVIQQMEQKKLQQGIPPSGPAGELKFEPHI

SEQ ID NO: 9675 - protein, 375 aa, Homo sapiens
MSSSLRPGPSRWRRAASIVLAAGWSRPETATPPSRPPPAEGFRLLLLQRSPHQGFMPGAHVFSGGVLDAADRSADWLGLFAPHHGPPRFGLGPAPFSRTAFPSLPDTDDHKTDNTGTLPEDVAFRICAVREAFEEAGVLLLRPRTSPPGPAPGPGLALEPPPGLASWRDRVRQDPRHFLRLCAHLDCTPDIWALHNWSAWLTPFLRGTTRRFDTAFFLCCLREPPPVYPDLAEVVGYQWSSPSEATESFLSKEIWLPPPQFYEVRRLANFASLSDLHKFCLGRALEGLERWLPIILLTADGMVHLLPGDELYLEDSDFLENLMSTEKKTEEIMKEGKQFHRIVTYHRHLYDIHVTVQPKYKHVYPKNSVVRKSHL

SEQ ID NO: 9676 - protein, 77 aa, Homo sapiens
MAGRLLGKALAAVSLSLALASVTIRSSRCRGIQAFRNPAGRTGLVGRGLLGRWGPNHAADPIITRGWWIQERRLVPH

SEQ ID NO: 9677 - protein, 284 aa, Homo sapiens
MAGRLLGKALAAVSLSLALASVTIRSSRCRGIQAFRNSFSSSWFHLNTNVMSGSNGSKENSHNKARTSPYPGSKVERSQVPNEKVGWLVEWQDYKPVEYTAVSVLAGPRWADPQIRNPAGRTGLVGRGLLGRWGPNHAADPIITRWKRDSSGNKIMHPVSGKHILQFVAIKRKDCGEWAIPGGMVDPGEKISATLKREFGEEALNSLQKTSAEKREIEEKLHKLFSQDHLVIYKGYVDDPRNTDNAWMETEAVNYHDETGEIMDNLMLEAGDDAGKVKWVDIND

SEQ ID NO: 9678 - protein, 350 aa, Homo sapiens
MAGRLLGKALAAVSLSLALASVTIRSSRCRGIQAFRNSFSSSWFHLNTNVMSGSNGSKENSHNKARTSPYPGSKVERSQVPNEKVGWLVEWQDYKPVEYTAVSVLAGPRWADPQISESNFSPKFNEKDGHVERKSKNGLYEIENGRPRNPAGRTGLVGRGLLGRWGPNHAADPIITRWKRDSSGNKIMHPVSGKHILQFVAIKRKDCGEWAIPGGMVDPGEKISATLKREFGEEALNSLQKTSAEKREIEEKLHKLFSQDHLVIYKGYVDDPRNTDNAWMETEAVNYHDETGEIMDNLMLEAGDDAGKVKWVDINDKLKLYASHSQFIKLVAEKRDAHWSEDSEADCHAL

SEQ ID NO: 9679 - protein, 206 aa, Homo sapiens
MSGSNGSKENSHNKARTSPYPGSKVERSQVPNEKVGWLVEWQDYKPVEYTAVSVLAGPRWADPQISESNFSPKFNEKDGHVERKSKNGLYEIENGRPRNPAGRTGLVGRGLLGRWGPNHAADPIITRWKRDSSGNKIMHPVSGKHILQFVAIKRKDCGEWAIPGGMVDPGEKISATLKREFGEEALNSLQKTSAEKREIEEKLHKL

SEQ ID NO: 9680 - protein, 300 aa, Homo sapiens
MSGSNGSKENSHNKARTSPYPGSKVERSQVPNEKVGWLVEWQDYKPVEYTAVSVLAGPRWADPQISESNFSPKFNEKDGHVERKSKNGLYEIENGRPRNPAGRTGLVGRGLLGRWGPNHAADPIITRWKRDSSGNKIMHPVSGKHILQFVAIKRKDCGEWAIPGGMVDPGEKISATLKREFGEEALNSLQKTSAEKREIEEKLHKLFSQDHLVIYKGYVDDPRNTDNAWMETEAVNYHDETGEIMDNLMLEAGDDAGKVKWVDINDKLKLYASHSQFIKLVAEKRDAHWSEDSEADCHAL

SEQ ID NO: 9681 - protein, 1391 aa, Homo sapiens
MPSSLLGAAMPASTSAAALQEALENAGRLIDRQLQEDRMYPDLSELLMVSAPNNPTVSGMSDMDYPLQGPGLLSVPNLPEISSIRRVPLPPELVEQFGHMQCNCMMGVFPPISRAWLTIDSDIFMWNYEDGGDLAYFDGLSETILAVGLVKPKAGIFQPHVRHLLVLATPVDIVILGLSYANLQTGSGVLNDSLSGGMQLLPDPLYSLPTDNTYLLTITSTDNGRIFLAGKDGCLYEVAYQAEAGWFSQRCRKINHSKSSLSFLVPSLLQFTFSEDDPILQIAIDNSRNILYTRSEKGVIQVYDLGQDGQGMSRVASVSQNAIVSAAGNIARTIDRSVFKPIVQIAVIENSESLDCQLLAVTHAGVRLYFSTCPFRQPLARPNTLTLVHVRLPPGFSASSTVEKPSKVHRALYSKGILLMAASENEDNDILWCVNHDTFPFQKPMMETQMTAGVDGHSWALSAIDELKVDKIITPLNKDHIPITDSPVVVQQHMLPPKKFVLLSAQGSLMFHKLRPVDQLRHLLVSNVGGDGEEIERFFKLHQEDQACATCLILACSTAACDREVSAWATRAFFRYGGEAQMRFPTTLPPPSNVGPILGSPVYSSSPVPSGSPYPNPSFLGTPSHGIQPPAMSTPVCALGNPATQATNMSCVTGPEIVYSGKHNGICIYFSRIMGNIWDASLVVERIFKSGNREITAIESSVPCQLLESVLQELKGLQEFLDRNSQFAGGPLGNPNTTAKVQQRLIGFMRPENGNPQQMQQELQRKFHEAQLSEKISLQAIQQLVRKSYQALALWKLLCEHQFTIIVAELQKELQEQLKITTFKDLVIRDKELTGALIASLINCYIRDNAAVDGISLHLQDICPLLYSTDDAICSKANELLQRSRQVQNKTEKERMLRESLKEYQKISNQVDLSNVCAQYRQVRFYEGVVELSLTAAEKKDPQGLGLHFYKHGEPEEDIVGLQAFQERLNSYKCITDTLQELVNQSKAAPQSPSVPKKPGPPVLSSDPNMLSNEEAGHHFEQMLKLSQRSKDELFSIALYNWLIQVDLADKLLQVASPFLEPHLVRMAKVDQNRVRYMDLLWRYYEKNRSFSNAARVLSRLADMHSTEISLQQRLEYIARAILSAKSSTAISSIAADGEFLHELEEKMEVARIQLQIQETLQRQYSHHSSVQDAVSQLDSELMDITKLYGEFADPFKLAECKLAIIHCAGYSDPILVQTLWQDIIEKELSDSVTLSSSDRMHALSLKIVLLGKIYAGTPRFFPLDFIVQFLEQQVCTLNWDVGFVIQTMNEIGVPLPRLLEVYDQLFKSRDPFWNRMKKPLHLLDCIHVLLIRYVENPSQVLNCERRRFTNLCLDAVCGYLVELQSMSSSVAVQAITGNFKSLQAKLERLH

SEQ ID NO: 9682 - protein, 1327 aa, Homo sapiens
MPSSLLGAAMPASTSAAALQEALENAGRLIDRQLQEDRMYPDLSELLMVSAPNNPTVSGMSDMDYPLQGPGLLSVPNLPEISSIRRVPLPPELVEQFGHMQCNCMMGVFPPISRAWLTIDSDIFMWNYEDGGDLAYFDGLSETILAVGLVKPKAGIFQPHVRHLLVLATPVDIVILGLSYANLQTGSGVLNDSLSGGMQLLPDPLYSLPTDNTYLLTITSTDNGRIFLAGKDGCLYEVAYQAEAGWFSQRCRKINHSKSSLSFLVPSLLQFTFSEDDPILQIAIDNSRNILYTRSEKGVIQVYDLGQDGQGMSRVASVSQNAIVSAAGNIARTIDRSVFKPIVQIAVIENSESLDCQLLAVTHAGVRLYFSTCPFRQPLARPNTLTLVHVRLPPGFSASSTVEKPSKVHRALYSKGILLMAASENEDNDILWCVNHDTFPFQKPMMETQMTAGVDGHSWALSAIDELKVDKIITPLNKDHIPITDSPVVVQQHMLPPKKFVLLSAQGSLMFHKLRPVDQLRHLLVSNVGGDGEEIERFFKLHQEDQACATCLILACSTAACDREVSAWATRAFFRYGGEAQMRFPTTLPPPSNVGPILGSPVYSSSPVPSGSPYPNPSFLGTPSHGIQPPAMSTPVCALGNPATQATNMSCVTGPEIVYSGKHNGICIYFSRIMGNIWDASLVVERIFKSGNREITAIESSVPCQLLESVLQELKGLQEFLDRNSQFAGGPLGNPNTTAKVQQRLIGFMRPENGNPQQMQQELQRKFHEAQLSEKISLQAIQQLVRKSYQALALWKLLCEHQFTIIVAELQKANELLQRSRQVQNKTEKERMLRESLKEYQKISNQVDLSNVCAQYRQVRFYEGVVELSLTAAEKKDPQGLGLHFYKHGEPEEDIVGLQAFQERLNSYKCITDTLQELVNQSKAAPQSPSVPKKPGPPVLSSDPNMLSNEEAGHHFEQMLKLSQRSKDELFSIALYNWLIQVDLADKLLQVASPFLEPHLVRMAKVDQNRVRYMDLLWRYYEKNRSFSNAARVLSRLADMHSTEISLQQRLEYIARAILSAKSSTAISSIAADGEFLHELEEKMEVARIQLQIQETLQRQYSHHSSVQDAVSQLDSELMDITKLYGEFADPFKLAECKLAIIHCAGYSDPILVQTLWQDIIEKELSDSVTLSSSDRMHALSLKIVLLGKIYAGTPRFFPLDFIVQFLEQQVCTLNWDVGFVIQTMNEIGVPLPRLLEVYDQLFKSRDPFWNRMKKPLHLLDCIHVLLIRYVENPSQVLNCERRRFTNLCLDAVCGYLVELQSMSSSVAVQAITGNFKSLQAKLERLH

SEQ ID NO: 9683 - protein, 54 aa, Homo sapiens
MPSSLLGAAMPASTSAAALQEALENAGRLIDRQLQEDRMYPDLSELLMVSAPSE

SEQ ID NO: 9684 - protein, 1332 aa, Homo sapiens
MSDMDYPLQGPGLLSVPNLPEISSIRRVPLPPELVEQFGHMQCNCMMGVFPPISRAWLTIDSDIFMWNYEDGGDLAYFDGLSETILAVGLVKPKAGIFQPHVRHLLVLATPVDIVILGLSYANLQTGSGVLNDSLSGGMQLLPDPLYSLPTDNTYLLTITSTDNGRIFLAGKDGCLYEVAYQAEAGWFSQRCRKINHSKSSLSFLVPSLLQFTFSEDDPILQIAIDNSRNILYTRSEKGVIQVYDLGQDGQGMSRVASVSQNAIVSAAGNIARTIDRSVFKPIVQIAVIENSESLDCQLLAVTHAGVRLYFSTCPFRQPLARPNTLTLVHVRLPPGFSASSTVEKPSKVHRALYSKGILLMAASENEDNDILWCVNHDTFPFQKPMMETQMTAGVDGHSWALSAIDELKVDKIITPLNKDHIPITDSPVVVQQHMLPPKKFVLLSAQGSLMFHKLRPVDQLRHLLVSNVGGDGEEIERFFKLHQEDQACATCLILACSTAACDREVSAWATRAFFRYGGEAQMRFPTTLPPPSNVGPILGSPVYSSSPVPSGSPYPNPSFLGTPSHGIQPPAMSTPVCALGNPATQATNMSCVTGPEIVYSGKHNGICIYFSRIMGNIWDASLVVERIFKSGNREITAIESSVPCQLLESVLQELKGLQEFLDRNSQFAGGPLGNPNTTAKVQQRLIGFMRPENGNPQQMQQELQRKFHEAQLSEKISLQAIQQLVRKSYQALALWKLLCEHQFTIIVAELQKELQEQLKITTFKDLVIRDKELTGALIASLINCYIRDNAAVDGISLHLQDICPLLYSTDDAICSKANELLQRSRQVQNKTEKERMLRESLKEYQKISNQVDLSNVCAQYRQVRFYEGVVELSLTAAEKKDPQGLGLHFYKHGEPEEDIVGLQAFQERLNSYKCITDTLQELVNQSKAAPQSPSVPKKPGPPVLSSDPNMLSNEEAGHHFEQMLKLSQRSKDELFSIALYNWLIQVDLADKLLQVASPFLEPHLVRMAKVDQNRVRYMDLLWRYYEKNRSFSNAARVLSRLADMHSTEISLQQRLEYIARAILSAKSSTAISSIAADGEFLHELEEKMEVARIQLQIQETLQRQYSHHSSVQDAVSQLDSELMDITKLYGEFADPFKLAECKLAIIHCAGYSDPILVQTLWQDIIEKELSDSVTLSSSDRMHALSLKIVLLGKIYAGTPRFFPLDFIVQFLEQQVCTLNWDVGFVIQTMNEIGVPLPRLLEVYDQLFKSRDPFWNRMKKPLHLLDCIHVLLIRYVENPSQVLNCERRRFTNLCLDAVCGYLVELQSMSSSVAVQAITGNFKSLQAKLERLH

SEQ ID NO: 9685 - protein, 140 aa, Homo sapiens
CKDDEAVVQAPRHAPVVRTPSIQPSLLPHAAPFAKSHLVHGSSPGVMGTSVATSASKIIPQGADSTMLATKTVKHGAPSPSHPISAPQAAAAAALRRQMASQAPAVNTLTESTLKNVPQVVNVQELKNNPATPSTAMGGL

SEQ ID NO: 9686 - protein, 78 aa, Homo sapiens
GEGTAAASAGGFGFGSSSNTTSFGTLASQNAPTFGSLSQQTSGFGTQSSGFSGFGSGTGGFSFGSNNSSVQGFGGWRS

SEQ ID NO: 9687 - protein, 113 aa, Homo sapiens
LQCLAALLLLGDPLGLEGCQHSVQPQPLQALWARREAKCSERALQLPAQEDSGLGAAATPHPSARSRVRMPPLSDHCPNRLLVLGPRVADSLVLDQAQEGSALGQITRKYPPF

SEQ ID NO: 9688 - protein, 2090 aa, Homo sapiens
MGDEMDAMIPEREMKDFQFRALKKVRIFDSPEELPKERSSLLAVSNKYGLVFAGGASGLQIFPTKNLLIQNKPGDDPNKIVDKVQGLLVPMKFPIHHLALSCDNLTLSACMMSSEYGSIIAFFDVRTFSNEAKQQKRPFAYHKLLKDAGGMVIDMKWNPTVPSMVAVCLADGSIAVLQVTETVKVCATLPSTVAVTSVCWSPKGKQLAVGKQNGTVVQYLPTLQEKKVIPCPPFYESDHPVRVLDVLWIGTYVFAIVYAAADGTLETSPDVVMALLPKKEEKHPEIFVNFMEPCYGSCTERQHHYYLSYIEEWDLVLAASAASTEVSILARQSDQINWESWLLEDSSRAELPVTDKSDDSLPMGVVVDYTNQVEITISDEKTLPPAPVLMLLSTDGVLCPFYMINQNPGVKSLIKTPERLSLEGERQPKSPGSTPTTPTSSQAPQKLDASAAAAPASLPPSSPAAPIATFSLLPAGGAPTVFSFGSSSLKSSATVTGEPPSYSSGSDSSKAAPGPGPSTFSFVPPSKASLAPTPAASPVAPSAASFSFGSSGFKPTLESTPVPSVSAPNIAMKPSFPPSTSAVKVNLSEKFTAAATSTPVSSSQSAPPMSPFSSASKPAASGPLSHPTPLSAPPSSVPLKSSVLPSPSGRSAQGSSSPVPSMVQKSPRITPPAAKPGSPQAKSLQPAVAEKQGHQWKDSDPVMAGIGEEIAHFQKELEELKARTSKACFQVGTSEEMKMLRTESDDLHTFLLEIKETTESLHGDISSLKTTLLEGFAGVEEAREQNERNRDSGYLHLLYKRPLDPKSEAQLQEIRRLHQYVKFAVQDVNDVLDLEWDQHLEQKKKQRHLLVPERETLFNTLANNREIINQQRKRLNHLVDSLQQLRLYKQTSLWSLSSAVPSQSSIHSFDSDLESLCNALLKTTIESHTKSLPKVPAKLSPMKQAQLRNFLAKRKTPPVRSTAPASLSRSAFLSQRYYEDLDEVSSTSSVSQSLESEDARTSCKDDEAVVQAPRHAPVVRTPSIQPSLLPHAAPFAKSHLVHGSSPGVMGTSVATSASKIIPQGADSTMLATKTVKHGAPSPSHPISAPQAAAAAALRRQMASQAPAVNTLTESTLKNVPQVVNVQELKNNPATPSTAMGSSVPYSTAKTPHPVLTPVAANQAKQGSLINSLKPSGPTPASGQLSSGDKASGTAKIETAVTSTPSASGQFSKPFSFSPSGTGFNFGIITPTPSSNFTAAQGATPSTKESSQPDAFSSGGGSKPSYEAIPESSPPSGITSASNTTPGEPAASSSRPVAPSGTALSTTSSKLETPPSKLGELLFPSSLAGETLGSFSGLRVGQADDSTKPTNKASSTSLTSTQPTKTSGVPSGFNFTAPPVLGKHTEPPVTSSATTTSVAPPAATSTSSTAVFGSLPVTSAGSSGVISFGGTSLSAGKTSFSFGSQQTNSTVPPSAPPPTTAATPLPTSFPTLSFGSLLSSATTPSLPMSAGRSTEEATSSALPEKPGDSEVSASAASLLEEQQSAQLPQAPPQTSDSVKKEPVLAQPAVSNSGTAASSTSLVALSAEATPATTGVPDARTEAVPPASSFSVPGQTAVTAAAISSAGPVAVETSSTPIASSTTSIVAPGPSAEAAAFGTVTSGSSVFAQPPAASSSSAFNQLTNNTATAPSATPVFGQVAASTAPSLFGQQTGSTASTAAATPQVSSSGFSSPAFGTTAPGVFGQTTFGQASVFGQSASSAASVFSFSQPGFSSVPAFGQPASSTPTSTSGSVFGAASSTSSSSSFSFGQSSPNTGGGLFGQSNAPAFGQSPGFGQGGSVFGGTSAATTTAATSGFSFCQASGFGSSNTGSVFGQAASTGGIVFGQQSSSSSGSVFGSGNTGRGGGFFSGLGGKPSQDAANKNPFSSASGGFGSTATSNTSNLFGNSGAKTFGGFASSSFGEQKPTGTFSSGGGSVASQGFGFSSPNKTGGFGAAPVFGSPPTFGGSPGFGGVPAFGSAPAFTSPLGSTGGKVFGEGTAAASAGGFGFGSSSNTTSFGTLASQNAPTFGSLSQQTSGFGTQSSGFSGFGSGTGGFSFGSNNSSVQGFGGWRS

SEQ ID NO: 9689 - protein, 2080 aa, Homo sapiens
MGDEMDAMIPEREMKDFQFRALKKVRIFDSPEELPKERSSLLAVSNKYGLVFAGGASGLQIFPTKNLLIQNKPGDDPNKIVDKVQGLLVPMKFPIHHLALSCDNLTLSACMMSSEYGSIIAFFDVRTFSNEAKQQKRPFAYHKLLKDAGGMVIDMKWNPTVPSMVAVCLADGSIAVLQVTETVKVCATLPSTVAVTSVCWSPKGKQLAVGKQNGTVVQYLPTLQEKKVIPCPPFYESDHPVRVLDVLWIGTYVFAIVYAAADGTLETSPDVVMALLPKKEEKHPEIFVNFMEPCYGSCTERQHHYYLSYIEEWDLVLAASAASTEVSILARQSDQINWESWLLEDSSRAELPVTDKSDDSLPMGVVVDYTNQVEITISDEKTLPPAPVLMLLSTDGVLCPFYMINQNPGVKSLIKTPERLSLEGERQPKSPGSTPTTPTSSQAPQKLDASAAAAPASLPPSSPAAPIATFSLLPAGGAPTVFSFGSSSLKSSATVTGEPPSYSSGSDSSKAAPGPGPSTFSFVPPSKASLAPTPAASPVAPSAASFSFGSSGFKPTLESTPVPSVSAPNIAMKPSFPPSTSAVKVNLSENSSQSAPPMSPFSSASKPAASGPLSHPTPLSAPPSSVPLKSSVLPSPSAGRSAQGSSSPVPSMVQKSPRITPPAAKPGSPQAKSLQPAVAEKQGHQWKDSDPVMAGIGEEIAHFQKELEELKARTSKACFQVGTSEEMKMLRTESDDLHTFLLEIKETTESLHGDISSLKTTLLEGFAGVEEAREQNERNRDSGYLHLLYKRPLDPKSEAQLQEIRRLHQYVKFAVQDVNDVLDLEWDQHLEQKKKQRHLLVPERETLFNTLANNREIINQQRKRLNHLVDSLQQLRLYKQTSLWSLSSAVPSQSSIHSFDSDLESLCNALLKTTIESHTKSLPKVPAKLSPMKQAQLRNFLAKRKTPPVRSTAPASLSRSAFLSQRYYEDLDEVSSTSSVSQSLESEDARTSCKDDEAVVQAPRHAPVVRTPSIQPSLLPHAAPFAKSHLVHGSSPGVMGTSVATSASKIIPQGADSTMLATKTVKHGAPSPSHPISAPQAAAAAALRRQMASQAPAVNTLTESTLKNVPQVVNVQELKNNPATPSTAMGSSVPYSTAKTPHPVLTPVAANQAKQGSLINSLKPSGPTPASGQLSSGDKASGTAKIETAVTSTPSASGQFSKPFSFSPSGTGFNFGIITPTPSSNFTAAQGATPSTKESSQPDAFSSGGGSKPSYEAIPESSPPSGITSASNTTPGEPAASSSRPVAPSGTALSTTSSKLETPPSKLGELLFPSSLAGETLGSFSGLRVGQADDSTKPTNKASSTSLTSTQPTKTSGVPSGFNFTAPPVLGKHTEPPVTSSATTTSVAPPAATSTSSTAVFGSLPVTSAGSSGVISFGGTSLSAGKTSFSFGSQQTNSTVPPSAPPPTTAATPLPTSFPTLSFGSLLSSATTPSLPMSAGRSTEEATSSALPEKPGDSEVSASAASLLEEQQSAQLPQAPPQTSDSVKKEPVLAQPAVSNSGTAASSTSLVALSAEATPATTGVPDARTEAVPPASSFSVPGQTAVTAAAISSAGPVAVETSSTPIASSTTSIVAPGPSAEAAAFGTVTSGSSVFAQPPAASSSSAFNQLTNNTATAPSATPVFGQVAASTAPSLFGQQTGSTASTAAATPQVSSSGFSSPAFGTTAPGVFGQTTFGQASVFGQSASSAASVFSFSQPGFSSVPAFGQPASSTPTSTSGSVFGAASSTSSSSSFSFGQSSPNTGGGLFGQSNAPAFGQSPGFGQGGSVFGGTSAATTTAATSGFSFCQASGFGSSNTGSVFGQAASTGGIVFGQQSSSSSGSVFGSGNTGRGGGFFSGLGGKPSQDAANKNPFSSASGGFGSTATSNTSNLFGNSGAKTFGGFASSSFGEQKPTGTFSSGGGSVASQGFGFSSPNKTGGFGAAPVFGSPPTFGGSPGFGGVPAFGSAPAFTSPLGSTGGKVFGEGTAAASAGGFGFGSSSNTTSFGTLASQNAPTFGSLSQQTSGFGTQSSGFSGFGSGTGGFSFGSNNSSVQGFGGWRS

SEQ ID NO: 9690 - protein, 52 aa, Homo sapiens
MKFPIHHLALSCDNLTLSACMMSSEYGSIIAFFDVRTFSNEAKQQKRPFAYH

SEQ ID NO: 9691 - protein, 1519 aa, Homo sapiens
MKPSFPPSTSAVKVNLSEKFTAAATSTPVSSSQSAPPMSPFSSASKPAASGPLSHPTPLSAPPSSVPLKSSVLPSPSGRSAQGSSSPVPSMVQKSPRITPPAAKPGSPQAKSLQPAVAEKQGHQWKDSDPVMAGIGEEIAHFQKELEELKARTSKACFQVGTSEEMKMLRTESDDLHTFLLEIKETTESLHGDISSLKTTLLEGFAGVEEAREQNERNRDSGYLHLLYKRPLDPKSEAQLQEIRRLHQYVKFAVQDVNDVLDLEWDQHLEQKKKQRHLLVPERETLFNTLANNREIINQQRKRLNHLVDSLQQLRLYKQTSLWSLSSAVPSQSSIHSFDSDLESLCNALLKTTIESHTKSLPKVPAKLSPMKQAQLRNFLAKRKTPPVRSTAPASLSRSAFLSQRYYEDLDEVSSTSSVSQSLESEDARTSCKDDEAVVQAPRHAPVVRTPSIQPSLLPHAAPFAKSHLVHGSSPGVMGTSVATSASKIIPQGADSTMLATKTVKHGAPSPSHPISAPQAAAAAALRRQMASQAPAVNTLTESTLKNVPQVVNVQELKNNPATPSTAMGSSVPYSTAKTPHPVLTPVAANQAKQGSLINSLKPSGPTPASGQLSSGDKASGTAKIETAVTSTPSASGQFSKPFSFSPSGTGFNFGIITPTPSSNFTAAQGATPSTKESSQPDAFSSGGGSKPSYEAIPESSPPSGITSASNTTPGEPAASSSRPVAPSGTALSTTSSKLETPPSKLGELLFPSSLAGETLGSFSGLRVGQADDSTKPTNKASSTSLTSTQPTKTSGVPSGFNFTAPPVLGKHTEPPVTSSATTTSVAPPAATSTSSTAVFGSLPVTSAGSSGVISFGGTSLSAGKTSFSFGSQQTNSTVPPSAPPPTTAATPLPTSFPTLSFGSLLSSATTPSLPMSAGRSTEEATSSALPEKPGDSEVSASAASLLEEQQSAQLPQAPPQTSDSVKKEPVLAQPAVSNSGTAASSTSLVALSAEATPATTGVPDARTEAVPPASSFSVPGQTAVTAAAISSAGPVAVETSSTPIASSTTSIVAPGPSAEAAAFGTVTSGSSVFAQPPAASSSSAFNQLTNNTATAPSATPVFGQVAASTAPSLFGQQTGSTASTAAATPQVSSSGFSSPAFGTTAPGVFGQTTFGQASVFGQSASSAASVFSFSQPGFSSVPAFGQPASSTPTSTSGSVFGAASSTSSSSSFSFGQSSPNTGGGLFGQSNAPAFGQSPGFGQGGSVFGGTSAATTTAATSGFSFCQASGFGSSNTGSVFGQAASTGGIVFGQQSSSSSGSVFGSGNTGRGGGFFSGLGGKPSQDAANKNPFSSASGGFGSTATSNTSNLFGNSGAKTFGGFASSSFGEQKPTGTFSSGGGSVASQGFGFSSPNKTGGFGAAPVFGSPPTFGGSPGFGGVPAFGSAPAFTSPLGSTGGKVFGEGTAAASAGGFGFGSSSNTTSFGTLASQNAPTFGSLSQQTSGFGTQSSGFSGFGSGTGGFSFGSNNSSVQGFGGWRS

SEQ ID NO: 9692 - protein, 495 aa, Homo sapiens
MKSSLLLRGVHFCFHLPGATPSTKESSQPDAFSSGGGSKPSYEAIPESSPPSGITSASNTTPGEPAASSSRPVAPSGTALSTTSSKLETPPSKLGELLFPSSLAGETLGSFSGLRVGQADDSTKPTNKASSTSLTSTQPTKTSGVPSGFNFTAPPVLGKHTEPPVTSSATTTSVAPPAATSTSSTAVFGSLPVTSAGSSGVISFGGTSLSAGKTSFSFGSQQTNSTVPPSAPPPTTAATPLPTSFPTLSFGSLLSSATTPSLPMSAGRSTEEATSSALPEKPGDSEVSASAASLLEEQQSAQLPQAPPQTSDSVKKEPVLAQPAVSNSGTAASSTSLVALSAEATPATTGVPDARTEAVPPASSFSVPGQTAVTAAAISSAGPVAVETSSTPIASSTTSIVAPGPSAEAAAFGTVTSGSSVFAQPPAASSSSAFNQLTNNTATAPSATPVFGQVAASTAPSLFGQQTGSTASTAAATPQVSSSGFSSPAFGTTAP

SEQ ID NO: 9693 - protein, 916 aa, Homo sapiens
MKSSLLLRGVHFCFHLPGTAKIETAVTSTPSASGQFSKPFSFSPSGTGFNFGIITPTPSSNFTAAQGATPSTKESSQPDAFSSGGGSKPSYEAIPESSPPSGITSASNTTPGEPAASSSRPVAPSGTALSTTSSKLETPPSKLGELLFPSSLAGETLGSFSGLRVGQADDSTKPTNKASSTSLTSTQPTKTSGVPSGFNFTAPPVLGKHTEPPVTSSATTTSVAPPAATSTSSTAVFGSLPVTSAGSSGVISFGGTSLSAGKTSFSFGSQQTNSTVPPSAPPPTTAATPLPTSFPTLSFGSLLSSATTPSLPMSAGRSTEEATSSALPEKPGDSEVSASAASLLEEQQSAQLPQAPPQTSDSVKKEPVLAQPAVSNSGTAASSTSLVALSAEATPATTGVPDARTEAVPPASSFSVPGQTAVTAAAISSAGPVAVETSSTPIASSTTSIVAPGPSAEAAAFGTVTSGSSVFAQPPAASSSSAFNQLTNNTATAPSATPVFGQVAASTAPSLFGQQTGSTASTAAATPQVSSSGFSSPAFGTTAPGVFGQTTFGQASVFGQSASSAASVFSFSQPGFSSVPAFGQPASSTPTSTSGSVFGAASSTSSSSSFSFGQSSPNTGGGLFGQSNAPAFGQSPGFGQGGSVFGGTSAATTTAATSGFSFCQASGFGSSNTGSVFGQAASTGGIVFGQQSSSSSGSVFGSGNTGRGGGFFSGLGGKPSQDAANKNPFSSASGGFGSTATSNTSNLFGNSGAKTFGGFASSSFGEQKPTGTFSSGGGSVASQGFGFSSPNKTGGFGAAPVFGSPPTFGGSPGFGGVPAFGSAPAFTSPLGSTGGKVFGEGTAAASAGGFGFGSSSNTTSFGTLASQNAPTFGSLSQQTSGFGTQSSGFSGFGSGTGGFSFGSNNSSVQGFGGWRS

SEQ ID NO: 9694 - protein, 187 aa, Homo sapiens
  SITE 1: note = misc_feature - Xaa can be any naturally occurring amino acid
XARQSDQINWESWLLEDSSRAELPVTDKSDDSLPMGVVVDYTNQVEITISDEKTLPPAPVLMLLSTDGVLCPFYMINQNPGVKSLIKTPERLSLEGERQPKSPASLAPTPAASPVAPSAASFSFGSSGFKPTLESTPVPSVSAPNIAMKPSFPPSTSAVKVNLSEKFTAAATSTPVSSSQSAPPMSP

SEQ ID NO: 9695 - protein, 145 aa, Homo sapiens
  SITE 1: note = misc_feature - Xaa can be any naturally occurring amino acid
XGVPAFGSAPAFTSPLGSTGGKVFGEGTAAASAGGFGFGSSSNTTSFGTLASQNAPTFGSLSQQTSGFGTQSSGFSGFGSGTGGLSRVLVAGEAEGVSAGLSIPGTNRILSFFPEKCWSRLFRPTLPSKHIHPERNNRNQNSQGA

SEQ ID NO: 9696 - protein, 967 aa, Homo sapiens
  SITE 1: note = misc_feature - Xaa can be any naturally occurring amino acid
XKTPHPVLTPVAANQAKQGSLINSLKPSGPTPASGQLSSGDKASGTAKIETAVTSTPSASGQFSKPFSFSPSGTGFNFGIITPTPSSNFTAAQGATPSTKESSQPDAFSSGGGSKPSYEAIPESSPPSGITSASNTTPGEPAASSSRPVAPSGTALSTTSSKLETPPSKLGELLFPSSLAGETLGSFSGLRVGQADDSTKPTNKASSTSLTSTQPTKTSGVPSGFNFTAPPVLGKHTEPPVTSSATTTSVAPPAATSTSSTAVFGSLPVTSAGSSGVISFGGTSLSAGKTSFSFGSQQTNSTVPPSAPPPTTAATPLPTSFPTLSFGSLLSSATTPSLPMSAGRSTEEATSSALPEKPGDSEVSASAASLLEEQQSAQLPQAPPQTSDSVKKEPVLAQPAVSNSGTAASSTSLVALSAEATPATTGVPDARTEAVPPASSFSVPGQTAVTAAAISSAGPVAVETSSTPIASSTTSIVAPGPSAEAAAFGTVTSGSSVFAQPPAASSSSAFNQLTNNTATAPSATPVFGQVAASTAPSLFGQQTGSTASTAAATPQVSSSGFSSPAFGTTAPGVFGQTTFGQASVFGQSASSAASVFSFSQPGFSSVPAFGQPASSTPTSTSGSVFGAASSTSSSSSFSFGQSSPNTGGGLFGQSNAPAFGQSPGFGQGGSVFGGTSAATTTAATSGFSFCQASGFGSSNTGSVFGQAASTGGIVFGQQSSSSSGSVFGSGNTGRGGGFFSGLGGKPSQDAANKNPFSSASGGFGSTATSNTSNLFGNSGAKTFGGFASSSFGEQKPTGTFSSGGGSVASQGFGFSSPNKTGGFGAAPVFGSPPTFGGSPGFGGVPAFGSAPAFTSPLGSTGGKVFGEGTAAASAGGFGSLAMSLSPTLKGRLLLMRPKAGGGREQAAPGRKSNESRSLGHLCMERALTSPLKVWEQQQHHILRHARESECPHFRITVPTDFWFWDPE

SEQ ID NO: 9697 - protein, 114 aa, Homo sapiens
AMMLSDRLTFLGKYREFHRMYGEKRFADAASLLLSLMTSRIAPRSFWMTLLTDALPLLEQKQVIFSAEQTYELMRCLEDLTSRRPVHGESDTEQLQYGPLVLLSFTSIICWKLL

SEQ ID NO: 9698 - protein, 191 aa, Homo sapiens
LDWVRLHVCEVDSLSADVLGSENPSKHDSFWNLGRLDEARQMLSKEADASPASAGICRIMGDLMRTMPILSPGNTQTLTELELKWQHWHEECERYLQDSTFATSPHLESLLKIMLGDEAALLEQKELLSNWYHFLVTRLLYSNPTVKPIDLHYYAQSSLDLFLGGESSPEPLDNILLAAFEFDIHQVIKEC

SEQ ID NO: 9699 - protein, 19 aa, Homo sapiens
LLAAFEFDIHQVIKECSFL

SEQ ID NO: 9700 - protein, 18 aa, Homo sapiens
LTDALPLLEQKQQNRLMS

SEQ ID NO: 9701 - protein, 611 aa, Homo sapiens
MEELDGEPTVTLIPGVNSKKNQMYFDWGPGEMLVCETSFNKKEKSEMVPSCPFIYIIRKDVDVYSQILRKLFNESHGIFLGLQRIDEELTGKSRKSQLVRVSKNYRSVIRACMEEMHQVAIAAKDPANGRQFSSQVSILSAMELIWNLCEILFIEVAPAGPLLLHLLDWVRLHVCEVDSLSADVLGSENPSKHDSFWNLPGNTQTLTELELKWQHWHEECERYLQDSTFATSPHLESLLKIMLGDEAALLEQKELLSNWYHFLVTRLLYSNPTVKPIDLHYYAQSSLDLFLGGESSPEPLDNILLAAFEFDIHQVIKECSIALSNWWFVAHLTDLLDHCKLLQSHNLYFGSNMREFLLLEYASGLFAHPSLWQLGVDYFDYCPELGRVSLELHIERIPLNTEQKALKVLRICEQRQMTEQVRSICKILAMKAVRNNRLGSALSWSIRAKDAAFATLVSDRFLRDYCERGCFSDLDLIDNLGPAMMLSDRLTFLGKYREFHRMYGEKRFADAASLLLSLMTSRIAPRSFWMTLLTDALPLLEQKQVIFSAEQTYELMRCLEDLTSRRPVHGESDTEQLQDDDIETTKVEMLRLSLARNLARAIIREGSLEGS

SEQ ID NO: 9702 - protein, 656 aa, Homo sapiens
MEELDGEPTVTLIPGVNSKKNQMYFDWGPGEMLVCETSFNKKEKSEMVPSCPFIYIIRKDVDVYSQILRKLFNESHGIFLGLQRIDEELTGKSRKSQLVRVSKNYRSVIRACMEEMHQVAIAAKDPANGRQFSSQVSILSAMELIWNLCEILFIEVAPAGPLLLHLLDWVRLHVCEVDSLSADVLGSENPSKHDSFWNLVTILVLQGRLDEARQMLSKEADASPASAGICRIMGDLMRTMPILSPGNTQTLTELELKWQHWHEECERYLQDSTFATSPHLESLLKIMLGDEAALLEQKELLSNWYHFLVTRLLYSNPTVKPIDLHYYAQSSLDLFLGGESSPEPLDNILLAAFEFDIHQVIKECSIALSNWWFVAHLTDLLDHCKLLQSHNLYFGSNMREFLLLEYASGLFAHPSLWQLGVDYFDYCPELGRVSLELHIERIPLNTEQKALKVLRICEQRQMTEQVRSICKILAMKAVRNNRLGSALSWSIRAKDAAFATLVSDRFLRDYCERGCFSDLDLIDNLGPAMMLSDRLTFLGKYREFHRMYGEKRFADAASLLLSLMTSRIAPRSFWMTLLTDALPLLEQKQVIFSAEQTYELMRCLEDLTSRRPVHGESDTEQLQDDDIETTKVEMLRLSLARNLARAIIREGSLEGS

SEQ ID NO: 9703 - protein, 169 aa, Homo sapiens
MEELDGEPTVTLIPGVNSKKNQMYFDWGPGEMLVCETSFNKKEKSEMVPSCPFIYIIRKDVDVYSQILRKLFNESHGIFLGLQRIDEELTGKSRKSQLVRVSKNYRSVIRACMEEMHQVAIAAKDPANGRQFSSQVSILSAMELIWNLCEILFIEVAPGDHLGAAGPAG

SEQ ID NO: 9704 - protein, 544 aa, Homo sapiens
MEEMHQVAIAAKDPANGRQFSSQVSILSAMELIWNLCEILFIEVAPAGPLLLHLLDWVRLHVCEVDSLSADVLGSENPSKHDSFWNLVTILVLQGRLDEARQMLSKEADASPASAGICRIMGDLMRTMPILSPGNTQTLTELELKWQHWHEECERYLQDSTFATSPHLESLLKIMLGDEAALLEQKELLSNWYHFLVTRLLYSNPTVKPIDLHYYAQSSLDLFLGGESSPEPLDNILLAAFEFDIHQVIKECSIALSNWWFVAHLTDLLDHCKLLQSHNLYFGSNMREFLLLEYASGLFAHPSLWQLGVDYFDYCPELGRVSLELHIERIPLNTEQKALKVLRICEQRQMTEQVRSICKILAMKAVRNNRLGSALSWSIRAKDAAFATLVSDRFLRDYCERGCFSDLDLIDNLGPAMMLSDRLTFLGKYREFHRMYGEKRFADAASLLLSLMTSRIAPRSFWMTLLTDALPLLEQKQVIFSAEQTYELMRCLEDLTSRRPVHGESDTEQLQDDDIETTKVEMLRLSLARNLARAIIREGSLEGS

SEQ ID NO: 9705 - protein, 259 aa, Homo sapiens
MREFLLLEYASGLFAHPSLWQLGVDYFDYCPELGRVSLELHIERIPLNTEQKALKVLRICEQRQMTEQVRSICKILAMKAVRNNRLGSALSWSIRAKDAAFATLVSDRFLRDYCERGCFSDLDLIDNLGPAMMLSDRLTFLGKYREFHRMYGEKRFADAASLLLSLMTSRIAPRSFWMTLLTDALPLLEQKQVIFSAEQTYELMRCLEDLTSRRPVHGESDTEQLQDDDIETTKVEMLRLSLARNLARAIIREGSLEGS

SEQ ID NO: 9706 - protein, 120 aa, Homo sapiens
MYFDWGPGEMLVCETSFNKKEKSEMVPSCPFIYIIRKDVDVYSQILRKLFNESHGIFLGLQRIDEELTGKSRKSQLVRVSKNYRSVIRACMEEMHQVAIAAKDPANGRQFSSQVSILSAM

SEQ ID NO: 9707 - protein, 272 aa, Homo sapiens
VTILVLQGRLDEARQMLSKEADASPASAGICRIMGDLMRTMPILSPGNTQTLTELELKWQHWHEECERYLQDSTFATSPHLESLLKIMLGDEAALLEQKELLSNWYHFLVTRLLYSNPTVKPIDLHYYAQSSLDLFLGGESSPEPLDNILLAAFEFDIHQVIKECSFGSNMREFLLLEYASGLFAHPSLWQLGVDYFDYCPELGRVSLELHIERIPLNTEQKALKVLRICEQRQMTEQVRSICKILAMKAVRNNRLGSALSWSIRAKDAAFA

SEQ ID NO: 9708 - protein, 46 aa, Homo sapiens
  SITE 1: note = misc_feature - Xaa can be any naturally occurring amino acid
XEKRFADAASLLLSLMTSRIAPRSFWMTLLTDALPLLEQKQNRLMS

SEQ ID NO: 9709 - protein, 302 aa, Homo sapiens
  SITE 1: note = misc_feature - Xaa can be any naturally occurring amino acid
XHEECERYLQDSTFATSPHLESLLKSSLDLFLGGESSPEPLDNILLAAFEFDIHQVIKECSIALSNWWFVAHLTDLLDHCKLLQSHNLYFGSNMREFLLLEYASGLFAHPSLWQLGVDYFDYCPELGRVSLELHIERIPLNTEQKALKVLRICEQRQMTEQVRSICKILAMKAVRNNRLGSALSWSIRAKDAAFATLVSDRFLRDYCERGCFSDLDLIDNLGPAMMLSDRLTFLGKYREFHRMYGEKRFADAASLLLSLMTSRIAPRSFWMTLLTDALPLLEQKQVIFSAEQTYELMRCLED

SEQ ID NO: 9710 - protein, 100 aa, Homo sapiens
  SITE 1: note = misc_feature - Xaa can be any naturally occurring amino acid
XLFIEVAPAGPLLLHLLDWVRLHVCEVDSLSADVLGSENPSKHDSFWNLIMLGDEAALLEQKELLSNWYHFLVTRLLYSNPTVKPIDLHYYAQPGPVSGR

SEQ ID NO: 9711 - protein, 98 aa, Homo sapiens
  SITE 1: note = misc_feature - Xaa can be any naturally occurring amino acid
XSLMTSRIAPRSFWMTLLTDALPLLEQKQVKVIFSAEQTYELMRCLEDLTSRRPVHGESDTEQLQDDDIETTKVEMLRLSLARNLARAIIREGSLEGS

SEQ ID NO: 9712 - protein, 89 aa, Homo sapiens
MPVNSSGPDWVTVIPRRIKETNSLELSQGSGTFPSGYYYKDQWRPRKFKMRQFNDPTTLQSAYKEKWCIYLVTQQSGNGLNTLLHLFQI

SEQ ID NO: 9713 - protein, 53 aa, Homo sapiens
MWTNFFKLRLFCCLLAVLMVVVLVINVTQVEYLDHETVSATFIDSSGQFVSSQ

SEQ ID NO: 9714 - protein, 559 aa, Homo sapiens
MWTNFFKLRLFCCLLAVLMVVVLVINVTQVEYLDHETVSATFIDSSGQFVSSQVTGISRNPYCGYDQQTLSSQERMEEDSLLAALHRQVPDVGPVPFVKSTDPSSSYFVILNSAAFFKVGSQLEVLVHVQDFQRKPKKYGGDYLQARIHSLKLQAGAVGRVVDYQNGFYKVFFTLLWPGKVKVSVSLVHPSEGIRVLQRLQEDKPDRVYFKSLFRSGRISETTECNVCLPGNLPLCNFTDLYTGEPWFCFKPKKLPCSSRITHFKGGYLKGLLTAAESAFFQSGVNIKMPVNSSGPDWVTVIPRRIKETNSLELSQGSGTFPSGYYYKDQWRPRKFKMRQFNDPDNITECLQRKVVHLFGDSTIRQWFEYLTTFVPDLVEFNLGSPKNVGPFLAVDQKHNILLKYRCHGPPIRFTTVFSNELHYVANELNGIVGGKNTVVAIAVWSHFSTFPLEVYIRRLRNIRRAVVRLLDRSPKTVVVIRTANAQELGPEVSLFNSDWYNFQLDTILRRMFSGVGVYLVDAWEMTLAHYLPHKLHPDEVIVKNQLDMFLSFVCPLET

SEQ ID NO: 9715 - protein, 559 aa, Homo sapiens; identical to SEQ ID NO: 9714

SEQ ID NO: 9716 - protein, 559 aa, Homo sapiens; identical to SEQ ID NO: 9714

SEQ ID NO: 9717 - protein, 260 aa, Homo sapiens
MEKFNTISVSKCNKETVAMKEKCKFGMTSTIPSGHVWRNTWNPVSCSLATVKMKECLRGKLIYLMGDSTIRQWMEYFKASINTLKSVDLHESGKLQHQLAVDLDRNINIQWQKYCYPLIGSMTYSVKEMEYLTRAIDRTGGEKNTVIVISLGQHFRPFPIDVFIRRALNVHKAIQHLLLRSPDTMVIIKTENIREMYNDAERFSDFHGYIQYLIIKDIFQDLSVSIIDAWDITIAYGTNNVHPPQHVVGNQINILLNYIC

SEQ ID NO: 9718 - protein, 544 aa, Homo sapiens
MKISMINYKSLLALLFILASWIIFTVFQNSTKVWSALNLSISLHYWNNSTKSLFPKTPLISLKPLTETELRIKEIIEKLDQQIPPRPFTHVNTTTSATHSTATILNPRDTYCRGDQLHILLEVRDHLGRRKQYGGDFLRARMSSPALMAGASGKVTDFNNGTYLVSFTLFWEGQVSLSLLLIHPSEGVSALWSARNQGYDRVIFTGQFVNGTSQVHSECGLILNTNAELCQYLDNRDQEGFYCVRPQHMPCAALTHMYSKNKKVSYLSKQEKSLFERSNVGVEIMEKFNTISVSKCNKETVAMKEKCKFGMTSTIPSGHVWRNTWNPVSCSLATVKMKECLRGKLIYLMGDSTIRQWMEYFKASINTLKSVDLHESGKLQHQLAVDLDRNINIQWQKYCYPLIGSMTYSVKEMEYLTRAIDRTGGEKNTVIVISLGQHFRPFPIDVFIRRALNVHKAIQHLLLRSPDTMVIIKTENIREMYNDAERFSDFHGYIQYLIIKDIFQDLSVSIIDAWDITIAYGTNNVHPPQHVVGNQINILLNYIC

SEQ ID NO: 9719 - protein, 139 aa, Homo sapiens
MQAACWYVLFLLQPTVYLVTCANLTNGGKSELLKSGSSKSTLKHIWTESSKDLSISRLLSQTFRGKENDTDLDLRYDTPEPYSEQDLWDWLRNSTDLQEPRPRAKRRPIVKTGKFKKMFGWGDFHSNIKTVKLNLLITG

SEQ ID NO: 9720 - protein, 143 aa, Homo sapiens
MQAACWYVLFLLQPTVYLVTCANLTNGGKSELLKSGSSKSTLKHIWTESSKDLSISRLLSQTFRGKENDTDLDLRYDTPEPYSEQDLWDWLRNSTDLQEPRPRAKRRPIVKTGKFKKMFGWGDFHSNIKTVKLNLLITGKIVD

SEQ ID NO: 9721 - protein, 271 aa, Homo sapiens
MQAACWYVLFLLQPTVYLVTCANLTNGGKSELLKSGSSKSTLKHIWTESSKDLSISRLLSQTFRGKENDTDLDLRYDTPEPYSEQDLWDWLRNSTDLQEPRPRAKRRPIVKTGKFKKMFGWGDFHSNIKTVKLNLLITGKIVDHGNGTFSVYFRHNSTGQGNVSVSLVPPTKIVEFDLAQQTVIDAKDSKSFNCRIEYEKVDKATKNTLCNYDPSKTCYQEQTQSHVSWLCSKPFKVICIYISFYSTDYKLVQKVCPDYNYHSDTPYFPSG

SEQ ID NO: 9722 - protein, 253 aa, Homo sapiens
VTCANLTNGGKSELLKSGSSKSTLKHIWTESSKDLSISRLLSQTFRGKENDTDLDLRYDTPEPYSEQDLWDWLRNSTDLQEPRPRAKRRPIVKTGKFKKMFGWGDFHSNIKTVKLNLLITGKIVDHGNGTFSVYFRHNSTGQGNVSVSLVPPTKIVEFDLAQQTVIDAKDSKSFNCRIEYEKVDKATKNTLCNYDPSKTCYQEQTQSHVSWLCSKPFKVICIYISFYSTDYKLVQKVCPDYNYHSDTPYFPSG

SEQ ID NO: 9723 - protein, 264 aa, Homo sapiens
MRLRPLPLVVVPGLLQLLFCDSKEVVHATEGLDWEDKDAPGTLVGNVVHSRIISPLRLFVKQSPVPKPGPMAYADSMENFWDWLANITEIQEPLARTKRRPIVKTGKFKKMFGWGDFHSNIKTVKLNLLITGKIVDHGNGTFSVYFRHNSTGLGNVSVSLVPPSKVVEFEVSPQSTLETKESKSFNCRIEYEKTDRAKKTALCNFDPSKICYQEQTQSHVSWLCSKPFKVICIYIAFYSVDYKLVQKVCPDYNYHSETPYLSSG

SEQ ID NO: 9724 - protein, 354 aa, Homo sapiens
MQLTRCCFVFLVQGSLYLVICGQDDGPPGSEDPERDDHEGQPRPRVPRKRGHISPKSRPMANSTLLGLLAPPGEAWGILGQPPNRPNHSPPPSAKVKKIFGWGDFYSNIKTVALNLLVTGKIVDHGNGTFSVHFQHNATGQGNISISLVPPSKAVEFHQEQQIFIEAKASKIFNCRMEWEKVERGRRTSLCTHDPAKICSRDHAQSSATWSCSQPFKVVCVYIAFYSTDYRLVQKGPSLLSGDVRHTPLLQTTLRSPPWRLETAGTGAAHQWTPTVCRSASHSAVETAGRRRKQWGQRPWAPSPPPLAELSAGTGGTLTPLLLLSSCGEPDAGDSWRARPSWHTVLPAPGMDSF

SEQ ID NO: 9725 - protein, 252 aa, Homo sapiens
MQLTRCCFVFLVQGSLYLVICGQDDGPPGSEDPERDDHEGQPRPRVPRKRGHISPKSRPMANSTLLGLLAPPGEAWGILGQPPNRPNHSPPPSAKVKKIFGWGDFYSNIKTVALNLLVTGKIVDHGNGTFSVHFQHNATGQGNISISLVPPSKAVEFHQEQQIFIEAKASKIFNCRMEWEKVERGRRTSLCTHDPAKICSRDHAQSSATWSCSQPFKVVCVYIAFYSTDYRLVQKVCPDYNYHSDTPYYPSG

SEQ ID NO: 9726 - protein, 308 aa, Homo sapiens
MRLLPEWFLLLFGPWLLRKAVSAQIPESGRPQYLGLRPAAAGAGAPGQQLPEPRSSDGLGVGRAWSWAWPTNHTGALARAGAAGALPAQRTKRKPSIKAARAKKIFGWGDFYFRVHTLKFSLLVTGKIVDHVNGTFSVYFRHNSSSLGNLSVSIVPPSKRVEFGGVWLPGPVPHPLQSTLALEGVLPGLGPPLGMAAAAAGPGLGGSLGGALAGPLGGALGVPGAKESRAFNCHVEYEKTNRARKHRPCLYDPSQVCFTEHTQSQAAWLCAKPFKVICIFVSFLSFDYKLVQKVCPDYNFQSEHPYFG

SEQ ID NO: 9727 - protein, 36 aa, Homo sapiens
MRLLPEWFLLLFGPWLLRKPRPGLSLPPARSWEHPA

SEQ ID NO: 9728 - protein, 481 aa, Homo sapiens
MKGRGMLVLLLHAVVLGLPSAWAVGACARACPAACACSTVERGCSVRCDRAGLLRVPAELPCEAVSIDLDRNGLRFLGERAFGTLPSLRRLSLRHNNLSFITPGAFKGLPRLAELRLAHNGDLRYLHARTFAALSRLRRLDLAACRLFSVPERLLAELPALRELAAFDNLFRRVPGALRGLANLTHAHLERGRIEAVASSSLQGLRRLRSLSLQANRVRAVHAGAFGDCGVLEHLLLNDNLLAELPADAFRGLRRLRTLNLGGNALDRVARAWFADLAELELLYLDRNSIAFVEEGAFQNLSGLLALHLNGNRLTVLAWVAFQPGFFLGRLFLFRNPWCCDCRLEWLRDWMEGSGRVTDVPCASPGSVAGLDLSQVTFGRSSDGLCVDPEELNLTTSSPGPSPEPAATTVSRFSSLLSKLLAPRVPVEEAANTTGGLANASLSDSLSSRGVGGAGRQPWFLLASCLLPSVAQHVVFGLQMD

SEQ ID NO: 9729 - protein, 481 aa, Homo sapiens; identical to SEQ ID NO: 9728

SEQ ID NO: 9730 - protein, 157 aa, Homo sapiens
MAKLRQKNPRAVRQAEEVRGLEHLHMDVAVNFSQGALLSPHLHNVCAEAVDAIYTRQEDVRFWLEQGVDSSVFEALPKASEQAELPRCRQVGDHGKPCVCRYGLSLAWYPCMLKYCHSRDRPTPYKCGIRSCQKSYSFDFYVPQRQLCLWDEDPYPG

SEQ ID NO: 9731 - protein, 273 aa, Homo sapiens
MRLPGVPLARPALLLLLPLLAPLLGTGAPAELRVRVRLPDGQVTEESLQADSDADSISLELRKPDGTLVSFTADFKKDVKVFRALILGELEKGQSQFQALCFVTQLQHNEIIPSEAMAKLRQKNPRAVRQAEEVRGLEHLHMDVAVNFSQGALLSPHLHNVCAEAVDAIYTRQEDVRFWLEQGVDSSVFEALPKASEQAELPRCRQVGDHGKPCVCRYGLSLAWYPCMLKYCHSRDRPTPYKCGIRSCQKSYSFDFYVPQRQLCLWDEDPYPG

SEQ ID NO: 9732 - protein, 85 aa, Homo sapiens
MKTLFLGVTLGLAAALSFTLEEEDEGGSVHPEENPDAEDGGAWQIQRLWGQEAHIPAGAARDGRLRLLLQRPAPWGPALHGKACG

SEQ ID NO: 9733 - protein, 147 aa, Homo sapiens
MKTLFLGVTLGLAAALSFTLEEEDEGGSVHPEENPDAEDGGAWQIQRLWGQEAHIPAGAARDGRLRLLLQRPAPWGPALHGKACGICSLQGRAAVPTLAHLATSPAGRNPNTNLEALEEFKKLVQHKGLSEEDIFMPLQTGSCVLEH

SEQ ID NO: 9734 - protein, 228 aa, Homo sapiens
MKTLFLGVTLGLAAALSFTLEEEDITGTWYVKAMVVDKDFPEDRRPRKVSPVKVTALGGGNLEATFTFMREDRCIQKKILMRKTEEPGKFSAYGGRKLIYLQELPGTDDYVFYCKDQRRGGLRYMGKLVASAPCRAVPLSPPWLTWPPHLQVGILIPTWRPWKNLRNWCSTRDSRRRTFSCPCRREAAFSNTRQPPGLHLQSPPYHQTQSPDHLDLPSSHDPSLLPPT

SEQ ID NO: 9735 - protein, 220 aa, Homo sapiens
MKTLFLGVTLGLAAALSFTLEEEDITGTWYVKAMVVDKDFPEDRRPRKVSPVKVTALGGGNLEATFTFMREDRCIQKKILMRKTEEPGKFSAYGGRKLIYLQELPGTDDYVFYCKDQRRGGLRYMGKLVASAPCRAVPLSPPWLTWPPHLQVGILIPTWRPWKNLRNWCSTRDSRRRTFSCPCRREAAFSNTRVTPGSAPPEPTLPPDTEPGPPGPTLQP

SEQ ID NO: 9736 - protein, 146 aa, Homo sapiens
MKTLFLGVTLGLAAALSFTLEEEDITGTWYVKAMVVDKDFPEDRRPRKVSPVKVTALGGGNLEATFTFMREDRCIQKKILMRKTEEPGKFSAYGGRKLIYLQELPGTDDYVFYCKDQRRGGLRYMGKLVGPCRCPHLGSPGHLTCR

SEQ ID NO: 9737 - protein, 170 aa, Homo sapiens
MKTLFLGVTLGLAAALSFTLEEEDITGTWYVKAMVVDKDFPEDRRPRKVSPVKVTALGGGNLEATFTFMREDRCIQKKILMRKTEEPGKFSAYGGRKLIYLQELPGTDDYVFYCKDQRRGGLRYMGKLVGRNPNTNLEALEEFKKLVQHKGLSEEDIFMPLQTGSCVLEH

SEQ ID NO: 9738 - protein, 170 aa, Homo sapiens; identical to SEQ ID NO: 9737

SEQ ID NO: 9739 - protein, 165 aa, Homo sapiens
MKTLFLGVTLGLAAALSFTLEEEDITGTWYVKAMVVDKDFPEDRRPRKVSPVKVTALGGGKLEATFTFMREDRCIQKKILMRKTEEPGKYSACLSAVEMDQITPALWEALAIDTLRKLRIGTRRPRIRWGQEAHVPAGAAQEGPLHLLLQRPAPWGPAPHGKACG

SEQ ID NO: 9740 - protein, 220 aa, Homo sapiens [sequence omitted]

SEQ ID NO: 9741 - protein, 170 aa, Homo sapiens
MKTLFLGVTLGLAAALSFTLEEEDITGTWYVKAMVVDKDFPEDRRPRKVSPVKVTALGGGKLEATFTFMREDRCIQKKILMRKTEEPGKYSAYGGRKLMYLQELPRRDHYIFYCKDQHHGGLLHMGKLVGRNSDTNREALEEFKKLVQRKGLSEEDIFTPLQTGSCVPEH

SEQ ID NO: 9742 - protein, 170 aa, Homo sapiens; identical to SEQ ID NO: 9741

SEQ ID NO: 9743 - protein, 477 aa, Homo sapiens
MIAFLLTSVLMIPHAGGHPLDTPHLPQELPPGLPNNINITFFSGMFKNVESVAEIFDCLGPHFTWLQAVFTNFPVLIQFVNGMKCVAGLCPRDFEDYGCTCRFEMEGLPVDESDSCCFQHRRCYEEAAEMDCLQDPAKLSTEVNCVSKKIICESKDNCEHLLCTCDKAAIECLARSSLNSSLNLLDTSFCLAQTPETTIKEDLTTLLPRVVPVEPTDTSLTALSGEEAGHDQEGVGAARATSPPGSAEIVATRVTAKIVTLVPAGIKSLGLAVSSVENDPEETTEKACDRFTFLHLGSGDNMQVMPQLGEMLFCLTSRCPEEFESYGCYCGQEGRGEPRDDLDRCCLSHHCCLEQVRRLGCLLERLPWSPVVCVDHTPKCGGQSLCEKLLCACDQTAAECMTSASFNQSLKSPSRLGCPGQPAACEDSLHPVPAAPTLGSSSEEDSEEDPPQEDLGRAKRFLRKSLGPLGIGPLHGR

SEQ ID NO: 9744 - protein, 271 aa, Homo sapiens
MIIVAFALIIFFAVKTRRKMDRYDKSNILWDKEHIYDEQPPNVEEWVKNVSAGTQDVPSPPSDYVERVDSPMAYSSNGKVNDKRFYPESSYKSTPVPEVVQELPLTSPVDDFRQPRYSSGGNFETPSKRAPAKGRAGRSKRTEQDHYETDYTTGGESCDELEEDWIREYPPITSDQQRQLYKRNFDTGLQEYKSLQSELDEINKELSRLDKELDDYREESEEYMAAADEYNRLKQVKGSADYKSKKNHCKQLKSKLSHIKKMVGDYDRQKT

SEQ ID NO: 9745 - protein, 522 aa, Homo sapiens
MSSRPLESPPPYRPDEFKPNHYAPSNDIYGGEMHVRPMLSQPAYSFYPEDEILHFYKWTSPPGVIRILSMLIIVMCIAIFACVASTLAWDRGYGTSLLGGSVGYPYGGSGFGSYGSGYGYGYGYGYGYGGYTDPRAAKGFMLAMAAFCFIAALVIFVTSVIRSEMSRTRRYYLSVIIVSAILGIMVFIATIVYIMGVNPTAQSSGSLYGSQIYALCNQFYTPAATGLYVDQYLYHYCVVDPQEAIAIVLGFMIIVAFALIIFFAVKTRRKMDRYDKSNILWDKEHIYDEQPPNVEEWVKNVSAGTQDVPSPPSDYVERVDSPMAYSSNGKVNDKRFYPESSYKSTPVPEVVQELPLTSPVDDFRQPRYSSGGNFETPSKRAPAKGRAGRSKRTEQDHYETDYTTGGESCDELEEDWIREYPPITSDQQRQLYKRNFDTGLQEYKSLQSELDEINKELSRLDKELDDYREESEEYMAAADEYNRLKQVKGSADYKSKKNHCKQLKSKLSHIKKMVGDYDRQKT

SEQ ID NO: 9746 - protein, 522 aa, Homo sapiens; identical to SEQ ID NO: 9745

SEQ ID NO: 9747 - protein, 216 aa, Homo sapiens
GPLNSWIPPFSGILQQQQQAQIPGLSQFSLSALDQFAGLLPNQIPLTGEASFAQGAQAGQVDPLQLQTPPQTQPGPSHVMPYVFSFKMPQEQGQMFQYYPVYMVLPWEQPQQTVPRSPQQTRQQQYEEQAISGGQQQLAFDPQLGTAPEIAVMSTGEEIPYLQKEAINFRHDSAGVFMPSTSPKPSTTNVFTSAVDQTITPELPEEKDKTDSLREP

SEQ ID NO: 9748 - protein, 279 aa, Homo sapiens
MKIIILLGFLGATLSAPLIPQRLMSASNSNELLLNLNNGQLLPLQLQGPLNSWIPPFSGILQQQQQAQIPGLSQFSLSALDQFAGLLPNQIPLTGEASFAQGAQAGQVDPLQLQTPPQTQPGPSHVMPYVFSFKMPQEQGQMFQYYPVYMVLPWEQPQQTVPRSPQQTRQQQYEEQIPFYAQFGYIPQLAEPAISGGQQQLAFDPQLGTAPEIAVMSTGEEIPYLQKEAINFRHDSAGVFMPSTSPKPSTTNVFTSAVDQTITPELPEEKDKTDSLREP

SEQ ID NO: 9749 - protein, 253 aa, Homo sapiens
MKIIILLGFLGATLSAPLLLNLNNGQLLPLQLQGPLNSWIPPFSGILQQQQQAQIPGLSQFSLSALDQFAGLLPNQIPLTGEASFAQGAQAGQVDPLQLQTPPQTQPGPSHVMPYVFSFKMPQEQGQMFQYYPVYMVLPWEQPQQTVPRSPQQTRQQQYEEQIPFYAQFGYIPQLAEPAISGGQQQLAFDPQLGTAPEIAVMSTGEEIPYLQKEAINFRHDSAGVFMPSTSPKPSTTNVFTSAVDQTITPELP

SEQ ID NO: 9750 - protein, 30 aa, Homo sapiens
QTPPQTQPGPSHVMPYVFSFKMPQEQGQNI

SEQ ID NO: 9751 - protein, 176 aa, Homo sapiens
MARRHCFSYWLLVCWLVVTVAEALSTFYLQQHINLHMDKKRYLRLLEIHKIMRTLPTARSLHSPLHLPRGVRSQGPSPSQRHPGVPSIFFHEGPESILGFQTDLSSLQGVTTVFHSSHFIGHTVTLLIGISPEEDSREEAHLRKAEREEKPKHTEAKKSLSFRKKQQKDFCFIFRN

SEQ ID NO: 9752 - protein, 130 aa, Homo sapiens
MARRHCFSYWLLVCWLVVTVAEGQEEVFTPPGDSQNNADATDCQIFTLTPPPAPRSPVTRAQPITKTPRCPFHFFPRRPRIHFRFPNRPFVPSRCNHRFPFQPFYWPHRYLTYRYFPRRRLQRGSSSEES

SEQ ID NO: 9753 - protein, 85 aa, Homo sapiens
MARRHCFSYWLLVCWLVVTVAEGQEEVFTPPGDSQNNADATDCQIFTLTPPPAPRSPVTRAQPITKTPRYFPRRRLQRGSSSEES

SEQ ID NO: 9754 - protein, 40 aa, Homo sapiens
MARRHCFSYWLLVCWLVVTVAEVETGFHHVSQDGLDLLTS

SEQ ID NO: 9755 - protein, 52 aa, Homo sapiens
MPARALLPRRMGHRTLASTPALWASIPCPRSELRLDLVLPSGQSFRWLTASA

SEQ ID NO: 9756 - protein, 357 aa, Homo sapiens
MPARALLPRRMGHRTLASTPALWASIPCPRSELRLDLVLPSGQSFRWREQSPAHWSGVLADQVWTLTQTEEQLHCTVYRGDKSQASRPTPDELEAVRKYFQLDVTLAQLYHHWGSVDSHFQEVAQKFQGVRLLRQDPIECLFSFICSSNNNIARITGMVERLCQAFGPRLIQLDDVTYHGFPSLQALAGPEVEAHLRKLGLGYRARYVSASARAILEEQGGLAWLQQLRESSYEEAHKALCILPGVGTKGLLGNAFDGHQLLRPLIFCQDHLREGPPIGRGDSQGEELEPQLPSSLSSIPYGFCDHCWTKDVDDPPLVTHPSPGSRDGHMTQAWPVKVVSPLATVIGHVMQASLLAL

SEQ ID NO: 9757 - protein, 424 aa, Homo sapiens
MPARALLPRRMGHRTLASTPALWASIPCPRSELRLDLVLPSGQSFRWREQSPAHWSGVLADQVWTLTQTEEQLHCTVYRGDKSQASRPTPDELEAVRKYFQLDVTLAQLYHHWGSVDSHFQEVAQKFQGVRLLRQDPIECLFSFICSSNNNIARITGMVERLCQAFGPRLIQLDDVTYHGFPSLQALAGPEVEAHLRKLGLGYRARYVSASARAILEEQGGLAWLQQLRESSYEEAHKALCILPGVGTKVADCICLMALDKPQAVPVDVHMWHIAQRDYSWHPTTSQAKGPSPQTNKELGNFFRSLWGPYAGWAQAGLLGNAFDGHQLLRPLIFCQDHLREGPPIGRGDSQGEELEPQLPSSLSSIPYGFCDHCWTKDVDDPPLVTHPSPGSRDGHMTQAWPVKVVSPLATVIGHVMQASLLAL

SEQ ID NO: 9758 - protein, 410 aa, Homo sapiens
MPARALLPRRMGHRTLASTPALWASIPCPRSELRLDLVLPSGQSFRWREQSPAHWSGVLADQVWTLTQTEEQLHCTVYRGDKSQASRPTPDELEAVRKYFQLDVTLAQLYHHWGSVDSHFQEVAQKFQGVRLLRQDPIECLFSFICSSNNNIARITGMVERLCQAFGPRLIQLDDVTYHGFPSLQALAGPEVEAHLRKLGLGYRARYVSASARAILEEQGGLAWLQQLRESSYEEAHKALCILPGVGTKVADCICLMALDKPQAVPVDVHMWHIAQRDYSWHPTTSQAKGPSPQTNKELGNFFRSLWGPYAGWAQATPPSYRCCSVPTCANPAMLRSHQQSAERVPKGRKARWGTLDKEIPQAPSPPFPTSLSPSPPSLMLGRGLPVTTSKARHPQIKQSVCTTRWGGGY

SEQ ID NO: 9759 - protein, 356 aa, Homo sapiens
MPARALLPRRMGHRTLASTPALWASIPCPRSELRLDLVLPSGQSFRWREQSPAHWSGVLADQVWTLTQTEEQLHCTVYRGDKSQASRPTPDELEAVRKYFQLDVTLAQLYHHWGSVDSHFQEVAQKFQGVRLLRQDPIECLFSFICSSNNNIARITGMVERLCQAFGPRLIQLDDVTYHGFPSLQALAGPEVEAHLRKLGLGYRARYVSASARAILEEQGGLAWLQQLRESSYEEAHKALCILPGVGTKVADCICLMALDKPQAVPVDVHMWHIAQRDYSWHPTTSQAKGPSPQTNKELGNFFRSLWGPYAGWAQALCQVITTFMTFLGPHRLDQMPPEELQTSSSRLGGPPWQCI

SEQ ID NO: 9760 - protein, 324 aa, Homo sapiens
MPARALLPRRMGHRTLASTPALWASIPCPRSELRLDLVLPSGQSFRWREQSPAHWSGVLADQVWTLTQTEEQLHCTVYRGDKSQASRPTPDELEAVRKYFQLDVTLAQLYHHWGSVDSHFQEVAQKFQGVRLLRQDPIECLFSFICSSNNNIARITGMVERLCQAFGPRLIQLDDVTYHGFPSLQALAGPEVEAHLRKLGLGYRARYVSASARAILEEQGGLAWLQQLRESSYEEAHKALCILPGVGTKVADCICLMALDKPQAVPVDVHMWHIAQRDYSWHPTTSQAKGPSPQTNKELGNFFRSLWGPYAGWAQAVSVPRCPP

SEQ ID NO: 9761 - protein, 345 aa, Homo sapiens
MPARALLPRRMGHRTLASTPALWASIPCPRSELRLDLVLPSGQSFRWREQSPAHWSGVLADQVWTLTQTEEQLHCTVYRGDKSQASRPTPDELEAVRKYFQLDVTLAQLYHHWGSVDSHFQEVAQKFQGVRLLRQDPIECLFSFICSSNNNIARITGMVERLCQAFGPRLIQLDDVTYHGFPSLQALAGPEVEAHLRKLGLGYRARYVSASARAILEEQGGLAWLQQLRESSYEEAHKALCILPGVGTKVADCICLMALDKPQAVPVDVHMWHIAQRDYSWHPTTSQAKGPSPQTNKELGNFFRSLWGPYAGWAQAVLFSADLRQSRHAQEPPAKRRKGSKGPEG

SEQ ID NO: 9762 - protein, 322 aa, Homo sapiens
MPARALLPRRMGHRTLASTPALWASIPCPRSELRLDLVLPSGQSFRWREQSPAHWSGVLADQVWTLTQTEEQLHCTVYRGDKSQASRPTPDELEAVRKYFQLDVTLAQLYHHWGSVDSHFQEVAQKFQGVRLLRQDPIECLFSFICSSNNNIARITGMVERLCQAFGPRLIQLDDVTYHGFPSLQALAGPEVEAHLRKLGLGYRARYVSASARAILEEQGGLAWLQQLRESSYEEAHKALCILPGVGTKVADCICLMALDKPQAVPVDVHMWHIAQRDYSWHPTTSQAKGPSPQTNKELGNFFRSLWGPYAGWAQAAGSDAS

SEQ ID NO: 9763 - protein, 195 aa, Homo sapiens
MPARALLPRRMGHRTLASTPALWASIPCPRSELRLDLVLPSGQSFRWREQSPAHWSGVLADQVWTLTQTEEQLHCTVYRGDKSQASRPTPDELEAVRKYFQLDVTLAQLYHHWGSVDSHFQEVAQKFQGVRLLRQDPIECLFSFICSSNNNIARITGMVERLCQAFGPRLIQLDDVTYHGFPSLQALAGPPWQCI

SEQ ID NO: 9764 - protein, 168 aa, Homo sapiens
  SITE 1: note = misc_feature - Xaa can be any naturally occurring amino acid
XASIPCPRSELRLDLVLPSGQSFRWREQSPAHWSGVLADQVWTLTQTEEQLHCTVYRGDKSQASRPTPDELEAVRKYFQLDVTLAQLYHHWGSVDSHFQEVAQKFQGVRLLRQDPIECLFSFICSSNNNIARITGMVERLCQAFGPRLIQLDDVTYHGFPSLQALAGG

SEQ ID NO: 9765 - protein, 128 aa, Homo sapiens
  SITE 1: note = misc_feature - Xaa can be any naturally occurring amino acid
XELEAVRKYFQLDVTLAQLYHHWGSVDSHFQEVAQKFQGVRLLRQDPIECLFSFICSSNNNIARITGMVERLCQAFGPRLIQLDDVTYHGFPSLQALAGVPVPAEGLLTSASAFQSPLRSRQPEADRR

SEQ ID NO: 9766 - protein, 132 aa, Homo sapiens
  SITE 1: note = misc_feature - Xaa can be any naturally occurring amino acid
XMMSPTMASPACRPWLVADCICLMALDKPQAVPVDVHMWHIAQRDYSWHPTTSQAKGPSPQTNKELGNFFRSLWGPYAGWAQATPPSYRCCSVPTCANPAMLRSHQQSAERVPKGRKARWGTLDKEIPQAPS

SEQ ID NO: 9767 - protein, 222 aa, Homo sapiens
  SITE 1: note = misc_feature - Xaa can be any naturally occurring amino acid
XPCGPPSRALALSCAWTWFCLLDNLSGVRLLRQDPIECLFSFICSSNNNIARITGMVERLCQAFGPRLIQLDDVTYHGFPSLQALAGPEVEAHLRKLGLGYRARYVSASARAILEEQGGLAWLQQLRESSYEEAHKALCILPGVGTKVADCICLMALDKPQAVPVDVHMWHIAQRDYSWHPTTSQAKGPSPQTNKELGNFFRSLWGPYAGWAQAVSVPRCPP

SEQ ID NO: 9768 - protein, 263 aa, Homo sapiens
  SITE 1: note = misc_feature - Xaa can be any naturally occurring amino acid
XVRKYFQLDVTLAQLYHHWGSVDSHFQEVAQKFQGVRLLRQDPIECLFSFICSSNNNIARITGMVERLCQAFGPRLIQLDDVTYHGFPSLQALAGPEVEAHLRKLGLGYRARYVSASARAILEEQGGLAWLQQLRESSYEEAHKALCILPGVGTKGLLGNAFDGHQLLRPLIFCQDHLREGPPIGRGDSQGEELEPQLPSSLSSIPYGFCDHCWTKDVDDPPLVTHPSPGSRDGHMTQAWPVKVVSPLATVIGHVMQASLLAL

SEQ ID NO: 9769 - protein, 298 aa, Homo sapiens
MKTLQSTLLLLLLVPLIKPAPPTQQDSRIIYDYGTDNFEESIFSQDYEDKYLDGKNIKEKETVIIPNEKSLQLQKDEAITPLPPKKENDEMPTCLLCVCLSGSVYCEEVDIDAVPPLPKESAYLYARFNKIKKLTAKDFADIPNLRRLDFTGNLIEDIEDGTFSKLSLLEELSLAENQLLKLPVLPPKLTLFNAKYNKIKSRGIKANAFKKLNNLTFLYLDHNALESVPLNLPESLRVIHLQFNNIASITDDTFCKANDTSYIRDRIEEIRLEGNPIVLGKHPNSFICLKRLPIGSYF

SEQ ID NO: 9770 - protein, 298 aa, Homo sapiens; identical to SEQ ID NO: 9769

SEQ ID NO: 9771 - protein, 268 aa, Homo sapiens
MLAKISTTWKLFLKLLGPEILLSSLKSRHSFSHSPSHLGLMHRHEHLLRKTTKNFKTATTTLQSTLLLLLLVPLIKPAPPTQQDSRIIYDYGTDNFEESIFSQDYEDKYLDGKNIKEKETVIIPNEKSLQLQKDEAITPLPPKKENDEMPTCLLCVCLSGSVYCEEVDIDAVPPLPKESAYLYARFNKIKKLTAKDFADIPNLRRLDFTGNLIEDIEDGTFSKLSLLEELSLAENQLLKLPVLPPKLTLFNAKYNKIKSRGIKANAFK

SEQ ID NO: 9772 - protein, 545 aa, Homo sapiens
MPPFLLLTCLFITGTSVSPVALDPCSAYISLNEPWRNTDHQLDESQGPPLCDNHVNGEWYHFTGMAGDAMPTFCIPENHCGTHAPVWLNGSHPLEGDGIVQRQACASFNGNCCLWNTTVEVKACPGGYYVYRLTKPSVCFHVYCGHFYDICDEDCHGSCSDTSECTCAPGTVLGPDRQTCFDENECEQNNGGCSEICVNLKNSYRCECGVGRVLRSDGKTCEDVEGCHNNNGGCSHSCLGSEKGYQCECPRGLVLSEDNHTCQVPVLCKSNAIEVNIPRELVGGLELFLTNTSCRGVSNGTHVNILFSLKTCGTVVDVVNDKIVASNLVTGLPKQTPGSSGDFIIRTSKLLIPVTCEFPRLYTISEGYVPNLRNSPLEIMSRNHGIFPFTLEIFKDNEFEEPYREALPTLKLRDSLYFGIEPVVHVSGLESLVESCFATPTSKIDEVLKYYLIRDGCVSDDSVKQYTSRDHLAKHFQVPVFKFVGKDHKEVFLHCRVLVCGVLDERSRCAQGCHRRMRRGAGGEDSAGLQGQTLTGGPIRIDWED

SEQ ID NO: 9773 - protein, 321 aa, Homo sapiens
MPPFLLLTCLFITGTSVSPVALDPCSAYISLNEPWRNTDHQLDESQGPPLCDNHVNGEWYHFTGMAGDAMPTFCIPENHCGTHAPVWLNGSHPLEGDGIVQRQACASFNGNCCLWNTTVEVKACPGGYYVYRLTKPSVCFHVYCGHFYDICDEDCHGSCSDTSECTCAPGTVLGPDRQTCFDENECEQNNGGCSEICVNLKNSYRCECGVGRVLRSDGKTCEDVEGCHNNNGGCSHSCLGSEKGYQCECPRGLVLSEDNHTCQVPVLCKSNAIEVNIPRELVGGLELFLTNTSCRGVSNGTHVNILFSLKTCGTVVDLCFR

SEQ ID NO: 9774 - protein, 129 aa, Homo sapiens
MCSRDARTKQLRQLLEKVQNMSQSIEVLDRRTQRDLQYVEKMENQMKGLESKFKQVEESHKQHLARQFKAIKAKMDELRPLIPVLEEYKADAKLVLQFKEEVQNLTSVLNELQEEIGAYDYDELQSRVS

SEQ ID NO: 9775 - protein, 163 aa, Homo sapiens
MEGPGGSGFHLRLEAFCKCKSPINVFDPVRPALQVGLTRVLPTNPEESWQVYSSAQDSEGRCICTVVAPQQTMCSRDARTKQLRQLLEKVQNMSQSIEVLDRRTQRDLQYVEKMENQMKGLESKFKQVEESHKQHLARQFKAIKAKMDELRPLIPVLEEYKAD

SEQ ID NO: 9776 - protein, 458 aa, Homo sapiens
MGEAPGREGRGPCPQLESPRRRRVLPTNPEESWQVYSSAQDSEGRCICTVVAPQQTMCSRDARTKQLRQLLEKVQNMSQSIEVLDRRTQRDLQYVEKMENQMKGLESKFKQVEESHKQHLARQFKAIKAKMDELRPLIPVLEEYKADAKLVLQFKEEVQNLTSVLNELQEEIGAYDYDELQSRVSNLEERLRACMQKLACGKLTGISDPVTVKTSGSRFGSWMTDPLAPEGDNRVWYMDGYHNNRFVREYKSMVDFMNTDNFTSHRLPHPWSGTGQVVYNGSIYFNKFQSHIIIRFDLKTETILKTRSLDYAGYNNMYHYAWGGHSDIDLMVDESGLWAVYATNQNAGNIVVSRLDPVSLQTLQTWNTSYPKRSAGEAFIICGTLYVTNGYSGGTKVHYAYQTNASTYEYIDIPFQNKYSHISMLDYNPKDRALYAWNNGHQILYNVTLFHVIRSDEL

SEQ ID NO: 9777 - protein, 129 aa, Homo sapiens
MPGRWRWQRDMHPARKLLSLLFLILMGTELTQDSAAPDSLLRSSKGSTRGSLAAIVIWRGKSESRIAKTPGIFRGGGTLVLPPTHTPEWLILPLGITLPLGAPETGGGDCAAETWKGSQRAGQLCALLA

SEQ ID NO: 9778 - protein, 167 aa, Homo sapiens
MPGRWRWQRDMHPARKLLSLLFLILMGTELTQNKRENKAEKMGGPESERKTTGEKTLNELPLFCLEAHAGSLALPRMCSPNPNPAVGLCRPAYPQSPSPGAAQTISQSLLERFCMASRRGFLGPRKAWWRVVVVHCCWTDAFIHVHTHTHTCTHRGADTCREEPTRS

SEQ ID NO: 9779 - protein, 467 aa, Homo sapiens
MPGRWRWQRDMHPARKLLSLLFLILMGTELTQVLPTNPEESWQVYSSAQDSEGRCICTVVAPQQTMCSRDARTKQLRQLLEKVQNMSQSIEVLDRRTQRDLQYVEKMENQMKGLESKFKQVEESHKQHLARQFKAIKAKMDELRPLIPVLEEYKADAKLVLQFKEEVQNLTSVLNELQEEIGAYDYDELQSRVSNLEERLRACMQKLACGKLTGISDPVTVKTSGSRFGSWMTDPLAPEGDNRVWYMDGYHNNRFVREYKSMVDFMNTDNFTSHRLPHPWSGTGQVVYNGSIYFNKFQSHIIIRFDLKTETILKTRSLDYAGYNNMYHYAWGGHSDIDLMVDESGLWAVYATNQNAGNIVVSRLDPVSLQTLQTWNTSYPKRSAGEAFIICGTLYVTNGYSGGTKVHYAYQTNASTYEYIDIPFQNKYSHISMLDYNPKDRALYAWNNGHQILYNVTLFHVIRSDEL

SEQ ID NO: 9780 - protein, 135 aa, Homo sapiens
MPGRWRWQRDMHPARKLLSLLFLILMGTELTQVLPTNPEESWQVYSSAQDSEGRCICTVVAPQQTMCSRDARTKQLRQLLEKVQNMSQSIEVLDRRTQRDLQYVEKMENQMKGLESKFKQVEESHKQHLARQFKG

SEQ ID NO: 9781 - protein, 208 aa, Homo sapiens
MSQSIEVLDRRTQRDLQYVEKMENQMKGLESKFKQVEESHKQHLARQFKAIKAKMDELRPLIPVLEEYKADAKLVLQFKEEVQNLTSVLNELQEEIGAYDYDELQSRVSNLEERLRACMQKLACGKLTGISDPVTVKTSGSRFGSWMTDPLAPEGDNRVWYMDGYHNNRFVREYKSMVDFMNTDNFTSHRLPHPWSGTGQVVYNGSIY

SEQ ID NO: 9782 - protein, 485 aa, Homo sapiens
MSVPLLKIGVVLSTMAMITNWMSQTLPSLVGLNTTKLSAAGGGTLDRSTGVLPTNPEESWQVYSSAQDSEGRCICTVVAPQQTMCSRDARTKQLRQLLEKVQNMSQSIEVLDRRTQRDLQYVEKMENQMKGLESKFKQVEESHKQHLARQFKAIKAKMDELRPLIPVLEEYKADAKLVLQFKEEVQNLTSVLNELQEEIGAYDYDELQSRVSNLEERLRACMQKLACGKLTGISDPVTVKTSGSRFGSWMTDPLAPEGDNRVWYMDGYHNNRFVREYKSMVDFMNTDNFTSHRLPHPWSGTGQVVYNGSIYFNKFQSHIIIRFDLKTETILKTRSLDYAGYNNMYHYAWGGHSDIDLMVDESGLWAVYATNQNAGNIVVSRLDPVSLQTLQTWNTSYPKRSAGEAFIICGTLYVTNGYSGGTKVHYAYQTNASTYEYIDIPFQNKYSHISMLDYNPKDRALYAWNNGHQILYNVTLFHVIRSDEL

SEQ ID NO: 9783 - protein, 153 aa, Homo sapiens
MSVPLLKIGVVLSTMAMITNWMSQTLPSLVGLNTTKLSAAGGGTLDRSTGVLPTNPEESWQVYSSAQDSEGRCICTVVAPQQTMCSRDARTKQLRQLLEKVQNMSQSIEVLDRRTQRDLQYVEKMENQMKGLESKFKQVEESHKQHLARQFKG

SEQ ID NO: 9784 - protein, 99 aa, Homo sapiens
  SITE 1: note = misc_feature - Xaa can be any naturally occurring amino acid
XSHKQHLARQFKAIKAKMDELRPLIPVLEEYKADAKLVLQFKEEVQNLTSVLNELQEEIGAYDYDELQSRVSNLEERLRACMQKLGVVHGRLSQQPLRT

SEQ ID NO: 9785 - protein, 78 aa, Homo sapiens
MEVLELRTYRDLQYVRGMETLMRSLDARLRAADGSLSAKSFQELKDRMTELLPLSSVLEQYKADTRTIVRLREEAVGS

SEQ ID NO: 9786 - protein, 376 aa, Homo sapiens
MEVLELRTYRDLQYVRGMETLMRSLDARLRAADGSLSAKSFQELKDRMTELLPLSSVLEQYKADTRTIVRLREEVRNLSGSLAAIQEEMGAYGYEDLQQRVMALEARLHACAQKLGCGKLTGVSNPITVRAMGSRFGSWMTDTMAPSADSRVWYMDGYYKGRRVLEFRTLGDFIKGQNFIQHLLPQPWAGTGHVVYNGSLFYNKYQSNVVVKYHFRSRSVLVQRSLPGAGYNNTFPYSWGGFSDMDFMVDESGLWAVYTTNQNAGNIVVSRLDPHTLEVMRSWDTGYPKRSAGEAFMICGVLYVTNSHLAGAKVYFAYFTNTSSYEYTDVPFHNQYSHISMLDYNPRERALYTWNNGHQVLYNVTLFHVISTSGDP

SEQ ID NO: 9787 - protein, 336 aa, Homo sapiens
MSVPLLKIGAVLSTMAMVTNWMSQTLPSLVGLNGTVSRAGASEKITLFQNPEEGWQLYTSAQAPDGKCICTAVIPAQSTCSRDGRSRELRQLMEKVQNVSQSMEVLELRTYRDLQYVRGMETLMRSLDARLRAADGSLSAKSFQELKDRMTELLPLSSVLEQYKADTRTIVRLREEVRNLSGSLAAIQEEMGAYGYEDLQQRVMALEARLHACAQKLGCGKLTGVSNPITVRAMGSRFGSWMTDTMAPSADSRVWYMDGYYKGRRVLEFRTLGDFIKGQNFIQHLLPQPWAGTGHVVYNGSLFYNKYQSNVVVKYHFRSRSVLVQRSLPGAGYNNT

SEQ ID NO: 9788 - protein, 454 aa, Homo sapiens
MWPLTVPPPLLLLLCSGLAGQTLFQNPEEGWQLYTSAQAPDGKCICTAVIPAQSTCSRDGRSRELRQLMEKVQNVSQSMEVLELRTYRDLQYVRGMETLMRSLDARLRAADGSLSAKSFQELKDRMTELLPLSSVLEQYKADTRTIVRLREEVRNLSGSLAAIQEEMGAYGYEDLQQRVMALEARLHACAQKLGCGKLTGVSNPITVRAMGSRFGSWMTDTMAPSADSRVWYMDGYYKGRRVLEFRTLGDFIKGQNFIQHLLPQPWAGTGHVVYNGSLFYNKYQSNVVVKYHFRSRSVLVQRSLPGAGYNNTFPYSWGGFSDMDFMVDESGLWAVYTTNQNAGNIVVSRLDPHTLEVMRSWDTGYPKRSAGEAFMICGVLYVTNSHLAGAKVYFAYFTNTSSYEYTDVPFHNQYSHISMLDYNPRERALYTWNNGHQVLYNVTLFHVISTSGDP

SEQ ID NO: 9789 - protein, 458 aa, Homo sapiens
MQATSNLLNLLLLSLFAGLDPSKTQISPKEGWQVYSSAQDPDGRCICTVVAPEQNLCSRDAKSRQLRQLLEKVQNMSQSIEVLNLRTQRDFQYVLKMETQMKGLKAKFRQIEDDRKTLMTKHFQELKEKMDELLPLIPVLEQYKTDAKLITQFKEEIRNLSAVLTGIQEEIGAYDYEELHQRVLSLETRLRDCMKKLTCGKLMKITGPVTVKTSGTRFGAWMTDPLASEKNNRVWYMDSYTNNKIVREYKSIADFVSGAESRTYNLPFKWAGTNHVVYNGSLYFNKYQSNIIIKYSFDMGRVLAQRSLEYAGFHNVYPYTWGGFSDIDLMADEIGLWAVYATNQNAGNIVISQLNQDTLEVMKSWSTGYPKRSAGESFMICGTLYVTNSHLTGAKVYYSYSTKTSTYEYTDIPFHNQYFHISMLDYNARDRALYAWNNGHQVLFNVTLFHIIKTEDDT

SEQ ID NO: 9790 - protein, 478 aa, Homo sapiens
MSPPLLKLGAVLSTMAMISNWMSQTLPSLVGLNTTRLSTPDTLTQISPKEGWQVYSSAQDPDGRCICTVVAPEQNLCSRDAKSRQLRQLLEKVQNMSQSIEVLNLRTQRDFQYVLKMETQMKGLKAKFRQIEDDRKTLMTKHFQELKEKMDELLPLIPVLEQYKTDAKLITQFKEEIRNLSAVLTGIQEEIGAYDYEELHQRVLSLETRLRDCMKKLTCGKLMKITGPVTVKTSGTRFGAWMTDPLASEKNNRVWYMDSYTNNKIVREYKSIADFVSGAESRTYNLPFKWAGTNHVVYNGSLYFNKYQSNIIIKYSFDMGRVLAQRSLEYAGFHNVYPYTWGGFSDIDLMADEIGLWAVYATNQNAGNIVISQLNQDTLEVMKSWSTGYPKRSAGESFMICGTLYVTNSHLTGAKVYYSYSTKTSTYEYTDIPFHNQYFHISMLDYNARDRALYAWNNGHQVLFNVTLFHIIKTEDDT

SEQ ID NO: 9791 - protein, 140 aa, Homo sapiens
MSQSIEVLNLRTQRDFQYVLKMETQMKGLKAKFRQIEDDRKTLMTKHFQELKEKMDELLPLIPVLEQYKTDAKLITQFKEEIRNLSAVLTGIQEEIGAYDYEELHQRVLSLETRLRDCMKKLIDLKKRKEEEKRQQKGEA

SEQ ID NO: 9792 - protein, 510 aa, Homo sapiens
MRPGLSFLLALLFFLGQAAGDLGDVGPPIPSPGFSSFPGVDSSSSFSSSSRSGSSSSRSLGSGGSVSQLFSNFTGSVDDRGTCQCSVSLPDTTFPVDRVERLEFTAHVLSQKFEKELSKVREYVQLISVYEKKLLNLTVRIDIMEKDTISYTELDFELIKVEVKEMEKLVIQLKESFGGSSEIVDQLEVEIRNMTLLVEKLETLDKNNVLAIRREIVALKTKLKECEASKDQNTPVVHPPPTPGSCGHGGVVNISKPSVVQLNWRGFSYLYGAWGRDYSPQHPNKGLYWVAPLNTDGRLLEYYRLYNTLDDLLLYINARELRITYGQGSGTAVYNNNMYVNMYNTGNIARVNLTTNTIAVTQTLPNAAYNNRFSYANVAWQDIDFAVDENGLWVIYSTEASTGNMVISKLNDTTLQVLNTWYTKQYKPSASNAFMVCGVLYATRTMNTRTEEIFYYYDTNTGKEGKLDIVMHKMQEKVQSINYNPFDQKLYVYNDGYLLNYDLSVLQKPQ

SEQ ID NO: 9793 - protein, 68 aa, Homo sapiens
MMVALRGASALLVLFLAAFLPPPQCTQDPAMVHYIYQRFRVLEGWKNVPKQRGHTFKNSKSSQKIYLS

SEQ ID NO: 9794 - protein, 402 aa, Homo sapiens
MMVALRGASALLVLFLAAFLPPPQCTQDPAMVHYIYQRFRVLEQGLEKCTQATRAYIQEFQEFSKNISVMLGRCQTYTSEYKSAVGNLALRVERAQREIDYIQYLREADECIESEDKTLAEMLLQEAEEEKKIRTLLNASCDNMLMGIKSLKIVKKMMDTHGSWMKDAVYNSPKVYLLIGSRNNTVWEFANIRAFMEDNTKPAPRKQILTLSWQGTGQVIYKGFLFFHNQATSNEIIKYNLQKRTVEDRMLLPGGVGRALVYQHSPSTYIDLAVDEHGLWAIHSGPGTHSHLVLTKIEPGTLGVEHSWDTPCRSQDAEASFLLCGVLYVVYSTGGQGPHRITCIYDPLGTISEEDLPNLFFPKRPRSHSMIHYNPRDKQLYAWNEGNQIIYKLQTKRKLPLK

SEQ ID NO: 9795 - protein, 402 aa, Homo sapiens; identical to SEQ ID NO: 9794

SEQ ID NO: 9796 - protein, 56 aa, Homo sapiens
MMVALRGASALLVLFLAAFLPPPQCTQDPAMVHYIYQRFRVLEQGLEKCTQAVTTC

SEQ ID NO: 9797 - protein, 652 aa, Homo sapiens
MAAAALPPRPLLLLPLVLLLSGRPTRADSKVFGDLDQVRMTSEGSDCRCKCIMRPLSKDACSRVRSGRARVEDFYTVETVSSGTDCRCSCTAPPSSLNPCENEWKMEKLKKQAPELLKLQSMVDLLEGTLYSMDLMKVHAYVHKVASQMNTLEESIKANLSRENEVVKDSVRHLSEQLRHYENHSAIMLGIKKELSRLGLQLLQKDAAAAPATPATGTGSKAQDTARGKGKDISKYGSVQKSFADRGLPKPPKEKLLQVEKLRKESGKGSFLQPTAKPRALAQQQAVIRGFTYYKAGKQEVTEAVADNTLQGTSWLEQLPPKVEGRSNSAEPNSAEQDEAEPRSSERVDLASGTPTSIPATTTTATTTPTPTTSLLPTEPPSGPEVSSQGREASCEGTLRAVDPPVRHHSYGRHEGAWMKDPAARDDRIYVTNYYYGNSLVEFRNLENFKQGRWSNMYKLPYNWIGTGHVVYQGAFYYNRAFTKNIIKYDLRQRFVASWALLPDVVYEDTTPWKWRGHSDIDFAVDESGLWVIYPAVDDRDEAQPEVIVLSRLDPGDLSVHRETTWKTRLRRNSYGNCFLVCGILYAVDTYNQQEGQVAYAFDTHTGTDARPQLPFLNEHAYTTQIDYNPKERVLYAWDNGHQLTYTLHFVV

SEQ ID NO: 9798 - protein, 318 aa, Homo sapiens
MAAAALPPRPLLLLPLVLLLSGRPTRADSKVFGDLDQVRMTSEGSDCRCKCIMRPLSKDACSRVRSGRARVEDFYTVETVSSGTDCRCSCTAPPSSLNPCENEWKMEKLKKQAPELLKSIKANLSRENEVVKDSVRHLSEQLRHYENHSAIMLGIKKELSRLGLQLLQKDAAAAPATPATGTGSKAQDTARGKGKDISKYGSVQKSFADRGLPKPPKEKLLQVEKLRKESGKGSFLQPTAKPRALAQQQAVIRGFTYYKAGKQEVTEAVADNTLQGTSWLEQLPPKVEGRSNSAEPNSAEQDEAEPRSSERVDLASGT

SEQ ID NO: 9799 - protein, 438 aa, Homo sapiens
MSKRDKAGKDTARGKGKDISKYGSVQKSFADRGLPKPPKEKLLQVEKLRKESGKGSFLQPTAKPRALAQQQAVIRGFTYYKAGKQEVTEAVADNTLQGTSWLEQLPPKVEGRSNSAEPNSAEQDEAEPRSSERVDLASGTPTSIPATTTTATTTPTPTTSLLPTEPPSGPEVSSQGREASCEGTLRAVDPPVRHHSYGRHEGAWMKDPAARDDRIYVTNYYYGNSLVEFRNLENFKQGRWSNMYKLPYNWIGTGHVVYQGAFYYNRAFTKNIIKYDLRQRFVASWALLPDVVYEDTTPWKWRGHSDIDFAVDESGLWVIYPAVDDRDEAQPEVIVLSRLDPGDLSVHRETTWKTRLRRNSYGNCFLVCGILYAVDTYNQQEGQVAYAFDTHTGTDARPQLPFLNEHAYTTQIDYNPKERVLYAWDNGHQLTYTLHFVV

SEQ ID NO: 9800 - protein, 90 aa, Homo sapiens
ETTWRTGLRRNFYGNCFVICGVLYAVDSYNQRNANISYAFDTHTNTQIVPRLLFENEYSYTTQIDYNPKDRLLYAWDNGHQVTYHVIFAY

SEQ ID NO: 9801 - protein, 751 aa, Homo sapiens
MAKPRLLVLYFALIVVPAWVSSIVLTGTSEPPDAQTVAPAEDETLQNEADNQENVLSQLLGDYDKVKAMSEGSDCQCKCVVRPLGRDACQRINAGASRKEDFYTVETITSGSSCKCACVAPPSALNPCEGDFRLQKLREADSQDLKLSTIIDMLEGAFYGLDLLKLHSVTTKLVGRVDKLEEEVSKNLTKENEQIKEDMEEIRTEMNKRGKENCSENILDSMPDIRSALQRDAAAAYAHPEQYEERFLQEETVSQQINSIELLQTRPLALPEVVKSQRPLQRQVHLRGRPASQPTVIRGITYYKAKVSEEENDIEEQQDEFFSGDNGVDLLIEDQLLRHNGLMTSVTRRPAATRQGHSTAVTSDLNARTAPWSSALPQPSTSDPSIANHASVGPTLQTTSVSPDPTRESVLQPSPQVPATTVAHTATQQPAAPAPPAVSPREALMEAMHTVPVPPTTVRTDSLGKDAPAGWGTTPASPTLSPEEEDDIRNVIGRCKDTLSTITGPTTQNTYGRNEGAWMKDPLAKDERIYVTNYYYGNTLVEFRNLENFKQGRWSNSYKLPYSWIGTGHVVYNGAFYYNRAFTRNIIKYDLKQRYVAAWAMLHDVAYEEATPWRWQGHSDVDFAVDENGLWLIYPALDDEGFSQEVIVLSKLNAADLSTQKETTWRTGLRRNFYGNCFVICGVLYAVDSYNQRNANISYAFDTHTNTQIVPRLLFENEYSYTTQIDYNPKDRLLYAWDNGHQVTYHVIFAY

SEQ ID NO: 9802 - protein, 750 aa, Homo sapiens
MAKPRLLVLYFALIVVPAWVSSIVLTGTSEPPDAQTVAPAEDETLQNEADNQENVLSQLLGDYDKVKAMSEGSDCQCKCVVRPLGRDACQRINAGASRKEDFYTVETITSGSSCKCACVAPPSALNPCEGDFRLQKLREADSQDLKLSTIIDMLEGAFYGLDLLKLHSVTTKLVGRVDKLEEEVSKNLTKENEQIKEDMEEIRTEMNKRGKENCSENILDSMPDIRSALQRDAAAAYAHPEYEERFLQEETVSQQINSIELLQTRPLALPEVVKSQRPLQRQVHLRGRPASQPTVIRGITYYKAKVSEEENDIEEQQDEFFSGDNGVDLLIEDQLLRHNGLMTSVTRRPAATRQGHSTAVTSDLNARTAPWSSALPQPSTSDPSIANHASVGPTLQTTSVSPDPTRESVLQPSPQVPATTVAHTATQQPAAPAPPAVSPREALMEAMHTVPVPPTTVRTDSLGKDAPAGWGTTPASPTLSPEEEDDIRNVIGRCKDTLSTITGPTTQNTYGRNEGAWMKDPLAKDERIYVTNYYYGNTLVEFRNLENFKQGRWSNSYKLPYSWIGTGHVVYNGAFYYNRAFTRNIIKYDLKQRYVAAWAMLHDVAYEEATPWRWQGHSDVDFAVDENGLWLIYPALDDEGFSQEVIVLSKLNAADLSTQKETTWRTGLRRNFYGNCFVICGVLYAVDSYNQRNANISYAFDTHTNTQIVPRLLFENEYSYTTQIDYNPKDRLLYAWDNGHQVTYHVIFAY

SEQ ID NO: 9803 - protein, 233 aa, Homo sapiens
MKDPLAKDERIYVTNYYYGNTLVEFRNLENFKQGRWSNSYKLPYSWIGTGHVVYNGAFYYNRAFTRNIIKYDLKQRYVAAWAMLHDVAYEEATPWRWQGHSDVDFAVDENGLWLIYPALDDEGFSQEVIVLSKLNAADLSTQKETTWRTGLRRNFYGNCFVICGVLYAVDSYNQRNANISYAFDTHTNTQIVPRLLFENEYSYTTQIDYNPKDRLLYAWDNGHQVTYHVIFAY

SEQ ID NO: 9804 - protein, 88 aa, Homo sapiens
TWRTGLRRNFYGNCFVICGVLYAVDSYNQRNANISYAFDTHTNTQIVPRLLFENEYSYTTQIDYNPKDRLLYAWDNGHQVTYHVIFAY

SEQ ID NO: 9805 - protein, 386 aa, Homo sapiens
MAQWHCSQRTQAGGHGVGERLAQCQDQSSRHAAELRDFKNKMLPLLEVAEKEREALRTEADTISGRVDRLEREVDYLETQNPALPCVEFDEKVTGGPGTKGKGRRNEKYDMVTDCGYTISQVRSMKILKRFGGPAGLWTKDPLGQTEKIYVLDGTQNDTAFVFPRLRDFTLAMAARKASRVRVPFPWVGTGQLVYGGFLYFARRPPGRPGGGGEMENTLQLIKFHLANRTVVDSSVFPAEGLIPPYGLTADTYIDLAADEEGLWAVYATREDDRHLCLAKLDPQTLDTEQQWDTPCPRENAEAAFVICGTLYVVYNTRPASRARIQCSFDASGTLTPERAALPYFPRRYGAHASLRYNPRERQLYAWDDGYQIVYKLEMRKKEEEV

SEQ ID NO: 9806 - protein, 406 aa, Homo sapiens
MGPSTPLLILFLLSWSGPLQGQQHHLVEYMERRLAALEERLAQCQDQSSRHAAELRDFKNKMLPLLEVAEKEREALRTEADTISGRVDRLEREVDYLETQNPALPCVEFDEKVTGGPGTKGKGRRNEKYDMVTDCGYTISQVRSMKILKRFGGPAGLWTKDPLGQTEKIYVLDGTQNDTAFVFPRLRDFTLAMAARKASRVRVPFPWVGTGQLVYGGFLYFARRPPGRPGGGGEMENTLQLIKFHLANRTVVDSSVFPAEGLIPPYGLTADTYIDLAADEEGLWAVYATREDDRHLCLAKLDPQTLDTEQQWDTPCPRENAEAAFVICGTLYVVYNTRPASRARIQCSFDASGTLTPERAALPYFPRRYGAHASLRYNPRERQLYAWDDGYQIVYKLEMRKKEEEV

SEQ ID NO: 9807 - protein, 345 aa, Homo sapiens
MLPLLEVAEKEREALRTEADTISGRVDRLEREVDYLETQNPALPCVEFDEKVTGGPGTKGKGRRNEKYDMVTDCGYTISQVRSMKILKRFGGPAGLWTKDPLGQTEKIYVLDGTQNDTAFVFPRLRDFTLAMAARKASRVRVPFPWVGTGQLVYGGFLYFARRPPGRPGGGGEMENTLQLIKFHLANRTVVDSSVFPAEGLIPPYGLTADTYIDLAADEEGLWAVYATREDDRHLCLAKLDPQTLDTEQQWDTPCPRENAEAAFVICGTLYVVYNTRPASRARIQCSFDASGTLTPERAALPYFPRRYGAHASLRYNPRERQLYAWDDGYQIVYKLEMRKKEEEV

SEQ ID NO: 9808 - protein, 421 aa, Homo sapiens
MGFLSPIYVIFFFFGVKVHCQYETYQWDEDYDQEPDDDYQTGFPFRQNVDYGVPFHQYTLGCVSECFCPTNFPSSMYCDNRKLKTIPNIPMHIQQLYLQFNEIEAVTANSFINATHLKEINLSHNKIKSQKIDYGVFAKLPNLLQLHLEHNNLEEFPFPLPKSLERLLLGYNEISKLQTNAMDGLVNLTMLDLCYNYLHDSLLKDKIFAKMEKLMQLNLCSNRLESMPPGLPSSLMYLSLENNSISSIPEKYFDKLPKLHTLRMSHNKLQDIPYNIFNLPNIVELSVGHNKLKQAFYIPRNLEHLYLQNNEIEKMNLTVMCPSIDPLHYHHLTYIRVDQNKLKEPISSYIFFCFPHIHTIYYGEQRSTNGQTIQLKTQVFRRFPDDDDESEDHDDPDNAHESPEQEGAEGHFDLHYYENQE

SEQ ID NO: 9809 - protein, 440 aa, Homo sapiens
MEYQILKMSLCLFILLFLTPGILCICPLQCICTERHRHVDCSGRNLSTLPSGLQENIIHLNLSYNHFTDLHNQLTQYTNLRTLDISNNRLESLPAHLPRSLWNMSAANNNIKLLDKSDTAYQWNLKYLDVSKNMLEKVVLIKNTLRSLEVLNLSSNKLWTVPTNMPSKLHIVDLSNNSLTQILPGTLINLTNLTHLYLHNNKFTFIPDQSFDQLFQLQEITLYNNRWSCDHKQNITYLLKWMMETKAHVIGTPCSTQISSLKEHNMYPTPSGFTSSLFTVSGMQTVDTINSLSVVTQPKVTKIPKQYRTKETTFGATLSKDTTFTSTDKAFVPYPEDTSTETINSHEAAAATLTIHLQDGMVTNTSLTSSTKSSPTPMTLSITSGMPNNFSEMPQQSTTLNLWREETTTNVKTPLPSVANAWKVNASFLLLLNVVVMLAV

SEQ ID NO: 9810 - protein, 158 aa, Homo sapiens
MALEVLMLLAVLIWTGAENLHVKISCSLDWLMVSVIPVAESRNLYIFADELHLGMGCPANRIHTYVYEFIYLVRDCGIRTRVVSEETLLFQTELYFTPRNIDHDPQEIHLECSTSRKSVWLTPVSTENEIKLDPSPFIADFQTTAEELGLLSSSPNLL

SEQ ID NO: 9811 - protein, 86 aa, Homo sapiens
MVSVIPVAESRNLYIFADELHLGMGCPANRIHTYVYEFIYLVRDCGIRTRVVSEETLLFQTELYFTPRNIDHDPQEIHLECSTSSV

SEQ ID NO: 9812 - protein, 304 aa, Homo sapiens
MDNVTVRQGESATLRCTIDDRVTRVAWLNRSTILYAGNDKWSIDPRVIILVNTPTQYSIMIQNVDVYDEGPYTCSVQTDNHPKTSRVHLIVQVPPQIMNISSDITVNEGSSVTLLCLAIGRPEPTVTWRHLSVKEGQGFVSEDEYLEISDIKRDQSGEYECSALNDVAAPDVRKVKITVNYPPYISKAKNTGVSVGQKGILSCEASAVPMAEFQWFKEETRLATGLDGMRIENKGRMSTLTFFNVSEKDYGNYTCVATNKLGNTNASITLYGPGAVIDGVNSASRALACLWLSGTLLAHFFIKF

SEQ ID NO: 9813 - protein, 345 aa, Homo sapiens
MGVCGYLFLPWKCLVVVSLRLLFLVPTGVPVRSGDATFPKAMDNVTVRQGESATLRCTIDDRVTRVAWLNRSTILYAGNDKWSIDPRVIILVNTPTQYSIMIQNVDVYDEGPYTCSVQTDNHPKTSRVHLIVQVPPQIMNISSDITVNEGSSVTLLCLAIGRPEPTVTWRHLSVKEGQGFVSEDEYLEISDIKRDQSGEYECSALNDVAAPDVRKVKITVNYPPYISKAKNTGVSVGQKGILSCEASAVPMAEFQWFKEETRLATGLDGMRIENKGRMSTLTFFNVSEKDYGNYTCVATNKLGNTNASITLYGPGAVIDGVNSASRALACLWLSGTLLAHFFIKF

SEQ ID NO: 9814 - protein, 354 aa, Homo sapiens
MGVCGYLFLPWKCLVVVSLRLLFLVPTGVPVRSGDATFPKAMDNVTVRQGESATLRCTIDDRVTRVAWLNRSTILYAGNDKWSIDPRVIILVNTPTQYSIMIQNVDVYDEGPYTCSVQTDNHPKTSRVHLIVQVPPQIMNISSDITVNEGSSVTLLCLAIGRPEPTVTWRHLSVKEGQGFVSEDEYLEISDIKRDQSGEYECSALNDVAAPDVRKVKITVNYPPYISKAKNTGVSVGQKGILSCEASAVPMAEFQWFKEETRLATGLDGMRIENKGRMSTLTFFNVSEKDYGNYTCVATNKLGNTNASITLYEISPSSAVAGPGAVIDGVNSASRALACLWLSGTLLAHFFIKF

SEQ ID NO: 9815 - protein, 345 aa, Homo sapiens; identical to SEQ ID NO: 9813

SEQ ID NO: 9816 - protein, 338 aa, Homo sapiens
MYHPAYWVVFSATTALLFIPGVPVRSGDATFPKAMDNVTVRQGESATLRCTIDDRVTRVAWLNRSTILYAGNDKWSIDPRVIILVNTPTQYSIMIQNVDVYDEGPYTCSVQTDNHPKTSRVHLIVQVPPQIMNISSDITVNEGSSVTLLCLAIGRPEPTVTWRHLSVKEGQGFVSEDEYLEISDIKRDQSGEYECSALNDVAAPDVRKVKITVNYPPYISKAKNTGVSVGQKGILSCEASAVPMAEFQWFKEETRLATGLDGMRIENKGRMSTLTFFNVSEKDYGNYTCVATNKLGNTNASITLYGPGAVIDGVNSASRALACLWLSGTLLAHFFIKF

SEQ ID NO: 9817 - protein, 248 aa, Homo sapiens
MKLTFFLGLLALISCFTPSESQRFSRRPYLPGQLPPPPLYRPRWVPPSPPPPYDSRLNSPLSLPFVPGRVPPSSFSRFSQAVILSQLFPLESIRQPRLFPGYPNLHFPLRPYYVGPIRILKPPFPPIPFFLAIYLPISNPEPQINITTADTTITTNPPTTATATTSTSTKPTMTISSSTVPISSTPEPATSISAATPAASTENTTQILANRPHTVLLNATVQVTTSNQTILSSPAFKSFWQKLFAIFG

SEQ ID NO: 9818 - protein, 174 aa, Homo sapiens
MRLLAFLSLLALVLQETGTASLPRKERKRREEQMPREGDSFEVLPLRNDVLNPDNYGEVIDLSNYEELTDYGDQLPEVKVTSLAPATSISPAKSTTAPGTPSSNPTMTRPTTAGLLLSSQPNHEDIPPLPRRTAYLYARFNRISRIRAEDFKGLTKLKRIDLSNNLISSIDNDA

SEQ ID NO: 9819 - protein, 332 aa, Homo sapiens
MRLLAFLSLLALVLQETGTASLPRKERKRREEQMPREGDSFEVLPLRNDVLNPDNYGEVIDLSNYEELTDYGDQLPEVKVTSLAPATSISPAKSTTAPGTPSSNPTMTRPTTAGLLLSSQPNHGLPTCLVCVCLGSSVYCDDIDLEDIPPLPRRTAYLYARFNRISRIRAEDFKGLTKLKRIDLSNNLISSIDNDAFRLLHALQDLILPENQLEALPVLPSGIEFLDVRLNRLQSSGIQPAAFRAMEKLQFLYLSDNLLDSIPGPLPLSLRSVHLQNNLIETMQRDVFCDPEEHKHTRRQLEDIRLDGNPINLSLFPSAYFCLPRLPIGRFT

SEQ ID NO: 9820 - protein, 301 aa, Homo sapiens
MHPEPAPPPSRSSPELPPSGGSTTSGSRRSRRRSGDGEPPGAPPPPPSAVTYPDWIGQSYSEVMSLNEHSMQALSWRKLYLSRAKLKASSRTSALLSGFAMVAMVEVQLDADHDYPPGLLIAFSACTTVLVAVHLFALMISTCILPNIEAVSNVHNLNSVKESPHERMHRHIELAWAFSTVIGTLLFLAEVVLLCWVKFLPLKKQPGQPRPTSKPPASGAAANVSTSGITPGQAAAIASTTIMVPFGLIFIVFAVHFYRSLVSHKTDRQFQELNELAEFARLQDQLDHRGDHPLTPGSHYA

SEQ ID NO: 9821 - protein, 201 aa, Homo sapiens
MALSWVLTVLSLLPLLEAQIPLCANLVPVPITNATLDRITGKWFYIASAFRNEEYNKSVQEIQATFFYFTPNKTEDTIFLREYQTRQDQCIYNTTYLNVQRENGTISRYVGGQEHFAHLLILRDTKTYMLAFDVNDEKNWGLSVYADKPETTKEQLGEFYEALDCLRIPKSDVVYTDWKKDKCEPLEKQHEKERKQEEGES

SEQ ID NO: 9822 - protein, 201 aa, Homo sapiens
MALSWVLTVLSLLPLLEAQIPLCANLVPVPITNATLDRITGKWFYIASAFRNEEYNKSVQEIQATFFYFTPNKTEDTIFLREYQTRQNQCFYNSSYLNVQRENGTVSRYEGGREHVAHLLFLRDTKTLMFGSYLDDEKNWGLSFYADKPETTKEQLGEFYEALDCLCIPRSDVMYTDWKKDKCEPLEKQHEKERKQEEGES

SEQ ID NO: 9823 - protein, 65 aa, Homo sapiens
MDYGLQFTSSRKFLSISPIVLYLLASFYTKYDAAHFLINTASLLSVLLPKLPQFHGVRVFGINKY

SEQ ID NO: 9824 - protein, 153 aa, Homo sapiens
MNVGVAHSEVNPNTRVMNSRGIWLAYIILVGLLHMVLLSIPFFSIPVVWTLTNVIHNLATYVFLHTVKGTPFETPDQGKARLLTHWEQMDYGLQFTSSRKFLSISPIVLYLLASFYTKYDAAHFLINTASLLSVLLPKLPQFHGVRVFGINKY

SEQ ID NO: 9825 - protein, 153 aa, Homo sapiens; identical to SEQ ID NO: 9824

SEQ ID NO: 9826 - protein, 119 aa, Homo sapiens
MVLLSIPFFSIPVVWTLTNVIHNLATYVFLHTVKGTPFETPDQGKARLLTHWEQMDYGLQFTSSRKFLSISPIVLYLLASFYTKYDAAHFLINTASLLSVLLPKLPQFHGVRVFGINKY

SEQ ID NO: 9827 - protein, 75 aa, Homo sapiens
MAAETLLSSLLGLLLLGLLLPASLTGGVGSLNLEELSEMRYGIEILPLPVMGGQPFFASLPPDPPFFPRANLRTW

SEQ ID NO: 9828 - protein, 75 aa, Homo sapiens; identical to SEQ ID NO: 9827

SEQ ID NO: 9829 - protein, 125 aa, Homo sapiens
MAAETLLSSLLGLLLLGLLLPASLTGGVGSLNLEELSEMRYGIEILPLPVMGGQSQSSDVVIVSSKYKQRYECRLPAGAIHFQREREEETPAYQGPGIPELLSPMRDAPCLLKGGMERPQVENRL

SEQ ID NO: 9830 - protein, 406 aa, Homo sapiens
MAAETLLSSLLGLLLLGLLLPASLTGGVGSLNLEELSEMRYGIEILPLPVMGGQSQSSDVVIVSSKYKQRYECRLPAGAIHFQREREEETPAYQGPGIPELLSPMRDAPCLLKTKDWWTYEFCYGRHIQQYHMEDSASGAPNDFQNNVQVKVIRSPADLIRFIEELKGGTKKGKPNIGQEQPVDDAAEVPQREPEKERGDPERQREMEEEEDEDEDEDEDEDERQLLGEFEKELEGILLPSDRDRLRSEVKAGMERELENIIQETEKELDPDGLKKESERDRAMLALTSTLNKLIKRLEEKQSPELVKKHKKKRVVPKKPPPSPQPTGKIEIKIVRPWAEGTEEGARWLTDEDTRNLKEIFFNILVPGAEEAQKERQRQKELESNYRRVWGSPGGEGTGDLDEFDF

SEQ ID NO: 9831 - protein, 560 aa, Homo sapiens
MAAETLLSSLLGLLLLGLLLPASLTGGVGSLNLEELSEMRYGIEILPLPVMGGQSQSSDVVIVSSKYKQRYECRLPAGAIHFQREREEETPAYQGPGIPELLSPMRDAPCLLKTKDWWTYEFCYGRHIQQYHMEDSEIKGEFLCDEGAGISGDYIDRVDEPLSCSYVLTIRTPRLCPHPLLRPPPSAAPQAILCHPSLQPEEYMAYVQRQADSKQYGDKIIEELQDLGPQVWSETKSGVAPQKMAGASPTKDDSKDSDFWKMLNEPEDQAPGGEEVPAEEQDPSPEAADSASGAPNDFQNNVQVKVIRSPADLIRFIEELKGGTKKGKPNIGQEQPVDDAAEVPQREPEKERGDPERQREMEEEEDEDEDEDEDEDERQLLGEFEKELEGILLPSDRDRLRSEVKAGMERELENIIQETEKELDPDGLKKESERDRAMLALTSTLNKLIKRLEEKQSPELVKKHKKKRVVPKKPPPSPQPTGKIEIKIVRPWAEGTEEGARWLTDEDTRNLKEIFFNILVPGAEEAQKERQRQKELESNYRRVWGSPGGEGTGDLDEFDF

SEQ ID NO: 9832 - protein, 613 aa, Homo sapiens
MAAETLLSSLLGLLLLGLLLPASLTGGVGSLNLEELSEMRYGIEILPLPVMGGQSQSSDVVIVSSKYKQRYECRLPAGAIHFQREREEETPAYQGPGIPELLSPMRDAPCLLKTKDWWTYEFCYGRHIQQYHMEDSEIKGEVLYLGYYQSAFDWDDETAKASKQHRLKRYHSQTYGNGSKCDLNGRPREAEVRFLCDEGAGISGDYIDRVDEPLSCSYVLTIRTPRLCPHPLLRPPPSAAPQAILCHPSLQPEEYMAYVQRQAVDSKQYGDKIIEELQDLGPQVWSETKSGVAPQKMAGASPTKDDSKDSDFWKMLNEPEDQAPGGEEVPAEEQDPSPEAADSASGAPNDFQNNVQVKVIRSPADLIRFIEELKGGTKKGKPNIGQEQPVDDAAEVPQREPEKERGDPERQREMEEEEDEDEDEDEDEDERQLLGEFEKELEGILLPSDRDRLRSEVKAGMERELENIIQETEKELDPDGLKKESERDRAMLALTSTLNKLIKRLEEKQSPELVKKHKKKRVVPKKPPPSPQPTGKIEIKIVRPWAEGTEEGARWLTDEDTRNLKEIFFNILVPGAEEAQKERQRQKELESNYRRVWGSPGGEGTGDLDEFDF

SEQ ID NO: 9833 - protein, 667 aa, Homo sapiens
MAAETLLSSLLGLLLLGLLLPASLTGGVGSLNLEELSEMRYGIEILPLPVMGGQSQSSDVVIVSSKYKQRYECRLPAGAIHFQREREEETPAYQGPGIPELLSPMRDAPCLLKTKDWWTYEFCYGRHIQQYHMEDSEIKGEVLYLGYYQSAFDWDDETAKASKQHRLKRYHSQTYGNGSKCDLNGRPREAEVRFLCDEGAGISGDYIDRVDEPLSCSYVLTIRTPRLCPHPLLRPPPSAAPQAILCHPSLQPEEYMAYVQRQADSKQYGDKIIEELQDLGPQVWSETKSGVAPQKMAGASPTKDDSKDSDFWKMLNEPEDQAPGGEEVPAEEQDPSPEAADSASGAPNDFQNNVQVKVIRSPADLIRFIEELKGGTKKGKPNIGQEQPVDDAAEVPQREPEKERGDPERQREMEEEEDEDEDEDEDEDERQLLGEFEKELEGILLPSDRDRLRSEVKAGMERELENIIQETEKELDPDGLKKESERDRAMLALTSTLNKLIKRLEEKQSPELVKKHKKKRVVPKKPPPSPQPTEEDPEHRVRVRVTKLRLGGPNQDLTVLEMKRENPQLKQIEGLVKELLEREGLTAAGKIEIKIVRPWAEGTEEGARWLTDEDTRNLKEIFFNILVPGAEEAQKERQRQKELESNYRRVWGSPGGEGTGDLDEFDF

SEQ ID NO: 9834 - protein, 597 aa, Homo sapiens
MAAETLLSSLLGLLLLGLLLPASLTGGVGSLNLEELSEMRYGIEILPLPVMGGQSQSSDVVIVSSKYKQRYECRLPAGAIHFQREREEETPAYQGPGIPELLSPMRDAPCLLKTKDWWTYEFCYGRHIQQYHMEDSEIKGEVLYLGYYQSAFDWDDETAKASKQHRLKRYHSQTYGNGSKCDLNGRPREAEVRFLCDEGAGISGDYIDRVDEPLSCSYVLTIRTPRLCPHPLLRPPPSAAPQAILCHPSLQPEEYMAYVQRQADSKQYGDKIIEELQDLGPQVWSETKSGVAPQKMAGASPTKDDSKDSDFWKMLNEPEDQAPGGEEVPAEEQDPSPEAADSASGAPNDFQNNVQVKVIRSPADLIRFIEELKGGTKKGKPNIGQEQPVDDAAEVPQREPEKERGDPERQREMEEEEDEDEDEDEDEDERQLLGEFEKELEGILLPSDRDRLRSETEKELDPDGLKKESERDRAMLALTSTLNKLIKRLEEKQSPELVKKHKKKRVVPKKPPPSPQPTGKIEIKIVRPWAEGTEEGARWLTDEDTRNLKEIFFNILVPGAEEAQKERQRQKELESNYRRVWGSPGGEGTGDLDEFDF

SEQ ID NO: 9835 - protein, 652 aa, Homo sapiens
MAAETLLSSLLGLLLLGLLLPASLTGGVGSLNLEELSEMRYGIEILPLPVMGGQSQSSDVVIVSSKYKQRYECRLPAGAIHFQREREEETPAYQGPGIPELLSPMRDAPCLLKTKDWWTYEFCYGRHIQQYHMEDSEIKGEVLYLGYYQSAFDWDDETAKASKQHRLKRYHSQTYGNGSKCDLNGRPREAEVRFLCDEGAGISGDYIDRVDEPLSCSYVLTIRTPRLCPHPLLRPPPSAAPQAILCHPSLQPEEYMAYVQRQADSKQYGDKIIEELQDLGPQVWSETKSGVAPQKMAGASPTKDDSKDSDFWKMLNEPEDQAPGGEEVPAEEQDPSPEAADSASGAPNDFQNNVQVKVIRSPADLIRFIEELKGGTKKGKPNIGQEQPVDDAAEVPQREPEKERGDPERQREMEEEEDEDEDEDEDEDERQLLGEFEKELEGILLPSDRDRLRSETEKELDPDGLKKESERDRAMLALTSTLNKLIKRLEEKQSPELVKKHKKKRVVPKKPPPSPQPTEEDPEHRVRVRVTKLRLGGPNQDLTVLEMKRENPQLKQIEGLVKELLEREGLTAAGKIEIKIVRPWAEGTEEGARWLTDEDTRNLKEIFFNILVPGAEEAQKERQRQKELESNYRRVWGSPGGEGTGDLDEFDF

SEQ ID NO: 9836 - protein, 612 aa, Homo sapiens
MAAETLLSSLLGLLLLGLLLPASLTGGVGSLNLEELSEMRYGIEILPLPVMGGQSQSSDVVIVSSKYKQRYECRLPAGAIHFQREREEETPAYQGPGIPELLSPMRDAPCLLKTKDWWTYEFCYGRHIQQYHMEDSEIKGEVLYLGYYQSAFDWDDETAKASKQHRLKRYHSQTYGNGSKCDLNGRPREAEVRFLCDEGAGISGDYIDRVDEPLSCSYVLTIRTPRLCPHPLLRPPPSAAPQAILCHPSLQPEEYMAYVQRQADSKQYGDKIIEELQDLGPQVWSETKSGVAPQKMAGASPTKDDSKDSDFWKMLNEPEDQAPGGEEVPAEEQDPSPEAADSASGAPNDFQNNVQVKVIRSPADLIRFIEELKGGTKKGKPNIGQEQPVDDAAEVPQREPEKERGDPERQREMEEEEDEDEDEDEDEDERQLLGEFEKELEGILLPSDRDRLRSEVKAGMERELENIIQETEKELDPDGLKKESERDRAMLALTSTLNKLIKRLEEKQSPELVKKHKKKRVVPKKPPPSPQPTGKIEIKIVRPWAEGTEEGARWLTDEDTRNLKEIFFNILVPGAEEAQKERQRQKELESNYRRVWGSPGGEGTGDLDEFDF

SEQ ID NO: 9837 - protein, 580 aa, Homo sapiens
MAAETLLSSLLGLLLLGLLLPASLTGGVGSLNLEELSEMRYGIEILPLPVMGGQSQSSDVVIVSSKYKQRYECRLPAGAIHFQREREEETPAYQGPGIPELLSPMRDAPCLLKTKDWWTYEFCYGRHIQQYHMEDSEIKGEVLYLGYYQSAFDWDDETAKFLCDEGAGISGDYIDRVDEPLSCSYVLTIRTPRLCPHPLLRPPPSAAPQAILCHPSLQPEEYMAYVQRQAVDSKQYGDKIIEELQDLGPQVWSETKSGVAPQKMAGASPTKDDSKDSDFWKMLNEPEDQAPGGEEVPAEEQDPSPEAADSASGAPNDFQNNVQVKVIRSPADLIRFIEELKGGTKKGKPNIGQEQPVDDAAEVPQREPEKERGDPERQREMEEEEDEDEDEDEDEDERQLLGEFEKELEGILLPSDRDRLRSEVKAGMERELENIIQETEKELDPDGLKKESERDRAMLALTSTLNKLIKRLEEKQSPELVKKHKKKRVVPKKPPPSPQPTGKIEIKIVRPWAEGTEEGARWLTDEDTRNLKEIFFNILVPGAEEAQKERQRQKELESNYRRVWGSPGGEGTGDLDEFDF

SEQ ID NO: 9838 - protein, 146 aa, Homo sapiens
MAAETLLSSLLGLLLLGLLLPASLTGGVGSLNLEELSEMRYGIEILPLPVMGGQSQSSDVVIVSSKYKQRYECRLPAGAIHFQREREEETPAYQGPGIPELLSPMRDAPCLLKTKDWWTYEFCYGRHIQQYHMEDSEIKGLQAASS

SEQ ID NO: 9839 - protein, 186 aa, Homo sapiens
MAAETLLSSLLGLLLLGLLLPASLTGGVGSLNLEELSEMRYGIEILPLPVMGGQSQSSDVVIVSSKYKQRYECRLPAGAIHFQREREEETPAYQGPGIPELLSPMRDAPCLLKTKDWWTYEFCYGRHIQQYHMEGILLPSDRDRLRSEVKAGMERELENIIQETEKELDPDGLKKESERDRAMLAL

SEQ ID NO: 9840 - protein, 162 aa, Homo sapiens
MAAETLLSSLLGLLLLGLLLPASLTGGVGSLNLEELSEMRYGIEILPLPVMGGQSQSSDVVIVSSKYKQRYECRLPAGAIHFQREREEETPAYQGPGIPELLSPMRDAPCLLKTYGNGSKCDLNGRPREAEVRFLCDEGAGISGDYIDRVDEPLSCSYVLTI

SEQ ID NO: 9841 - protein, 538 aa, Homo sapiens
MAAETLLSSLLGLLLLGLLLPASLTGGVGSLNLEELSEMRYGIEILPLPVMGGQTKDWWTYEFCYGRHIQQYHMEDSEIKGEVLYLGYYQSAFDWDDETAKASKQHRLKRYHSQTYGNGSKCDLNGRPREAEVRFLCDEGAGISGDYIDRVDEPLSCSYVLTIRTPRLCPHPLLRPPPSAAPQAILCHPSLQPEEYMAYVQRQADSKQYGDKIIEELQDLGPQVWSETKSGVAPQKMAGASPTKDDSKDSDFWKMLNEPEDQAPGGEEVPAEEQDPSPEAADSASGAPNDFQNNVQVKVIRSPADLIRFIEELKGGTKKGKPNIGQEQPVDDAAEVPQREPEKERGDPERQREMEEEEDEDEDEDEDEDERQLLGEFEKELEGILLPSDRDRLRSETEKELDPDGLKKESERDRAMLALTSTLNKLIKRLEEKQSPELVKKHKKKRVVPKKPPPSPQPTGKIEIKIVRPWAEGTEEGARWLTDEDTRNLKEIFFNILVPGAEEAQKERQRQKELESNYRRVWGSPGGEGTGDLDEFDF

SEQ ID NO: 9842 - protein, 252 aa, Homo sapiens
MALVLILQLLTLFPPASYHPKPWLGAQPATVVTPGVNVTLRCRAPQPAWRFGLFKPGEIAPLLFRDVSSELAEFFLEEVTPAQGGSYRCCYRRPDWGPGVWSQPSDVLELLVTEELPRPSLVALPGPVVGPGANVSLRCAGRLRNMSFVLYREGVAAPLQYRHSAQPWADFTLLGARAPGTYSCYYHTPSAPYVLSQRSEVLVISWEDSGSSDYTRGNLVRLGLAGLVLISLGALVTFDWRSQNRAPAGIRP

SEQ ID NO: 9843 - protein, 271 aa, Homo sapiens
MALVLILQLLTLFPPASYHPKPWLGAQPATVVTPGVNVTLRCRAPQPAWRFGLFKPGEIAPLLFRDVSSELAEFFLEEVTPAQGGSYRCCYRRPDWGPGVWSQPSDVLELLVTEELPRPSLVALPGPVVGPGANVSLRCAGRLRNMSFVLYREGVAAPLQYRHSAQPWADFTLLGARAPGTYSCYYHTPSAPYVLSQRSEVLVISWEGEGPEARPASSAPGMQAPGPPPSDPGAQAPSLSSFRPRGLVLQPLLPQTQDSWDPAPPPSDPGV

SEQ ID NO: 9844 - protein, 271 aa, Homo sapiens; identical to SEQ ID NO: 9843

SEQ ID NO: 9845 - protein, 268 aa, Homo sapiens [sequence omitted]

SEQ ID NO: 9846 - protein, 161 aa, Homo sapiens
MALVLILQLLTLWPLCHTDITPSAGRILSGGGDSSPRGKLPLLLPKARLGAGCLVPAQRCPGAAGDRGAAAAVAGGAARAGGGSWRQREPALRGPPAEHELRAVPRGRGGPAAVPPLRAALGRLHAAGRPRPRHLQLLLSHALRALRAVAAQRGAGHQLGR

SEQ ID NO: 9847 - protein, 267 aa, Homo sapiens
MALVLILQLLTLWPLCHTDITPSVAIIVPPASYHPKPWLGAQPATVVTPGVNVTLRCRAPQPAWRFGLFKPGEIAPLLFRDVSSELAEFFLEEVTPAQGGSYRCCYRRPDWGPGVWSQPSDVLELLVTEELPRPSLVALPGPVVGPGANVSLRCAGRLRNMSFVLYREGVAAPLQYRHSAQPWADFTLLGARAPGTYSCYYHTPSAPYVLSQRSEVLVISWEDSGSSDYTRGNLVRLGLAGLVLISLGALVTFDWRSQNRAPAGIRP

SEQ ID NO: 9848 - protein, 267 aa, Homo sapiens; identical to SEQ ID NO: 9847

SEQ ID NO: 9849 - protein, 286 aa, Homo sapiens
MALVLILQLLTLWPLCHTDITPSVAIIVPPASYHPKPWLGAQPATVVTPGVNVTLRCRAPQPAWRFGLFKPGEIAPLLFRDVSSELAEFFLEEVTPAQGGSYRCCYRRPDWGPGVWSQPSDVLELLVTEELPRPSLVALPGPVVGPGANVSLRCAGRLRNMSFVLYREGVAAPLQYRHSAQPWADFTLLGARAPGTYSCYYHTPSAPYVLSQRSEVLVISWEGEGPEARPASSAPGMQAPGPPPSDPGAQAPSLSSFRPRGLVLQPLLPQTQDSWDPAPPPSDPGV

SEQ ID NO: 9850 - protein, 286 aa, Homo sapiens; identical to SEQ ID NO: 9849

SEQ ID NO: 9851 - protein, 263 aa, Homo sapiens
MALVLILQLLTLWPLCHTDITPSVPPASYHPKPWLGAQPATVVTPGVNVTLRCRAPQPAWRFGLFKPGEIAPLLFRDVSSELAEFFLEEVTPAQGGSYRCCYRRPDWGPGVWSQPSDVLELLVTEELPRPSLVALPGPVVGPGANVSLRCAGRLRNMSFVLYREGVAAPLQYRHSAQPWADFTLLGARAPGTYSCYYHTPSAPYVLSQRSEVLVISWEDSGSSDYTRGNLVRLGLAGLVLISLGALVTFDWRSQNRAPAGIRP

SEQ ID NO: 9852 - protein, 282 aa, Homo sapiens
MALVLILQLLTLWPLCHTDITPSVPPASYHPKPWLGAQPATVVTPGVNVTLRCRAPQPAWRFGLFKPGEIAPLLFRDVSSELAEFFLEEVTPAQGGSYRCCYRRPDWGPGVWSQPSDVLELLVTEELPRPSLVALPGPVVGPGANVSLRCAGRLRNMSFVLYREGVAAPLQYRHSAQPWADFTLLGARAPGTYSCYYHTPSAPYVLSQRSEVLVISWEGEGPEARPASSAPGMQAPGPPPSDPGAQAPSLSSFRPRGLVLQPLLPQTQDSWDPAPPPSDPGV

SEQ ID NO: 9853 - protein, 231 aa, Homo sapiens
MASMAAIGSCSKEYRVLLGQLQKQTDLMQDTSRLLDPYIRIQGLDVPKLREHCRERPGAFPSEETLRGLGRRGFLQTLNATLGCVLHRLADLEQRLPKAQDLERSGLNIEDLEKLQMARPNILGLRNNIYCMAQLLDNSDTAEPTKAGRGASQPPTPTPASDAFQRKLEGCRFLHGYHRFMHSVGRVFSKWGESPNRSRRHSPHQALRKGVRRTRPSRKGKRLMTRGQLPR

SEQ ID NO: 9854 - protein, 20 aa, Homo sapiens
MGVLLTQRTLLNTYPRPGCS

SEQ ID NO: 9855 - protein, 252 aa, Homo sapiens
MGVLLTQRTLLSLVLALLFPSMASMAAIGSCSKEYRVLLGQLQKQTDLMQDTSRLLDPYIRIQGLDVPKLREHCRERPGAFPSEETLRGLGRRGFLQTLNATLGCVLHRLADLEQRLPKAQDLERSGLNIEDLEKLQMARPNILGLRNNIYCMAQLLDNSDTAEPTKAGRGASQPPTPTPASDAFQRKLEGCRFLHGYHRFMHSVGRVFSKWGESPNRSRRHSPHQALRKGVRRTRPSRKGKRLMTRGQLPR

SEQ ID NO: 9856 - protein, 188 aa, Homo sapiens
LEPATEYMARVRCADASHFWKWSEWSGQNFTTLEAAPSEAPDVWRIVSLEPGNHTVTLFWKPLSKLHANGKILFYNVVVENLDKPSSSELHSIPAPANSTKLILDRCSYQICVIANNSVGASPASVIVISADPENSVSTCFSGTVPSVWGEGDFSHGSGHFCPGDSSTYMGNYLKFIQVTATLTNSHH

SEQ ID NO: 9857 - protein, 979 aa, Homo sapiens
MALFAVFQTTFFLTLLSLRTYQSEVLAERLPLTPVSLKVSTNSTRQSLHLQWTVHNLPYHQELKMVFQIQISRIETSNVIWVGNYSTTVKWNQVLHWSWESELPLECATHFVRIKSLVDDAKFPEPNFWSNWSSWEEVSVQDSTGQDILFVFPKDKLVEEGTNVTICYVSRNIQNNVSCYLEGKQIHGEQLDPHVTAFNLNSVPFIRNKGTNIYCEASQGNVSEGMKGIVLFVSKVLEEPKDFSCETEDFKTLHCTWDPGTDTALGWSKQPSQSYTLFESFSGEKKLCTHKNWCNWQITQDSQETYNFTLIAENYLRKRSVNILFNLTHRVYLMNPFSVNFENVNATNAIMTWKVHSIRNNFTYLCQIELHGEGKMMQYNVSIKVNGEYFLSELEPATEYMARVRCADASHFWKWSEWSGQNFTTLEAAPSEAPDVWRIVSLEPGNHTVTLFWKPLSKLHANGKILFYNVVVENLDKPSSSELHSIPAPANSTKLILDRCSYQICVIANNSVGASPASVIVISADPENKEVEEERIAGTEGGFSLSWKPQPGDVIGYVVDWCDHTQDVLGDFQWKNVGPNTTSTVISTDAFRPGVRYDFRIYGLSTKRIACLLEKKTGYSQELAPSDNPHVLVDTLTSHSFTLSWKDYSTESQPGFIQGYHVYLKSKARQCHPRFEKAVLSDGSECCKYKIDNPEEKALIVDNLKPESFYEFFITPFTSAGEGPSATFTKVTTPDEHSSMLIHILLPMVFCVLLIMVMCYLKSQWIKETCYPDIPDPYKSSILSLIKFKENPHLIIMNVSDCIPDAIEVVSKPEGTKIQFLGTRKSLTETELTKPNYLYLLPTEKNHSGPGPCICFENLTYNQAASDSGSCGHVPVSPKAPSMLGLMTSPENVLKALEKNYMNSLGEIPAGETSLNYVSQLASPMFGDKDSLPTNPVEAPHCSEYKMQMAVSLRLALPPPTENSSLSSITLLDPGEHYC

SEQ ID NO: 9858 - protein, 342 aa, Homo sapiens
MALFAVFQTTFFLTLLSLRTYQSEVLAERLPLTPVSLKVSTNSTRQSLHLQWTVHNLPYHQELKMVFQIQISRIETSNVIWVGNYSTTVKWNQVLHWSWESELPLECATHFVRIKSLVDDAKFPEPNFWSNWSSWEEVSVQDSTGQDILFVFPKDKLVEEGTNVTICYVSRNIQNNVSCYLEGKQIHGEQLDPHVTAFNLNSVPFIRNKGTNIYCEASQGNVSEGMKGIVLFVSKVLEEPKDFSCETEDFKTLHCTWDPGTDTALGWSKQPSQSYTLFESFSGEKKLCTHKNWCNWQITQDSQETYNFTLIAENYLRKRSVNILFNLTHRGETRVVTAHRGH

SEQ ID NO: 9859 - protein, 35 aa, Homo sapiens
  SITE 1: note = misc_feature - Xaa can be any naturally occurring amino acid
XIKETCYPDIPDPYKSSILSLIKFKISSKVWLNRR

SEQ ID NO: 9860 - protein, 62 aa, Homo sapiens
  SITE 1: note = misc_feature - Xaa can be any naturally occurring amino acid
XSMLIHILLPMVFCVLLIMVMCYLKSQWIKETCYPDIPDPYKSSILSLIKFKISSKVWLNRR

SEQ ID NO: 9861 - protein, 111 aa, Homo sapiens
MLDWRLASAHFILAVTLTLWSSGKVLSVDVTTTEAFDSGVIDVQSTPTVREEKSATDLTAKLLLLDELVSLENDVIETKKKRSFSGFGSPLDRLSAGSVDHKGKQRCNFLG

SEQ ID NO: 9862 - protein, 133 aa, Homo sapiens
MLDWRLASAHFILAVTLTLWSSGKVLSVDVTTTEAFDSGVIDVQSTPTVREEKSATDLTAKLLLLDELVSLENDVIETKKKRSFSGFGSPLDRLSAGSVDHKGKQRKVVDHPKRRFGIPMDRIGRNRLSNSRG

SEQ ID NO: 9863 - protein, 815 aa, Homo sapiens
MFRLGLLVCFYNDLELLDATVAQVLLYQMIKCSHLRGFQAGVQKLKAELLDIAMENQTLNETLGSLSDAVVGLTYSQLESLSPEAVHGAISTLNQVSGWAKSQVIILSAKYLAHEKVLSFYNVSQMGALLAGVSTQAFCSMKRKDISQVLRSAVSQYVSDLSPAQQQGILSKMVQAEDTAPGIVEIQGAFFKEVSLFDLRRQPGFNSTVLKDKELGRSQALFLYELLLKTTRRPEELLSAGQLVKGVTCSHIDAMSTDFFLAHFQDFQNNFALLSPYQVNCLAWKYWEVSRLSMPPFLLAALPARYLASVPASQCVPFLISLGKSWLDSLVLDSHKKTSVLRKVQQCLDDSIADEYTVDIMGNLLCHLPAAIIDRGISPRAWATALHGLRDCPDLNPEQKAAVRLKLLGQYGLPQHWTAETTKDLGPFLVLFSGDELSSIATKFPEILLQAASKMARTLPTKEFLWAVFQSVRNSSDKIPSYDPMPGCHGVVAPSSDDIFKLAEANACWALEDLRCMEEDTFIRTVELLGAVQGFSRPQLMTLKEKAIQVWDMPSYWREHHIVSLGRIALALNESELEQLDLSSIDTVASLSWQTEWTPGQAESILQGYLDDSGYSIQDLKSFHLVGLGATLCAINITEIPLIKISEFRVVVARIGTLLCSTHVLAEFKRKAEVVFGDPTEWTSSVLQELGTIAAGLTKAELRMLDKDLMPYFQPSAIKCLPDEIFKELSAEQIASLGPENAAAVTHAQRRRLSPLQLQSLQQALDGAKTHSWQDAPASAGPTRTSSSRSPAGALQSWGLWLGCPLLVLMAKLLW

SEQ ID NO: 9864 - protein, 1060 aa, Homo sapiens
MGNSITYRDQAAVENHLEQRLHQPQKLLEDLRKTDAQQFRTAMKCLLEDKKDGLDLKDIIIDLGEIRERALQSPGVNRSLFLITLERCFQMLNSLECVEILGKVLRGSSGSFLQPDITERLPRDLREDAFKNLSAVFKDLYDKTSAHSQRALYSWMTGILQTSSNATDDSASWVSAEHLWVLGRYMVHLSFEEITKISPIEIGLFISYDNATKQLDMVYDITPELAQAFLERISSSNFNMRNTSTIHRLGLLVCFYNDLELLDATVAQVLLYQMIKCSHLRGFQAGVQKLKAELLDIAMENQTLNETLGSLSDAVVGLTYSQLESLSPEAVHGAISTLNQVSGWAKSQVIILSAKYLAHEKVLSFYNVSQMGALLAGVSTQAFCSMKRKDISQVLRSAVSQYVSDLSPAQQQGILSKMVQAEDTAPGIVEIQGAFFKEVSLFDLRRQPGFNSTVLKDKELGRSQALFLYELLLKTTRRPEELLSAGQLVKGVTCSHIDAMSTDFFLAHFQDFQNNFALLSPYQVNCLAWKYWEVSRLSMPPFLLAALPARYLASVPASQCVPFLISLGKSWLDSLVLDSHKKTSVLRKVQQCLDDSIADEYTVDIMGNLLCHLPAAIIDRGISPRAWATALHGLRDCPDLNPEQKAAVRLKLLGQYGLPQHWTAETTKDLGPFLVLFSGDELSSIATKFPEILLQAASKMARTLPTKEFLWAVFQSVRNSSDKIPSYDPMPGCHGVVAPSSDDIFKLAEANACWALEDLRCMEEDTFIRTVELLGAVQGFSRPQLMTLKEKAIQVWDMPSYWREHHIVSLGRIALALNESELEQLDLSSIDTVASLSWQTEWTPGQAESILQGYLDDSGYSIQDLKSFHLVGLGATLCAINITEIPLIKISEFRVVVARIGTLLCSTHVLAEFKRKAEVVFGDPTEWTSSVLQELGTIAAGLTKAELRMLDKDLMPYFQPSAIKCLPDEIFKELSAEQIASLGPENAAAVTHAQRRRLSPLQLQSLQQALDGAKTHSWQDAPASAGPTRTSSSRSPAGALQSWGLWLGCPLLVLMAKLLW

SEQ ID NO: 9865 - protein, 1153 aa, Homo sapiens
MSQEPTTYSLFLFLFLSHGVSSYTVPNSRQDLHPLLQNMAEEIIDGSYLNALLDLIQFQSSHVWTDDLSHRVLAYLNSRNVAFTIPSLQAAVENHLEQRLHQPQKLLEDLRKTDAQQFRTAMKCLLEDKKDGLDLKDIIIDLGEIRERALQSPGVNRSLFLITLERCFQMLNSLECVEILGKVLRGSSGSFLQPDITERLPRDLREDAFKNLSAVFKDLYDKTSAHSQRALYSWMTGILQTSSNATDDSASWVSAEHLWVLGRYMVHLSFEEITKISPIEIGLFISYDNATKQLDMVYDITPELAQAFLERISSSNFNMRNTSTIHRQAHELWALEPFPKMLGLLVCFYNDLELLDATVAQVLLYQMIKCSHLRGFQAGVQKLKAELLDIAMENQTLNETLGSLSDAVVGLTYSQLESLSPEAVHGAISTLNQVSGWAKSQVIILSAKYLAHEKVLSFYNVSQMGALLAGVSTQAFCSMKRKDISQVLRSAVSQYVSDLSPAQQQGILSKMVQAEDTAPGIVEIQGAFFKEVSLFDLRRQPGFNSTVLKDKELGRSQALFLYELLLKTTRRPEELLSAGQLVKGVTCSHIDAMSTDFFLAHFQDFQNNFALLSPYQVNCLAWKYWEVSRLSMPPFLLAALPARYLASVPASQCVPFLISLGKSWLDSLVLDSHKKTSVLRKVQQCLDDSIADEYTVDIMGNLLCHLPAAIIDRGISPRAWATALHGLRDCPDLNPEQKAAVRLKLLGQYGLPQHWTAETTKDLGPFLVLFSGDELSSIATKFPEILLQAASKMARTLPTKEFLWAVFQSVRNSSDKIPSYDPMPGCHGVVAPSSDDIFKLAEANACWALEDLRCMEEDTFIRTVELLGAVQGFSRPQLMTLKEKAIQVWDMPSYWREHHIVSLGRIALALNESELEQLDLSSIDTVASLSWQTEWTPGQAESILQGYLDDSGYSIQDLKSFHLVGLGATLCAINITEIPLIKISEFRVVVARIGTLLCSTHVLAEFKRKAEVVFGDPTEWTSSVLQELGTIAAGLTKAELRMLDKDLMPYFQPSAIKCLPDEIFKELSAEQIASLGPENAAAVTHAQRRRLSPLQLQSLQQALDGAKTHSWQDAPASAGPTRTSSSRSPAGALQSWGLWLGCPLLVLMAKLLW

SEQ ID NO: 9866 - protein, 1139 aa, Homo sapiens
MSQEPTTYSLFLFLFLSHGVSSYTVPNSRQDLHPLLQNMAEEIIDGSYLNALLDLIQFQSSHVWTDDLSHRVLAYLNSRNVAFTIPSLQAAVENHLEQRLHQPQKLLEDLRKTDAQQFRTAMKCLLEDKKDGLDLKDIIIDLGEIRERALQSPGVNRSLFLITLERCFQMLNSLECVEILGKVLRGSSGSFLQPDITERLPRDLREDAFKNLSAVFKDLYDKTSAHSQRALYSWMTGILQTSSNATDDSASWVSAEHLWVLGRYMVHLSFEEITKISPIEIGLFISYDNATKQLDMVYDITPELAQAFLERISSSNFNMRNTSTIHRLGLLVCFYNDLELLDATVAQVLLYQMIKCSHLRGFQAGVQKLKAELLDIAMENQTLNETLGSLSDAVVGLTYSQLESLSPEAVHGAISTLNQVSGWAKSQVIILSAKYLAHEKVLSFYNVSQMGALLAGVSTQAFCSMKRKDISQVLRSAVSQYVSDLSPAQQQGILSKMVQAEDTAPGIVEIQGAFFKEVSLFDLRRQPGFNSTVLKDKELGRSQALFLYELLLKTTRRPEELLSAGQLVKGVTCSHIDAMSTDFFLAHFQDFQNNFALLSPYQVNCLAWKYWEVSRLSMPPFLLAALPARYLASVPASQCVPFLISLGKSWLDSLVLDSHKKTSVLRKVQQCLDDSIADEYTVDIMGNLLCHLPAAIIDRGISPRAWATALHGLRDCPDLNPEQKAAVRLKLLGQYGLPQHWTAETTKDLGPFLVLFSGDELSSIATKFPEILLQAASKMARTLPTKEFLWAVFQSVRNSSDKIPSYDPMPGCHGVVAPSSDDIFKLAEANACWALEDLRCMEEDTFIRTVELLGAVQGFSRPQLMTLKEKAIQVWDMPSYWREHHIVSLGRIALALNESELEQLDLSSIDTVASLSWQTEWTPGQAESILQGYLDDSGYSIQDLKSFHLVGLGATLCAINITEIPLIKISEFRVVVARIGTLLCSTHVLAEFKRKAEVVFGDPTEWTSSVLQELGTIAAGLTKAELRMLDKDLMPYFQPSAIKCLPDEIFKELSAEQIASLGPENAAAVTHAQRRRLSPLQLQSLQQALDGAKTHSWQDAPASAGPTRTSSSRSPAGALQSWGLWLGCPLLVLMAKLLW

SEQ ID NO: 9867 - protein, 1139 aa, Homo sapiens; identical to SEQ ID NO: 9866

SEQ ID NO: 9868 - protein, 353 aa, Homo sapiens
MSQEPTTYSLFLFLFLSHGVSSYTVPNSRQDLHPLLQNMAEEIIDGSYLNALLDLIQFQSSHVWTDDLSHRVLAYLNSRNVAFTIPSLQAAVENHLEQRLHQPQKLLEDLRKTDAQQFRTAMKCLLEDKKDGLDLKDIIIDLGEIRERALQSPGVNRSLFLITLERCFQMLNSLECVEILGKVLRGSSGSFLQPDITERLPRDLREDAFKNLSAVFKDLYDKTSAHSQRALYSWMTGILQTSSNATDDSASWVSAEHLWVLGRYMVHLSFEEITKISPIEIGLFISYDNATKQLDMVYDITPELAQAFLERISSSNFNMRNTSTIHSSKQNSWTLPWRTRPSMRPWVLCRMQL

SEQ ID NO: 9869 - protein, 94 aa, Homo sapiens
AMGDKATVVGGQAEAPDSVAMSSWERRLHRAKCAPSYLFSCFNGGECVHPAFCDCRRFNATGPRCQMVYNAGPERDSICRAWGQHHVETFDGLY

SEQ ID NO: 9870 - protein, 2913 aa, Homo sapiens
MGVLASALCWLLCVWLPWGEQAAESLRVQRLAAAPVLWGSAEPQPEPAGQPSSSHQEATLAMGDKATVVGGQQAEAPDSVAMSSWERRLHRAKCAPSYLFSCFNGGECVHPAFCDCRRFNATGPRCQMVYNAGPERDSICRAWGQHHVETFDGLYYYLSGKGSYTLVGRHEPEGQSFSIQVHNDPQCGSSPYTCSRAVSLFFVGEQEIHLAKEVTHGGMRVQLPHVMGSARLQQLAGYVIVRHQSAFTLAWDGASAVYIKMSPELLGWTHGLCGNNNADPKDDLVTSSGKLTDDVVEFVHSWQEQAPNQPPGPTTSSLPRPPCLQQNPGTMQGVYEQCEALLRPPFDACHAYVSPLPFTASCTSDLCQSMGDVATWCRALAEYARACAQAGRPLQGWRTQLRQCTVHCKEKAFTYNECIACCPASCHPRASCVDSEIACVDGCYCPNGLIFEDGGCVAPAECPCEFHGTLYPPGSVVKEDCNTCTCTSGKWECSTAVCPAECSVTGDIHFTTFDGRRYTFPATCQYILAKSRSSGTFTVTLQNAPCGLNQDGACVQSVSVILHQDPRRQVTLTQAGDVLLFDQYKIIPPYTDDAFEIRRLSSVFLRVRTNVGVRVLYDREGLRLYLQVDQRWVEDTVGLCGTFNGNTQDDFLSPVGVPESTPQLFGNSWKTLSACSPLVSGSPLDPCDVHLQAASYSVQACSVLTGEMFAPCSAFLSPVPYFEQCRRDACRCGQPCLCATLAHYAHLCRRHGLPVDFRARLPACALSCEASKEYSPCVAPCGRTCQDLASPEACGVDGGDDLSRDECVEGCACPPDTYLDTQADLCVPRNQCSCHFQGVDYPPGDSDIPSLGHCHCKDGVMSCDSRAPAAACPAGQVFVNCSDLHTDLELSRERTCEQQLLNLSVSARGPCLSGCACPQGLLRHGDACFLPEECPCTWKGKEYFPGDQVMSPCHTCVCQRGSFQCTLHPCASTCTAYGDRHYRTFDGLPFDFVGACKVHLVKSTSDVSFSVIVENVNCYSSGMICRKFISINVGNSLIVFDDDSGNPSPESFLDDKQEVHTWRVGFFTLVHFPQEHITLLWDQRTTVHVQAGPQWQGQLAGLCGNFDLKTINEMRTPENLELTNPQEFGSSWAAVECPDTLDPRDMCVLNPLREPFAKKECSILLSEVFEICHPVVDVTWFYSNCLTDTCGCSQGGDCECFCASVSAYAHQCCQHGVAVDWRTPRLCPYDCDFFNKVLGKGPYQLSSLAAGGALVGMKAVGDDIVLVRTEDVAPADIVSFLLTAALYKAKAHDPDVVSLEAADRPNFFLHVTANGSLELAKWQGRDTFQQHASFLLHRGTRQAGLVALESLAKPSSFLYVSGAVLALRLYEHTEVFRRGTLFRLLDAKPSGAAYPICEWRYDACASPCFQTCRDPRAASCRDVPRVEGCVPVCPTPQVLDEVTQRCVYLEDCVEPAVWVPTEALGNETLPPSQGLPTPSDEEPQLSQESPRTPTHRPALTPAAPLTTALNPPVTATEEPVVSPGPTQTTLQQPLELTASQLPAGPTESPASKGVTASLLAIPHTPESSSLPVALQTPTPGMVSGAMETTRVTVIFAGSPNITVSSRSPPAPRFPLMTKAVTVRGHGSLPVRTTPPQPSLTASPSSRPVASPGAISRSPTSSGSHKAVLTPAVTKVISRTGVPQPTQAQSASSPSTPLTVAGTAAEQVPVSPLATRSLEIVLSTEKGEAGHSQPMGSPASPQPHPLPSAPPRPAQHTTMATRSPALPPETPAAASLSTATDGLAATPFMSLESTRPSQLLSGLPPDTSLPLAKVGTSAPVATPGPKASVITTPLQPQATTLPAQTLSPVLPFTPAAMTQAHPPTHIAPPAAGTAPGLLLGATLPTSGVLPVAEGTASMVSVVPRKSTTGKVAILSKQVSLPTSMYGSAEGGPTELTPATSHPLTPLVAEPEGAQAGTALPVPTSYALSRVSARTAPQDSMLVLLPQLAEAHGTSAGPHLAAEPVDEATTEPSGRSAPALSIVEGLAEALATTTEANTSTTCVPIAEQDCVRHICLEGQLIRVNQSQHCPQGAAPPRCGILGLAVRVGGDRCCPLWECACRCSIFPDLSFVTFDGSHVALFKEAIYILSQSPDEMLTVHVLDCKSANLGHLNWPPFCLVMLNMTHLAHQVTIDRFNRKVTVDLQPVWPPVSRYGFRIEDTGHMYMILTPSDIQIQWLHSSGLMIVEASKTSKAQGHGLCGICDGDAANDLTLKDGSVVGGAEDPAPFLDSWQVPSSLTSVGQTRFRPDSCATTDCSPCLRMVSNRTFSACHRFVPPESFCELWIRDTKYVQQPCVALTVYVAMCHKFHVCIEWRRSDYCPFLCSSDSTYQACVTACEPPKTCQDGILGPLDPEHCQVLGEGCVCSEGTILHRRHSALCIPEAKCACTDSMGVPRALGETWNSSLSGCCQHQCQAPDTIVPVDLGCPSPRPESCLRFGEVALLLPTKDPCCLGTVCVCNQTLCEGLAPTCRPGHRLLTHFQEDSCCPSYSCECDPDLCEAELVPSCRQDQILITGRLGDSCCTSYFCACGDCPDSIPECQEGEALTVHRNTTELCCPLYQCVCENFRCPQVQCGLGTALVEVWSPDRCCPYKSCECDCDTIPVPRCHLWEKSQLDEEFMHSVENVCGCAKYECVKAPVCLSRELGVMQPGQTVVELSADGVCHTSRCTTVLDPLTNFYQINTTSVLCDIHCEANQEYEHPRDLAACCGSCRNVSCLFTFPNGTTSLFLPGASWIADCARHHCSSTPLGAVLVRSPISCPPLNETECAKVGGSVVPSLEGCCRTCKEDGRSCKKVTIRMTIRKNECRSSTPVNLVSCDGRCPSASIYNYNINTYARFCKCCREVGLQRRSVQLFCATNATWVPYTVQEPTDCACQWS

SEQ ID NO: 9871 - protein, 2925 aa, Homo sapiens
MGVLASALCWLLCVWLPWGEQAAESLRVQRLGERVVDSGRSGARGMRNVKGMRNGPAQTRVSSSSSHQEATLAMGDKATVVGGQQAEAPDSVAMSSWERRLHRAKCAPSYLFSCFNGGECVHPAFCDCRRFNATGPRCQMVYNAGPERDSICRAWGQHHVETFDGLYYYLSGKGSYTLVGRHEPEGQSFSIQVHNDPQCGSSPYTCSRAVSLFFVGEQEIHLAKEVTHGGMRVQLPHVMGSARLQQLAGYVIVRHQSAFTLAWDGASAVYIKMSPELLGWTHGLCGNNNADPKDDLVTSSGKLTDDVVEFVHSWQEQAPNQPPGPTTSSLPRPPCLQQNPGTMQGVYEQCEALLRPPFDACHAYVSPLPFTASCTSDLCQSMGDVATWCRALAEYARACAQAGRPLQGWRTQLRQCTVHCKEKAFTYNECIACCPASCHPRASCVDSEIACVDGCYCPNGLIFEDGGCVAPAECPCEFHGTLYPPGSVVKEDCNTCTCTSGKWECSTAVCPAECSVTGDIHFTTFDGRRYTFPATCQYILAKSRSSGTFTVTLQNAPCGLNQDGACVQSVSVILHQDPRRQVTLTQAGDVLLFDQYKIIPPYTDDAFEIRRLSSVFLRVRTNVGVRVLYDREGLRLYLQVDQRWVEDTVGLCGTFNGNTQDDFLSPVGVPESTPQLFGNSWKTLSACSPLVSGSPLDPCDVHLQAASYSVQACSVLTGEMFAPCSAFLSPVPYFEQCRRDACRCGQPCLCATLAHYAHLCRRHGLPVDFRARLPACALSCEASKEYSPCVAPCGRTCQDLASPEACGVDGGDDLSRDECVEGCACPPDTYLDTQADLCVPRNQCSCHFQGVDYPPGDSDIPSLGHCHCKDGVMSCDSRAPAAACPAGQVFVNCSDLHTDLELSRERTCEQQLLNLSVSARGPCLSGCACPQGLLRHGDACFLPEECPCTWKGKEYFPGDQVMSPCHTCVCQRGSFQCTLHPCASTCTAYGDRHYRTFDGLPFDFVGACKVHLVKSTSDVSFSVIVENVNCYSSGMICRKFISINVGNSLIVFDDDSGNPSPESFLDDKQEVHTWRVGFFTLVHFPQEHITLLWDQRTTVHVQAGPQWQGQLAGLCGNFDLKTINEMRTPENLELTNPQEFGSSWAAVECPDTLDPRDMCVLNPLREPFAKKECSILLSEVFEICHPVVDVTWFYSNCLTDTCGCSQGGDCECFCASVSAYAHQCCQHGVAVDWRTPRLCPYDCDFFNKVLGKGPYQLSSLAAGGALVGMKAVGDDIVLVRTEDVAPADIVSFLLTAALYKAKAHDPDVVSLEAADRPNFFLHVTANGSLELAKWQGRDTFQQHASFLLHRGTRQAGLVALESLAKPSSFLYVSGAVLALRLYEHTEVFRRGTLFRLLDAKPSGAAYPICEWRYDACASPCFQTCRDPRAASCRDVPRVEGCVPVCPTPQVLDEVTQRCVYLEDCVEPAVWVPTEALGNETLPPSQGLPTPSDEEPQLSQESPRTPTHRPALTPAAPLTTALNPPVTATEEPVVSPGPTQTTLQQPLELTASQLPAGPTESPASKGVTASLLAIPHTPESSSLPVALQTPTPGMVSGAMETTRVTVIFAGSPNITVSSRSPPAPRFPLMTKAVTVRGHGSLPVRTTPPQPSLTASPSSRPVASPGAISRSPTSSGSHKAVLTPAVTKVISRTGVPQPTQAQSASSPSTPLTVAGTAAEQVPVSPLATRSLEIVLSTEKGEAGHSQPMGSPASPQPHPLPSAPPRPAQHTTMATRSPALPPETPAAASLSTATDGLAATPFMSLESTRPSQLLSGLPPDTSLPLAKVGTSAPVATPGPKASVITTPLQPQATTLPAQTLSPVLPFTPAAMTQAHPPTHIAPPAAGTAPGLLLGATLPTSGVLPVAEGTASMVSVVPRKSTTGKVAILSKQVSLPTSMYGSAEGGPTELTPATSHPLTPLVAEPEGAQAGTALPVPTSYALSRVSARTAPQDSMLVLLPQLAEAHGTSAGPHLAAEPVDEATTEPSGRSAPALSIVEGLAEALATTTEANTSTTCVPIAEQDCVRHICLEGQLIRVNQSQHCPQGAAPPRCGILGLAVRVGGDRCCPLWECACRCSIFPDLSFVTFDGSHVALFKEAIYILSQSPDEMLTVHVLDCKSANLGHLNWPPFCLVMLNMTHLAHQVTIDRFNRKVTVDLQPVWPPVSRYGFRIEDTGHMYMILTPSDIQIQWLHSSGLMIVEASKTSKAQGHGLCGICDGDAANDLTLKDGSVVGGAEDPAPFLDSWQVPSSLTSVGQTRFRPDSCATTDCSPCLRMVSNRTFSACHRFVPPESFCELWIRDTKYVQQPCVALTVYVAMCHKFHVCIEWRRSDYCPFLCSSDSTYQACVTACEPPKTCQDGILGPLDPEHCQVLGEGCVCSEGTILHRRHSALCIPEAKCACTDSMGVPRALGETWNSSLSGCCQHQCQAPDTIVPVDLGCPSPRPESCLRFGEVALLLPTKDPCCLGTVCVCNQTLCEGLAPTCRPGHRLLTHFQEDSCCPSYSCECDPDLCEAELVPSCRQDQILITGRLGDSCCTSYFCACGDCPDSIPECQEGEALTVHRNTTELCCPLYQCVCENFRCPQVQCGLGTALVEVWSPDRCCPYKSCECDCDTIPVPRCHLWEKSQLDEEFMHSVENVCGCAKYECVKAPVCLSRELGVMQPGQTVVELSADGVCHTSRCTTVLDPLTNFYQINTTSVLCDIHCEANQEYEHPRDLAACCGSCRNVSCLFTFPNGTTSLFLPGASWIADCARHHCSSTPLGAVLVRSPISCPPLNETECAKVGGSVVPSLEGCCRTCKEDGRSCKKVTIRMTIRKNECRSSTPVNLVSCDGRCPSASIYNYNINTYARFCKCCREVGLQRRSVQLFCATNATWVPYTVQEPTDCACQWS

SEQ ID NO: 9872 - protein, 71 aa, Homo sapiens
GEFLTVDLNSTHFCCPQYYCVCEPNLCPMPLLNCAEDMNLVKENVSGQCCPTWHCECNCENLIMPTCEVIS

SEQ ID NO: 9873 - protein, 2344 aa, Homo sapiens
MIPWSIFLLHVLLFSLQEYICASSILMGTSKNGFNENRQKRALLAAQFEATSPRYFFHDAINWGESKIKGSCPYECLNGAFCSKTGTCDCQIFQALGTRCQIIPNMGNGRDGICKTWGQYHFETFDGIYYYFPGNCSYIFAKDCGDLEPRYTVWVHNSPKCLGSVYSCYRSISLFFSNQEEIRIYGHEIKKNGISLTLPQTIGQIFIEKLADYILVKTTFGFSLAWDGISGIYLKLSEDHKGKSCGLCGNYNDIQSDDFIILQEDYTEDIAMFANSWSVQTPDDTKCVLTPSDFPNPCSSGMPAFEAIFFKCQILLQFPFLSCHEYIDPYLYIASCVNDLCKTDDDETYCRAATEYARACSHAGYPIQDWRDDFPACTDKCDDSFVHRDCISCCPPTCTFEKQCLGSNLHCLDGCYCPDGLVMDNGTCISLENCPCGFHGLAYSVGSKIEQECTECVCVGGVWNCTEQDCPVQCSVVGDSHFTTFDGRHYSFIGMCQYILVKGTGKDKFTITLQKAPCEQNLGLVCLQSITLILEDDFNKQVTLGRGGQILTSPNQGFNLNGIVEIQTLSSLFILLKTTFGLKILFAIDGERIYIQLTSAWKRRTLGLCGTFNGNIRDDFLSPSGMIEGTPQLHANAWRVSSTCFAPVHVPVVDPCNINQQNIGYAAHCDVIHQELFAPCHIYISPGLYYQLCRHDACKCGSSCLCNALAHYAYLCGQHGVPIDFRTQISFCAVVCQKGMLYHHCSSFCLHSCISLSSPEQCSDDCAEGCNCPEGKFYEDTLNFCVPIFHCRCHYRGSVYQPGELIPTPSGLCQCSNGTVKCDELATPSAVHICPEGKEYFDCRFPDPELPAGGVNCETTCANLAMNFTCTPSSPCISGCVCAPGMAEHRGKCYVPESCPCIWKDWEYLSGEVIATPCYTCVCRRGMFNCTYYPCPAVCTIYGDRHYYSFDGLEYDYISDCQVFLIKSADDSDISVIAQNKKCFDNDIVCSKSVLISVGDTEIYLNDTPYKQKQSGFFLENKSTYQLWKAGYYIVVYFPEKDITILWDRKTTIHIKVGPQWKNKLSGLCGNFDKCTSNDMTTSNNLEVRNARVFGDSWALGQCESPDETIKPCEAHQNKFPYAKKECSILYSDIFASCRNVIDVTSFAKNCHEDTCNCNLGGDCECLCTSIAAYAYKCCQEGISIHWRSSTVCSLDCEYYNEGLGEGPYMLASYGQSGLVLGANMTSRSVFCLPRSSVHTSLFFYFMITPGLFKEKVSSLALVSLESAERPNYFLYVHDNDTLSLELWEANSAFHRRATFFHHQGLWIPGYSAFELYSKKGFFIIFTDSSVKASKYDDSEEFKHSSSFSIEEIQAAVPYRKMCEWRYEPCATPCFKTCSDPEALACKFLPPVEGCLPYCPKNMILDEVTLKCVYPRDCIPVIPTEPTLMPPAKPTVPMFTVWEMITPSDITVFDMLTPTTGLECEPQKFDPVYDCSQYICLNMEWQLYNWSLNCPKDVEMPDCGFRGRPVQVNSDICCPEWECPCRCSMLSELSIITFDGNNAALYSMASYILVRIPGEIIVAHIEKCSMNQNGNSLKKLAPSGRISGLCFKKLNVTTPIHKIIVNRLARKVEVDSIVVPLPFSSQELSIEDSGSMYVITTPAGLIIKWSHLTGIIDIHFGFRFNLSSYTEGLCGICNEDPDDDLRMQNGTIITNMEDIGLFIESWEIEKSFEVTMRRPVRNCTEHDCSQCIDLLNRRIFIPCHDKVSPEDFCEKMWINYTYFWNYECDALSAYVALCNKFDICIQWRTPDYCSLSCPEGKEYQPCVRPCEARTCLNQWFYGHTSCLNLREDCVCKVGTILHRPHSAQCIPEKECACTDSEDQPRTAGEIWNGGIDECTLYKCLENGSIIPIEPDCDEEPTPVCEREAEVVMGIIDKWTCCSKEVCGCDTTLCETSIPTCTNSQKLIVGHSPLSCCPQYKCECDPLKCPSISTPECREDQFMIQVRQEEPCCFSPFCVCESCTKPVPLCHDGEFLTVDLNSTHFCCPQYYCVCEPNLCPMPLLNCAEDMNLVKENVSGQCCPTWHCECNCENLIMPTCEVGEFTAIDHNFQSDCGCIQYLCEKDDVCVFQEVSVLNPGQSMIKYLEEDFCYAIECLEEKDNHTGFHTLNFTLVNCSKKCDVHQVYTPSPSDYGCCGTCKNVSCKFHMENGTSVVYAVGSTWHYNCTTYECVKTDEGAIILNYTMVCPPFNETECKMNEGIVKLYNEGCCKICKREERICQKVIIKSVIRKQDCMSQSPINVASCDGKCPSATIYNINIESHLRFCKCCRENGVRNLSVPLYCSGNGTEIMYTLQEPIDCTCQWN

SEQ ID NO: 9874 - protein, 2353 aa, Homo sapiens
MNIVRKLNLMIPWSIFLLHVLLFSLQEYICASSILMGTSKNGFNENRQKRALLAAQFEATSPRYFFHDAINWGESKIKGSCPYECLNGAFCSKTGTCDCQIFQALGTRCQIIPNMGNGRDGICKTWGQYHFETFDGIYYYFPGNCSYIFAKDCGDLEPRYTVWVHNSPKCLGSVYSCYRSISLFFSNQEEIRIYGHEIKKNGISLTLPQTIGQIFIEKLADYILVKTTFGFSLAWDGISGIYLKLSEDHKGKSCGLCGNYNDIQSDDFIILQEDYTEDIAMFANSWSVQTPDDTKCVLTPSDFPNPCSSGMPAFEAIFFKCQILLQFPFLSCHEYIDPYLYIASCVNDLCKTDDDETYCRAATEYARACSHAGYPIQDWRDDFPACTDKCDDSFVHRDCISCCPPTCTFEKQCLGSNLHCLDGCYCPDGLVMDNGTCISLENCPCGFHGLAYSVGSKIEQECTECVCVGGVWNCTEQDCPVQCSVVGDSHFTTFDGRHYSFIGMCQYILVKGTGKDKFTITLQKAPCEQNLGLVCLQSITLILEDDFNKQVTLGRGGQILTSPNQGFNLNGIVEIQTLSSLFILLKTTFGLKILFAIDGERIYIQLTSAWKRRTLGLCGTFNGNIRDDFLSPSGMIEGTPQLHANAWRVSSTCFAPVHVPVVDPCNINQQNIGYAAHCDVIHQELFAPCHIYISPGLYYQLCRHDACKCGSSCLCNALAHYAYLCGQHGVPIDFRTQISFCAVVCQKGMLYHHCSSFCLHSCISLSSPEQCSDDCAEGCNCPEGKFYEDTLNFCVPIFHCRCHYRGSVYQPGELIPTPSGLCQCSNGTVKCDELATPSAVHICPEGKEYFDCRFPDPELPAGGVNCETTCANLAMNFTCTPSSPCISGCVCAPGMAEHRGKCYVPESCPCIWKDWEYLSGEVIATPCYTCVCRRGMFNCTYYPCPAVCTIYGDRHYYSFDGLEYDYISDCQVFLIKSADDSDISVIAQNKKCFDNDIVCSKSVLISVGDTEIYLNDTPYKQKQSGFFLENKSTYQLWKAGYYIVVYFPEKDITILWDRKTTIHIKVGPQWKNKLSGLCGNFDKCTSNDMTTSNNLEVRNARVFGDSWALGQCESPDETIKPCEAHQNKFPYAKKECSILYSDIFASCRNVIDVTSFAKNCHEDTCNCNLGGDCECLCTSIAAYAYKCCQEGISIHWRSSTVCSLDCEYYNEGLGEGPYMLASYGQSGLVLGANMTSRSVFCLPRSSVHTSLFFYFMITPGLFKEKVSSLALVSLESAERPNYFLYVHDNDTLSLELWEANSAFHRRATFFHHQGLWIPGYSAFELYSKKGFFIIFTDSSVKASKYDDSEEFKHSSSFSIEEIQAAVPYRKMCEWRYEPCATPCFKTCSDPEALACKFLPPVEGCLPYCPKNMILDEVTLKCVYPRDCIPVIPTEPTLMPPAKPTVPMFTVWEMITPSDITVFDMLTPTTGLECEPQKFDPVYDCSQYICLNMEWQLYNWSLNCPKDVEMPDCGFRGRPVQVNSDICCPEWECPCRCSMLSELSIITFDGNNAALYSMASYILVRIPGEIIVAHIEKCSMNQNGNSLKKLAPSGRISGLCFKKLNVTTPIHKIIVNRLARKVEVDSIVVPLPFSSQELSIEDSGSMYVITTPAGLIIKWSHLTGIIDIHFGFRFNLSSYTEGLCGICNEDPDDDLRMQNGTIITNMEDIGLFIESWEIEKSFEVTMRRPVRNCTEHDCSQCIDLLNRRIFIPCHDKVSPEDFCEKMWINYTYFWNYECDALSAYVALCNKFDICIQWRTPDYCSLSCPEGKEYQPCVRPCEARTCLNQWFYGHTSCLNLREDCVCKVGTILHRPHSAQCIPEKECACTDSEDQPRTAGEIWNGGIDECTLYKCLENGSIIPIEPDCDEEPTPVCEREAEVVMGIIDKWTCCSKEVCGCDTTLCETSIPTCTNSQKLIVGHSPLSCCPQYKCECDPLKCPSISTPECREDQFMIQVRQEEPCCFSPFCVCESCTKPVPLCHDGEFLTVDLNSTHFCCPQYYCVCEPNLCPMPLLNCAEDMNLVKENVSGQCCPTWHCECNCENLIMPTCEVGEFTAIDHNFQSDCGCIQYLCEKDDVCVFQEVSVLNPGQSMIKYLEEDFCYAIECLEEKDNHTGFHTLNFTLVNCSKKCDVHQVYTPSPSDYGCCGTCKNVSCKFHMENGTSVVYAVGSTWHYNCTTYECVKTDEGAIILNYTMVCPPFNETECKMNEGIVKLYNEGCCKICKREERICQKVIIKSVIRKQDCMSQSPINVASCDGKCPSATIYNINIESHLRFCKCCRENGVRNLSVPLYCSGNGTEIMYTLQEPIDCTCQWN

SEQ ID NO: 9875 - protein, 2308 aa, Homo sapiens
MNIVRKLNLMIPWSIFLLHVLLFSLQEYICASSILMGTSKNGFNENRQKRALLAAQFEATSPRYFFHDAINWGESKIKGSCPYECLNGAFCSKTGTCDCQIFQALGTRCQIIPNMGNGRDGICKTWGQYHFETFDGIYYYFPGNCSYIFAKDCGDLEPRYTVWVHNSPKCLGSVYSCYRSISLFFSNQEEIRIYGHEIKKNGISLTLPQTIGQIFIEKLADYILVKTTFGFSLAWDGISGIYLKLSEDHKGKSCGLCGNYNDIQSDDFIILQEDYTEDIAMFANSWSVQTPDDTKCVLTPSDFPNPCSSGMPAFEAIFFKCQILLQFPFLSCHEYIDPYLYIASCVNDLCKTDDDETYCRAATEYARACSHAGYPIQDWRDDFPACTDKCDDSFVHRDCISCCPPTCTFEKQCLGSNLHCLDGCYCPDGLVMDNGTCISLENCPCGFHGLAYSVGSKIEQECTECVCVGGVWNCTEQDCPVQCSVVGDSHFTTFDGRHYSFIGMCQYILVKGTGKDKFTITLQKAPCEQNLGLVCLQSITLILEDDFNKQVTLGRGGQILTSPNQGFNLNGIVEIQTLSSLFILLKTTFGLKILFAIDGERIYIQLTSAWKRRTLGLCGTFNGNIRDDFLSPSGMIEGTPQLHANAWRVSSTCFAPVHVPVVDPCNINQQNIGYAAHCDVIHQELFAPCHIYISPGLYYQLCRHDACKCGSSCLCNALAHYAYLCGQHGVPIDFRTQISFCAVVCQKGMLYHHCSSFCLHSCISLSSPEQCSDDCAEGCNCPEGKFYEDTLNFCVPIFHCRCHYRGSVYQPGELIPTPSGLCQCSNGTVKCDELATPSAVHICPEGKEYFDCRFPDPELPAGGVNCETTCANLAMNFTCTPSSPCISGCVCAPGMAEHRGKCYVPESCPCIWKDWEYLSGEVIATPCYTCVCRRGMFNCTYYPCPAVCTIYGDRHYYSFDGLEYDYISDCQVFLIKKQSGFFLENKSTYQLWKAGYYIVVYFPEKDITILWDRKTTIHIKVGPQWKNKLSGLCGNFDKCTSNDMTTSNNLEVRNARVFGDSWALGQCESPDETIKPCEAHQNKFPYAKKECSILYSDIFASCRNVIDVTSFAKNCHEDTCNCNLGGDCECLCTSIAAYAYKCCQEGISIHWRSSTVCSLDCEYYNEGLGEGPYMLASYGQSGLVLGANMTSRSVFCLPRSSVHTSLFFYFMITPGLFKEKVSSLALVSLESAERPNYFLYVHDNDTLSLELWEANSAFHRRATFFHHQGLWIPGYSAFELYSKKGFFIIFTDSSVKASKYDDSEEFKHSSSFSIEEIQAAVPYRKMCEWRYEPCATPCFKTCSDPEALACKFLPPVEGCLPYCPKNMILDEVTLKCVYPRDCIPVIPTEPTLMPPAKPTVPMFTVWEMITPSDITVFDMLTPTTGLECEPQKFDPVYDCSQYICLNMEWQLYNWSLNCPKDVEMPDCGFRGRPVQVNSDICCPEWECPCRCSMLSELSIITFDGNNAALYSMASYILVRIPGEIIVAHIEKCSMNQNGNSLKKLAPSGRISGLCFKKLNVTTPIHKIIVNRLARKVEVDSIVVPLPFSSQELSIEDSGSMYVITTPAGLIIKWSHLTGIIDIHFGFRFNLSSYTEGLCGICNEDPDDDLRMQNGTIITNMEDIGLFIESWEIEKSFEVTMRRPVRNCTEHDCSQCIDLLNRRIFIPCHDKVSPEDFCEKMWINYTYFWNYECDALSAYVALCNKFDICIQWRTPDYCSLSCPEGKEYQPCVRPCEARTCLNQWFYGHTSCLNLREDCVCKVGTILHRPHSAQCIPEKECACTDSEDQPRTAGEIWNGGIDECTLYKCLENGSIIPIEPDCDEEPTPVCEREAEVVMGIIDKWTCCSKEVCGCDTTLCETSIPTCTNSQKLIVGHSPLSCCPQYKCECDPLKCPSISTPECREDQFMIQVRQEEPCCFSPFCVCESCTKPVPLCHDGEFLTVDLNSTHFCCPQYYCVCEPNLCPMPLLNCAEDMNLVKENVSGQCCPTWHCECNCENLIMPTCEVGEFTAIDHNFQSDCGCIQYLCEKDDVCVFQEVSVLNPGQSMIKYLEEDFCYAIECLEEKDNHTGFHTLNFTLVNCSKKCDVHQVYTPSPSDYGCCGTCKNVSCKFHMENGTSVVYAVGSTWHYNCTTYECVKTDEGAIILNYTMVCPPFNETECKMNEGIVKLYNEGCCKICKREERICQKVIIKSVIRKQDCMSQSPINVASCDGKCPSATIYNINIESHLRFCKCCRENGVRNLSVPLYCSGNGTEIMYTLQEPIDCTCQWN

SEQ ID NO: 9876 - protein, 101 aa, Homo sapiens
NFTLVNCSKKCDVHQVYTPSPSDYGCCGTCKNVSCKFHMENGTSVVYAVGSTWHYNCTTYECVKTDEGAIILNYTMVCPPFNETECKMVCTLLYLRKFIII

SEQ ID NO: 9877 - protein, 752 aa, Homo sapiens
  SITE 1: note = misc_feature - Xaa can be any naturally occurring amino acid
XEIIVAHIEKCSMNQNGNSLKKLAPSGRISGLCFKKLNVTTPIHKIIVNRLARKVEVDSIVVPLPFSSQELSIEDSGSMYVITTPAGLIIKWSHLTGIIDIHFGFRFNLSSYTEGLCGICNEDPDDDLRMQNGTIITNMEDIGLFIESWEIEKSFEVTMRRPVRNCTEHDCSQCIDLLNRRIFIPCHDKVSPEDFCEKMWINYTYFWNYECDALSAYVALCNKFDICIQWRTPDYCSLSCPEGKEYQPCVRPCEARTCLNQWFYGHTSCLNLREDCVCKVGTILHRPHSAQCIPEKECACTDSEDQPRTAGEIWNGGIDECTLYKCLENGSIIPIEPDCDEEPTPVCEREAEVVMGIIDKWTCCSKEVCGCDTTLCETSIPTCTNSQKLIVGHSPLSCCPQYKCECDPLKCPSISTPECREDQFMIQVRQEEPCCFSPFCVCESCTKPVPLCHDGEFLTVDLNSTHFCCPQYYCVCEPNLCPMPLLNCAEDMNLVKENVSGQCCPTWHCEKDDVCVFQEVSVLNPGQSMIKYLEEDFCYAIECLEEKDNHTGFHTLNFTLVNCSKKCDVHQVYTPSPSDYGCCGTCKNVSCKFHMENGTSVVYAVGSTWHYNCTTYECVKTDEGAIILNYTMVCPPFNETECKMNEGIVKLYNEGCCKICKREERICQKVIIKSVIRKQDCMSQSPINVASCDGKCPSATIYNINIESHLRFCKCCRENGVRNLSVPLYCSGNGTEIMYTLQEPIDCTCQWN

SEQ ID NO: 9878 - protein, 166 aa, Homo sapiens
  SITE 1: note = misc_feature - Xaa can be any naturally occurring amino acid
XHSPLSCCPQYKCECDPLKCPSISTPECREDQFMIQVRQEEPCCFSPFCVCESCTKPVPLCHDGEFLTVDLNSTHFCCPQYYCVCEPNLCPMPLLNCAEDMNLVKENVSGQCCPTWHCECNCENLIMPTCEVQPCADADIRTLGCLGRADQEHFHEAKFLRENLLQ

SEQ ID NO: 9879 - protein, 477 aa, Homo sapiens
MWMFSWLCAILIILAIAGMNTIAKTTPHTKFTKKSEEREMPKGLKPSSGPPPEEEETLFTEMAEMAEPITKPSALDSVFGTATLSPFENFTLDPADFFLNCCDCCSPVPGQKGEPGETGQPGPKGEAGNLGIPGPPGVVGPQGPRGYKGEKGLKGERGDQGVPGYPGKPGAQGEPGPKGDKGNIGLGGVKGQKGSKGDTCGNCTKGEKGDQGAMGSPGLHGGPGAKGEKGEMGEKGEMGDKGCCGDSGERGGKGQKGEGGMKGEKGSKGDSGMEGKSGRNGLPGAKGDPGIKGEKGELGPPGLLGPTGPKGDIGNKGVRGPTGKKGSRGFKGSKGELARVPRSAFSAGLSKPFPPPNIPIKFEKILYNDQGNYSPVTGKFNCSIPGTYVFSYHITVRGRPARISLVAQNKKQFKSRETLYGQEIDQASLLVILKLSAGDQVWLEVSKDWNGVYVSAEDDSIFTGFLLYPEETSGISP

SEQ ID NO: 9880 - protein, 128 aa, Homo sapiens
MARILLLFLPGLVAVCAVHGIFMDRLASKKLCADDECVYTISLASAQEDYNAPDCRFINVKKGQQIYVYSKLVKENGAGEFWAGSVYGDGQDEMGVVGYFPRNLVKEQRVYQEATKEVPTTDIDFFCE

SEQ ID NO: 9881 - protein, 89 aa, Homo sapiens
MQACMVPGLALCLLLGPLAGAKPVQEEGDPYAELPAMPYWPFSTSDFWNYVQHFQALGAYPQIEDMARTFFAHFPLGSTLGFHVPYQED

SEQ ID NO: 9882 - protein, 89 aa, Homo sapiens; identical to SEQ ID NO: 9881

SEQ ID NO: 9883 - protein, 1134 aa, Homo sapiens
MGLLASAGLLLLLVIGHPRSLGLKCGIRMVNMKSKEPAVGSRFFSRISSWRNSTVTGHPWQVSLKSDEHHFCGGSLIQEDRVVTAAHCLDSLSEKQLKNITVTSGEYSLFQKDKQEQNIPVSKIITHPEYNSREYMSPDIALLYLKHKVKFGNAVQPICLPDSDDKVEPGILCLSSGWGKISKTSEYSNVLQEMELPIMDDRACNTVLKSMNLPPLGRTMLCAGFPDWGMDACQGDSGGPLVCRRGGGIWILAGITSWVAGCAGGSVPVRNNHVKASLGIFSKVSELMDFITQNLFTGLDRGQPLSKVGSRYITKALSSVQEVNGSQRGKGILDMEKQVGCDHDYVSLRSSSGVLFNQRSLMEDDGKQNKRVCGKILPSPLLAETSEAMVPFVSDTEDSGSGFELTVTAVQKSEAGSGCGSLAILVEEGTNHSAKYPDLYPSNTRCHWFICAPEKHIIKLTFEDFAVKFSPNCIYDAVVIYGDSEEKHKLAKLCGMLTITSIFSSSNMTVIYFKSDGKNRLQGFKARFTILPSESLNKFEPKLPPQNNPVSTVKAILHDVCGIPPFSPQWLSRRIAGGEEACPHCWPWQVGLRFLGDYQCGGAIINPVWILTAAHCVQLKNNPLSWTIIAGDHDRNLKESTEQVRRAKHIIVHEDFNTLSYDSDIALIQLSSPLEYNSVVRPVCLPHSAEPLFSSEICAVTGWGSISADGGLASRLQQIQVHVLEREVCEHTYYSAHPGGITEKMICAGFAASGEKDFCQGDSGGPLVCRHENGPFVLYGIVSWGAGCVQPWKPGVFARVMIFLDWIQSKINGPASLQTNNKCKTLKQQLPPPTPSPDSASWPGCCSEAELEKPRGFFPTPRYLLDYRGRLECSWVLRVSASSMAKFTIEYLSLLGSPVCQDSVLIIYEERHSKRKTAGGLHGRRLYSMTFMSPGPLVRVTFHALVRGAFGISYIVLKVLGPKDSKITRLSQSSNREHLVPCEDVLLTKPEGIMQIPRNSHRTTMGCQWRLVAPLNHIIQLNIINFPMKPTTFVCHGHLRVYEGFGPGKKLIASFAGTLAMILTKDILKREKLNFINTYIMHIWENSVYDNVRSVGKRKQKKFASNLSYSMEAEKSRIQVPADLVPAKGSLSGS

SEQ ID NO: 9884 - protein, 80 aa, Homo sapiens
REHLVPCEDVLLTKPEGIMQIPRNSHRTTMGCQWRLVAPLNHIIQLNIINFPMKPTTFVCHGHLRVYEGFGPGKKLIGEC

SEQ ID NO: 9885 - protein, 121 aa, Homo sapiens
  SITE 1: note = misc_feature - Xaa can be any naturally occurring amino acid
XKITRLSQSSNREHLVPCEDVLLTKPEGIMQIPRNSHRTTMGCQWRLVAPLNHIIQLNIINFPMKPTTFVCHGHLRVYEGFGPGKKLIAHLHGSKKEFILISSAAYLTVHFKTDESERKRF

SEQ ID NO: 9886 - protein, 565 aa, Homo sapiens
MLISRNKLILLLGIVFFERGKSATLSLPKAPSCGQSLVKVQPWNYFNIFSRILGGSQVEKGSYPWQVSLKQRQKHICGGSIVSPQWVITAAHCIANRNIVSTLNVTAGEYDLSQTDPGEQTLTIETVIIHPHFSTKKPMDYDIALLKMAGAFQFGHFVGPICLPELREQFEAGFICTTAGWGRLTEGGVLSQVLQEVNLPILTWEECVAALLTLKRPISGKTFLCTGFPDGGRDACQGDSGGSLMCRNKKGAWTLAGVTSWGLGCGRGWRNNVRKSDQGSPGIFTDISKVLPWIHEHIQTGNRRKSSRAWCSEQDVIVSGAEGKLHFPESLHLYYESKQRCVWTLLVPEEMHVLLSFSHLDVESCHHSYLSMYSLEDRPIGKFCGESLPSSILIGSNSLRLKFVSDATDNAAGFNLTYKALKPNYIPDSGCSYLTVLFEEGLIQSLNYPENYSDKANCDWIFQASKHHLIKLSFQSLEIEESGDCTSDYVTVHSDVERKKEIARLCGYDVPTPVLSPSSIMLISFQSDENGTCRGFQATVSFIPKAVYPDLNISISEDESMFLET

SEQ ID NO: 9887 - protein, 565 aa, Homo sapiens; identical to SEQ ID NO: 9886

SEQ ID NO: 9888 - protein, 678 aa, Homo sapiens
MWKLLLWVGLVLVLKHHDGAAHKLVCYFTNWAHSRPGPASILPHDLDPFLCTHLIFAFASMNNNQIVAKDLQDEKILYPEFNKLKERNRELKTLLSIGGWNFGTSRFTTMLSTFANREKFIASVISLLRTHDFDGLDLFFLYPGLRGSPMHDRWTFLFLIEELLFAFRKEALLTMRPRLLLSAAVSGVPHIVQTSYDVRFLGRLLDFINVLSYDLHGSWERFTGHNSPLFSLPEDPKSSAYAMNYWRKLGAPSEKLIMGIPTYGRTFRLLKASKNGLQARAIGPASPGKYTKQEGFLAYFEICSFVWGAKKHWIDYQYVPYANKGKEWVGYDNAISFSYKAWFIRREHFGGAMVWTLDMDDVRGTFCGTGPFPLVYVLNDILVRAEFSSTSLPQFWLSSAVNSSSTDPERLAVTTAWTTDSKILPPGGEAGVTEIHGKCENMTITPRGTTVTPTKETVSLGKHTVALGEKTEITGAMTMTSVGHQSMTPGEKALTPVGHQSVTTGQKTLTSVGYQSVTPGEKTLTPVGHQSVTPVSHQSVSPGGTTMTPVHFQTETLRQNTVAPRRKAVAREKVTVPSRNISVTPEGQTMPLRGENLTSEVGTHPRMGNLGLQMEAENRMMLSSSPVIQLPEQTPLAFDNRFVPIYGNHSSVNSVTPQTSPLSLKKEIPENSAVDEEA

SEQ ID NO: 9889 - protein, 520 aa, Homo sapiens
MAALKLLSSGLRLCASARGSGATWYKGCVCSFSTSAHRHTKFYTDPVEAVKDIPDGATVLVGGFGLCGIPENLIDALLKTGVKGLTAVSNNAGVDNFGLGLLLRSKQIKRMVSSYVGENAEFERQYLSGELEVELTPQGTLAERIRAGGAGVPAFYTPTGYGTLVQEGGSPIKYNKDGSVAIASKPREVREFNGQHFILEEAITGDFALVKAWKADRAGNVIFRKSARNFNLPMCKAAETTVVEVEEIVDIGAFAPEDIHIPQIYVHRLIKGEKYEKRIERLSIRKEGDGEAKSAKPGDDVRERIIKRAALEFEDGMYANLGIGIPLLASNFISPNITVHLQSENGVLGLGPYPRQHEADADLINAGKETVTILPGASFFSSDESFAMIRGGHVDLTMLGAMQVSKYGDLANWMIPGKMVKGMGGAMDLVSSAKTKVVVTMEHSAKGNAHKIMEKCTLPLTGKQCVNRIITEKAVFDVDKKKGLTLIELWEGLTVDDVQKSTGCDFAVSPKLMPMQQIAN

SEQ ID NO: 9890 - protein, 123 aa, Homo sapiens
MLGAMQVSKYGDLANWMIPGKMVKGMGGAMDLVSSAKTKVVVTMEHSAKGNAHKIMEKCTLPLTGKQCVNRIITEKAVFDVDKKKGLTLIELWEGLTVDDVQKSTGCDFAVSPKLMPMQQIAN

SEQ ID NO: 9891 - protein, 123 aa, Homo sapiens; identical to SEQ ID NO: 9890

SEQ ID NO: 9892 - protein, 334 aa, Homo sapiens
MMVREFNGQHFILEEAITGDFALVKAWKADRAGNVIFRKSARNFNLPMCKAAETTVVEVEEIVDIGAFAPEDIHIPQIYVHRLIKGEKYEKRIERLSIRKEGDGEAKSAKPGDDVRERIIKRAALEFEDGMYANLGIGIPLLASNFISPNITVHLQSENGVLGLGPYPRQHEADADLINAGKETVTILPGASFFSSDESFAMIRGGHVDLTMLGAMQVSKYGDLANWMIPGKMVKGMGGAMDLVSSAKTKVVVTMEHSAKGNAHKIMEKCTLPLTGKQCVNRIITEKAVFDVDKKKGLTLIELWEGLTVDDVQKSTGCDFAVSPKLMPMQQIAN

SEQ ID NO: 9893 - protein, 517 aa, Homo sapiens
MAALRLLASVLGRGVPAGGSGLALSQGCARCFATSPRLRAKFYADPVEMVKDISDGATVMIGGFGLCGIPENLIAALLRTRVKDLQVVSSNVGVEDFGLGLLLAARQVRRIVCSYVGENTLCESQYLAGELELELTPQGTLAERIRAGGAGVPAFYTPTGYGTLVQEGGAPIRYTPDGHLALMSQPREVREFNGDHFLLERAIRADFALVKGWKADRAGNVVFRRSARNFNVPMCKAADVTAVEVEEIVEVGAFPPEDIHVPNIYVDRVIKGQKYEKRIERLTILKEEDGDAGKEEDARTRIIRRAALEFEDGMYANLGIGIPLLASNFISPSMTVHLHSENGILGLGPFPTEDEVDADLINAGKQTVTVLPGGCFFASDDSFAMIRGGHIQLTMLGAMQVSKYGDLANWMIPGKKVKGMGGAMDLVSSQKTRVVVTMQHCTKDNTPKIMEKCTMPLTGKRCVDRIITEKAVFDVHRKKELTLRELWEGLTVDDIKKSTGCAFAVSPNLRPMQQVAP

SEQ ID NO: 9894 - protein, 56 aa, Homo sapiens
MACAAVMIPGLLRCSVGAIRIEAASLRLTLSTLRHLTLTRLCQQLRCVELPVSHRQ

SEQ ID NO: 9895 - protein, 312 aa, Homo sapiens
MACAAVMIPGLLRCSVGAIRIEAASLRLTLSTLRHLTLTSIMKSKRKTDHMERTASVLRREIVSAAKVCGAASESPSVKSLRLLVADQDFSFKAGQWVDFFIPGVSVVGGFSICSSPRLLEQERVIELAVKYTNHPPALWVHNTCTLDCEVAVRVGGEFFFDPQPADASRNLVLIAGGVGINPLLSILRHAADLLREQANKRNGYEIGTIKLFYSAKNTSELLFKKNILDLVNEFPEKIACSLHVTKQTTQINAELKPYITEGRITEKEIRDHISKETLFYICGPPPMTDFFSKQLENNHVPKEHICFEKWW

SEQ ID NO: 9896 - protein, 312 aa, Homo sapiens; identical to SEQ ID NO: 9895

SEQ ID NO: 9897 - protein, 311 aa, Homo sapiens
MACAAVMIPGLLRCSVGAIRIEAASLRLTLSTLRHLTLTSIMKSKRKTDHMERTASVLRREIVSAAKVCGAASESPSVKSLRLLVADQDFSFKAGQWVDFFIPGVSVVGGFSICSSPRLLEQERVIELAVKYTNHPPALWVHNTCTLDCEVAVRVGGEFFFDPQPADASRNLVLIAGGVGINPLLSILRHAADLLREQANKRNGYEIGTIKLFYSAKNTSELLFKKNILDLVNEFPEKIACSLHVTKQTTQINAELKPYITGRITEKEIRDHISKETLFYICGPPPMTDFFSKQLENNHVPKEHICFEKWW

SEQ ID NO: 9898 - protein, 71 aa, Homo sapiens
MACAAVMIPGLLRCSVGAIRIEAASLRLTLSTLRHLTLTSIMKSKRKTDHMERTASVLRRESNLFHQGRKH

SEQ ID NO: 9899 - protein, 330 aa, Homo sapiens
MTPKISWTSKFSVCPESAMACAAVMIPGLLRCSVGAIRIEAASLRLTLSTLRHLTLTSIMKSKRKTDHMERTASVLRREIVSAAKVCGAASESPSVKSLRLLVADQDFSFKAGQWVDFFIPGVSVVGGFSICSSPRLLEQERVIELAVKYTNHPPALWVHNTCTLDCEVAVRVGGEFFFDPQPADASRNLVLIAGGVGINPLLSILRHAADLLREQANKRNGYEIGTIKLFYSAKNTSELLFKKNILDLVNEFPEKIACSLHVTKQTTQINAELKPYITEGRITEKEIRDHISKETLFYICGPPPMTDFFSKQLENNHVPKEHICFEKWW

SEQ ID NO: 9900 - protein, 330 aa, Homo sapiens; identical to SEQ ID NO: 9899

SEQ ID NO: 9901 - protein, 125 aa, Homo sapiens
MAGPSLACCLLGLLALTSACYIQNCPLGGKRAAPDLDVRKCLPCGPGGKGRCFGPNICCAEELGCFVGTAEALRCQEENYLPSPCQSGQKACGSGGRCAVLGLCCSPDGCHADPACDAEATFSQR

SEQ ID NO: 9902 - protein, 207 aa, Homo sapiens
MAVRALKLLTTLLAVVAAASQAEVESEAGWGMVTPDLLFAEGTAAYARGDWPGVVLSMERALRSRAALRALRLRCRTQCAADFPWELDPDWSPSPAQASGAAALRDLSFFGGLLRRAACLRRCLGPPAAHSLSEEMELEFRKRSPYNYLQVAYFKDLETQPHMQEFRLGVRLYSEEQPQEAVPHLEAALQEYFVAYEECRALCEGPY

SEQ ID NO: 9903 - protein, 804 aa, Homo sapiens
MAVRALKLLTTLLAVVAAASQAEVESEAGWGMVTPDLLFAEGTAAYARGDWPGVVLSMERALRSRAALRALRLRCRTQCAADFPWELDPDWSPSPAQASGAAALRDLSFFGGLLRRAACLRRCLGPPAAHSLSEEMELEFRKRSPYNYLQVAYFKINKLEKAVAAAHTFFVGNPEHMEMQQNLDYYQTMSGVKEADFKDLETQPHMQEFRLGVRLYSEEQPQEAVPHLEAALQEYFVAYEECRALCEGPYDYDGYNYLEYNADLFQAITDHYIQVLNCKQNCVTELASHPSREKPFEDFLPSHYNYLQFAYYNIGNYTQAVECAKTYLLFFPNDEVMNQNLAYYAAMLGEEHTRSIGPRESAKEYRQRSLLEKELLFFAYDVFGIPFVDPDSWTPEEVIPKRLQEKQKSERETAVRISQEIGNLMKEIETLVEEKTKESLDVSRLTREGGPLLYEGISLTMNSKLLNGSQRVVMDGVISDHECQELQRLTNVAATSGDGYRGQTSPHTPNEKFYGVTVFKALKLGQEGKVPLQSAHLYYNVTEKVRRIMESYFRLDTPLYFSYSHLVCRTAIEEVQAERKDDSHPVHVDNCILNAETLVCVKEPPAYTFRDYSAILYLNGDFDGGNFYFTELDAKTVTAEVQPQCGRAVGFSSGTENPHGVKAVTRGQRCAIALWFTLDPRHSERVRAARAGESSWCCGDPFPERPWFAFLFPKSHCQWLRHERSTWDTSSNALSLWSHCLVLPGPAVNGIQVGKEVKTGSDAEFLVPSLGPTSAVLFQRVGPAGKEMSLGPLRNLPCPLGSSS

SEQ ID NO: 9904 - protein, 736 aa, Homo sapiens
MAVRALKLLTTLLAVVAAASQAEVESEAGWGMVTPDLLFAEGTAAYARGDWPGVVLSMERALRSRAALRALRLRCRTQCAADFPWELDPDWSPSPAQASGAAALRDLSFFGGLLRRAACLRRCLGPPAAHSLSEEMELEFRKRSPYNYLQVAYFKINKLEKAVAAAHTFFVGNPEHMEMQQNLDYYQTMSGVKEADFKDLETQPHMQEFRLGVRLYSEEQPQEAVPHLEAALQEYFVAYEECRALCEGPYDYDGYNYLEYNADLFQAITDHYIQVLNCKQNCVTELASHPSREKPFEDFLPSHYNYLQFAYYNIGNYTQAVECAKTYLLFFPNDEVMNQNLAYYAAMLGEEHTRSIGPRESAKEYRQRSLLEKELLFFAYDVFGIPFVDPDSWTPEEVIPKRLQEKQKSERETAVRISQEIGNLMKEIETLVEEKTKESLDVSRLTREGGPLLYEGISLTMNSKLLNGSQRVVMDGVISDHECQELQRLTNVAATSGDGYRGQTSPHTPNEKFYGVTVFKALKLGQEGKVPLQSAHLYYNVTEKVRRIMESYFRLDTPLYFSYSHLVCRTAIEEVQAERKDDSHPVHVDNCILNAETLVCVKEPPAYTFRDYSAILYLNGDFDGGNFYFTELDAKTVTAEVQPQCGRAVGFSSGTENPHGVKAVTRGQRCAIALWFTLDPRHSERDRVQADDLVKMLFSPEEMDLSQEQPLDAQQGPPEPAQESLSGSESKPKDEL

SEQ ID NO: 9905 - protein, 697 aa, Homo sapiens
MAVRALKLLTTLLAVVAAASQAEVESEAGWGMVTPDLLFAEGTAAYARGDWPGVVLSMERALRSRAALRALRLRCRTQCAADFPWELDPDWSPSPAQASGAAALRDLSFFGGLLRRAACLRRCLGPPAAHSLSEEMELEFRKRSPYNYLQVAYFKINKLEKAVAAAHTFFVGNPEHMEMQQNLDYYQTMSGVKEADFKDLETQPHMQEFRLGVRLYSEEQPQEAVPHLEAALQEYFVAYEECRALCEGPYDYDGYNYLEYNADLFQAITDHYIQVLNCKQNCVTELASHPSREKPFEDFLPSHYNYLQFAYYNIGNYTQAVECAKTYLLFFPNDEVMNQNLAYYAAMLGEEHTRSIGPRESAKEYRQRSLLEKELLFFAYDVFGIPFVDPDSWTPEEVIPKRLQEKQKSERETAVRISQEIGNLMKEIETLVEEKTKESLDVSRLTREGGPLLYEGISLTMNSKLLNGSQRVVMDGVISDHECQELQRLTNVAATSGDGYRGQTSPHTPNEKFYGVTVFKALKLGQEGKVPLQSAHLYYNVTEKVRRIMESYFRLDTPLYFSYSHLVCRTAIEEVQAERKDDSHPVHVDNCILNAETLVCVKEPPAYTFRDYSAILYLNGDFDGGNFYFTELDAKTVTAEVQPQCGRAVGFSSGTENPHGVKAVTRGQRCAIALWFTLDPRHSERVRAARAGQGAGR

SEQ ID NO: 9906 - protein, 222 aa, Homo sapiens
  SITE 1: note = misc_feature - Xaa can be any naturally occurring amino acid
XTPEEVIPKRLQEKQKSERETAVRISQEIGNLMKEIETLVEEKTKESLDVSRLTREGGPLLYEGISLTMNSKLLNGSQRVVMDGVISDHECQELQRLTNVAATSGDGYRGQTSPHTPNEKFYGVTVFKALKFHVAGEASQSWWKAKRSKSHLTWMAAGKERTSAAGARRQSSSAECPPVLQRDGEGAAHHGVLLPPGYAPLLFLLSSGVPHCHRRGPGREEG

SEQ ID NO: 9907 - protein, 134 aa, Homo sapiens
MEMQQNIENYRATAGVEALQLVDREAKPHMESYNAGVKHYEADDFEMAIRHFEQALREYFVEDTECRTLCEGPQRFEEYEYLGYKAGLYEAIADHYMQVLVCQHECVRELATRPGRLSPIENFLPLHYDYLQFA

SEQ ID NO: 9908 - protein, 137 aa, Homo sapiens
MEMQQNIENYRATAGVEALQLVDREAKPHMESYNAGVKHYEADDFEMAIRHFEQALREYFVEDTECRTLCEGPQRFEEYEYLGYKAGLYEAIADHYMQVLVCQHECVRELATRPGRLSPIENFLPLHYDYLQFAYYR

SEQ ID NO: 9909 - protein, 527 aa, Homo sapiens
MEMQQNIENYRATAGVEALQLVDREAKPHMESYNAGVKHYEADDFEMAIRHFEQALREYFVEDTECRTLCEGPQRFEEYEYLGYKAGLYEAIADHYMQVLVCQHECVRELATRPGRLSPIENFLPLHYDYLQFAYYRVGEYVKALECAKAYLLCHPDDEDVLDNVDYYESLLDDSIDPASIEAREDLTMFVKRHKLESELIKSAAEGLGFSYTEPNYWIRYGGRQDENRVPSGVNVEGAEVHGFSMGKKLSPKIDRDLREGGPLLYENITFVYNSEQLNGTQRVLLDNVLSEEQCRELHSVASGIMLVGDGYRGKTSPHTPNEKFEGATVLKALKSGYEGRVPLKSARLFYDISEKARRIVESYFMLNSTLYFSYTHMVCRTALSGQQDRRNDLSHPIHADNCLLDPEANECWKEPPAYTFRDYSALLYMNDDFEGGEFIFTEMDAKTVTASIKPKCGRMISFSSGGENPHGVKAVTKGKRCAVALWFTLDPLYRELERIQADEVIAILDQEQQGKHELNINPKDEL

SEQ ID NO: 9910 - protein, 708 aa, Homo sapiens
MRERIWAPPLLLLLPLLLPPPLWGGPPDSPRRELELEPGPLQPFDLLYASGAAAYYSGDYERAVRDLEAALRSHRRLREIRTRCARHCAARHPLPPPPPGEGPGAELPLFRSLLGRARCYRSCETQRLGGPASRHRVSEDVRSDFQRRVPYNYLQRAYIKLNQLEKAVEAAHTFFVANPEHMEMQQNIENYRATAGVEALQLVDREAKPHMESYNAGVKHYEADDFEMAIRHFEQALREYFVEDTECRTLCEGPQRFEEYEYLGYKAGLYEAIADHYMQVLVCQHECVRELATRPGRLSPIENFLPLHYDYLQFAYYRVGEYVKALECAKAYLLCHPDDEDVLDNVDYYESLLDDSIDPASIEAREDLTMFVKRHKLESELIKSAAEGLGFSYTEPNYWIRYGGRQDENRVPSGVNVEGAEVHGFSMGKKLSPKIDRDLREGGPLLYENITFVYNSEQLNGTQRVLLDNVLSEEQCRELHSVASGIMLVGDGYRGKTSPHTPNEKFEGATVLKALKSGYEGRVPLKSARLFYDISEKARRIVESYFMLNSTLYFSYTHMVCRTALSGQQDRRNDLSHPIHADNCLLDPEANECWKEPPAYTFRDYSALLYMNDDFEGGEFIFTEMDAKTVTASIKPKCGRMISFSSGGENPHGVKAVTKGKRCAVALWFTLDPLYRELERIQADEVIAILDQEQQGKHELNINPKDEL

SEQ ID NO: 9911 - protein, 736 aa, Homo sapiens
MLRLLRPLLLLLLLPPPGSPEPPGLTQLSPGAPPQAPDLLYADGLRAYAAGAWAPAVALLREALRSQAALGRVRLDCGASCAADPGAALPAVLLGAPEPDSGPGPTQGSWERQLLRAALRRADCLTQCAARRLGPGGAARLRVGSALRDAFRRREPYNYLQRAYYQLKKLDLAAAAAHTFFVANPMHLQMREDMAKYRRMSGVRPQSFRDLETPPHWAAYDTGLELLGRQEAGLALPRLEEALQGSLAQMESCRADCEGPEEQQGAEEEEDGAASQGGLYEAIAGHWIQVLQCRQRCVGETATRPGRSFPVPDFLPNQLRRLHEAHAQVGNLSQAIENVLSVLLFYPEDEAAKRALNQYQAQLGEPRPGLGPREDIQRFILRSLGEKRQLYYAMEHLGTSFKDPDPWTPAALIPEALREKLREDQEKRPWDHEPVKPKPLTYWKDVLLLEGVTLTQDSRQLNGSERAVLDGLLTPAECGVLLQLAKDAAGAGARSGYRGRRSPHTPHERFEGLTVLKAAQLARAGTVGSQGAKLLLEVSERVRTLTQAYFSPERPLHLSFTHLVCRSAIEGEQEQRMDLSHPVHADNCVLDPDTGECWREPPAYTYRDYSGLLYLNDDFQGGDLFFTEPNALTVTARVRPRCGRLVAFSSGVENPHGVWAVTRGRRCALALWHTWAPEHREQEWIEAKELLQESQEEEEEEEEEMPSKDPSPEPPSRRHQRVQDKTGRAPRVREEL

SEQ ID NO: 9912 - protein, 85 aa, Homo sapiens
MARVAWGLLWLLLGSAGAQYEKYSFRGFPPEDLMPLAAAYGHALEQYEGESWRESARYLEAALRLHRLLRDSEAFCHANCSGPAP

SEQ ID NO: 9913 - protein, 437 aa, Homo sapiens
MARVAWGLLWLLLGSAGAQYEKYSFRGFPPEDLMPLAAAYGHALEQYEGESWRESARYLEAALRLHRLLRDSEAFCHANCSGPAPAAKPDPDGGRADEWACELRLFGRVLERAACLRRCKRTLPAFQVPYPPRQLLRDFQSRLPYQYLHYALFKANRLEKAVAAAYTFLQRNPKHELTAKYLNYYQGMLDVADESLTDLEAQPYEAVFLRAVKLYNSGDFRSSTEDMERALSEYLAVFARCLAGCEGAHEQVDFKDFYPAIADLFAESLQCKVDCEANLTPNVGGYFVDKFVATMYHYLQFAYYKLNDVRQAARSAASYMLFDPKDSVMQQNLVYYRFHRARWGLEEEDFQPREEAMLYHNQTAELRELLEFTHMYLQSDDEMELEETEPPLEPEDALSDAEFEGEGDYEEGMYADWWQEPDAKGDEAEAEPEPELA

SEQ ID NO: 9914 - protein, 437 aa, Homo sapiens; identical to SEQ ID NO: 9913

SEQ ID NO: 9915 - protein, 221 aa, Homo sapiens
  SITE 1: note = misc_feature - Xaa can be any naturally occurring amino acid
XKRTLPAFQVPYPPRQLLRDFQSRLPYQYLHYALFKANRLEKAVAAAYTFLQRNPKHELTAKYLNYYQGMLDVADESLTDLEAQPYEAVFLRAVKLYNSGDFRSSTEDMERALSEYLAVFARCLAGCEGAHEQVDFKDFYPAIAVNDVRQAARSAASYMLFDPKDSVMQQNLVYYRFHRARWGLEEEDFQPREEAMLYHNQTAELRELLEFTHMYLQSDDE

SEQ ID NO: 9916 - protein, 73 aa, Homo sapiens
  SITE 1: note = misc_feature - Xaa can be any naturally occurring amino acid
XLRELLEFTHMYLQSDDEMELEETEPPLEPEDALSDAEFEGEGDYEEGMYADWWQEPDAKGDEAEAEPEPELA

SEQ ID NO: 9917 - protein, 534 aa, Homo sapiens
MIWYILIIGILLPQSLAHPGFFTSIGQMTDLIHTEKDLVTSLKDYIKAEEDKLEQIKKWAEKLDRLTSTATKDPEGFVGHPVNAFKLMKRLNTEWSELENLVLKDMSDGFISNLTIQRQYFPNDEDQVGAAKALLRLQDTYNLDTDTISKGNLPGVKHKSFLTAEDCFELGKVAYTEADYYHTELWMEQALRQLDEGEISTIDKVSVLDYLSYAVYQQGDLDKALLLTKKLLELDPEHQRANGNLKYFEYIMAKEKDVNKSASDDQSDQKTTPKKKGVAVDYLPERQKYEMLCRGEGIKMTPRRQKKLFCRYHDGNRNPKFILAPAKQEDEWDKPRIIRFHDIISDAEIEIVKDLAKPRLSRATVHDPETGKLTTAQYRVSKSAWLSGYENPVVSRINMRIQDLTGLDVSTAEELQVANYGVGGQYEPHFDFARKDEPDAFKELGTGNRIATWLFYMSDVSAGGATVFPEVGASVWPKKGTAVFWYNLFASGEGDYSTRHAACPVLVGNKWVSNKWLHERGQEFRRPCTLSELE

SEQ ID NO: 9918 - protein, 534 aa, Homo sapiens
MIWYILIIGILLPQSLAHPGFFTSIGQMTDLIHTEKDLVTSLKDYIKAEEDKLEQIKKWAEKLDRLTSTATKDPEGFVGHPVNAFKLMKRLNTEWSELENLVLKDMSDGFISNLTIQRQYFPNDEDQVGAAKALLRLQDTYNLDTDTISKGNLPGVKHKSFLTAEDCFELGKVAYTEADYYHTELWMEQALRQLDEGEISTIDKVSVLDYLSYAVYQQGDLDKALLLTKKLLELDPEHQRANGNLKYFEYIMAKEKDVNKSASDDQSDQKTTPKKKGVAVDYLPERQKYEMLCRGEGIKMTPRRQKKLFCRYHDGNRNPKFILAPAKQEDEWDKPRIIRFHDIISDAEIEIVKDLAKPRLRRATISNPITGDLETVHYRISKSAWLSGYENPVVSRINMRIQDLTGLDVSTAEELQVANYGVGGQYEPHFDFARKDEPDAFKELGTGNRIATWLFYMSDVSAGGATVFPEVGASVWPKKGTAVFWYNLFASGEGDYSTRHAACPVLVGNKWVSNKWLHERGQEFRRPCTLSELE

SEQ ID NO: 9919 - protein, 534 aa, Homo sapiens; identical to SEQ ID NO: 9917

SEQ ID NO: 9920 - protein, 516 aa, Homo sapiens
MIWYILIIGILLPQSLAHPGFFTSIGQMTDLIHTEKDLVTSLKDYIKAEEDKLEQIKKWAEKLDRLTSTATKDPEGFVGHPVNAFKLMKRLNTEWSELENLVLKDMSDGFISNLTIQRQYFPNDEDQVGAAKALLRLQDTYNLDTDTISKGNLPGVKHKSFLTAEDCFELGKVAYTEADYYHTELWMEQALRQLDEGEISTIDKVSVLDYLSYAVYQQGDLDKALLLTKKLLELDPEHQRANGNLKYFEYIMAKEKDVNKSASDDQSDQKTTPKKKGVAVDYLPERQKYEMLCRGEGIKMTPRRQKKLFCRYHDGNRNPKFILAPAKQEDEWDKPRIIRFHDIISDAEIEIVKDLAKPRLSRATVHDPETGKLTTAQYRVSKSAWLSGYENPVVSRINMRIQDLTGLDVSTAEELQKDEPDAFKELGTGNRIATWLFYMSDVSAGGATVFPEVGASVWPKKGTAVFWYNLFASGEGDYSTRHAACPVLVGNKWVSNKWLHERGQEFRRPCTLSELE

SEQ ID NO: 9921 - protein, 534 aa, Homo sapiens; identical to SEQ ID NO: 9918

SEQ ID NO: 9922 - protein, 50 aa, Homo sapiens
MKLWVSALLMAWFGVLSCVQAEFFTSIGHMTDLIYAEKELVQSLKEYILV

SEQ ID NO: 9923 - protein, 101 aa, Homo sapiens
MKLWVSALLMAWFGVLSCVQAEFFTSIGHMTDLIYAEKELVQSLKEYILVEEAKLSKIKSWANKMEALTSKSAADAEGYLAHPVNAYKLVKRLNTDWPALE

SEQ ID NO: 9924 - protein, 114 aa, Homo sapiens
MKLWVSALLMAWFGVLSCVQAEFFTSIGHMTDLIYAEKELVQSLKEYILVEEAKLSKIKSWANKMEALTSKSAADAEGYLAHPVNAYKLVKRLNTDWPALEDLVLQDSAAGFIA

SEQ ID NO: 9925 - protein, 147 aa, Homo sapiens
MKLWVSALLMAWFGVLSCVQAEFFTSIGHMTDLIYAEKELVQSLKEYILVEEAKLSKIKSWANKMEALTSKSAADAEGYLAHPVNAYKLVKRLNTDWPALEDLVLQDSAAGFIANLSVQRQFFPTDEDEIGAAKALMRLQDTYRLDP

SEQ ID NO: 9926 - protein, 153 aa, Homo sapiens
MKLWVSALLMAWFGVLSCVQAEFFTSIGHMTDLIYAEKELVQSLKEYILVEEAKLSKIKSWANKMEALTSKSAADAEGYLAHPVNAYKLVKRLNTDWPALEDLVLQDSAAGFIANLSVQRQFFPTDEDEIGAAKALMRLQDTYRLDPGTISRG

SEQ ID NO: 9927 - protein, 167 aa, Homo sapiens
MKLWVSALLMAWFGVLSCVQAEFFTSIGHMTDLIYAEKELVQSLKEYILVEEAKLSKIKSWANKMEALTSKSAADAEGYLAHPVNAYKLVKRLNTDWPALEDLVLQDSAAGFIANLSVQRQFFPTDEDEIGAAKALMRLQDTYRLDPGTISRGELPGTKYQAMLSVD

SEQ ID NO: 9928 - protein, 184 aa, Homo sapiens
MKLWVSALLMAWFGVLSCVQAEFFTSIGHMTDLIYAEKELVQSLKEYILVEEAKLSKIKSWANKMEALTSKSAADAEGYLAHPVNAYKLVKRLNTDWPALEDLVLQDSAAGFIANLSVQRQFFPTDEDEIGAAKALMRLQDTYRLDPGTISRGELPGTKYQAMLSVDDCFGMGRSAYNEGDYYH

SEQ ID NO: 9929 - protein, 204 aa, Homo sapiens
MKLWVSALLMAWFGVLSCVQAEFFTSIGHMTDLIYAEKELVQSLKEYILVEEAKLSKIKSWANKMEALTSKSAADAEGYLAHPVNAYKLVKRLNTDWPALEDLVLQDSAAGFIANLSVQRQFFPTDEDEIGAAKALMRLQDTYRLDPGTISRGELPGTKYQAMLSVDDCFGMGRSAYNEGDYYHTVLWMEQVLKQLDAGEEATT

SEQ ID NO: 9930 - protein, 535 aa, Homo sapiens
MKLWVSALLMAWFGVLSCVQAEFFTSIGHMTDLIYAEKELVQSLKEYILVEEAKLSKIKSWANKMEALTSKSAADAEGYLAHPVNAYKLVKRLNTDWPALEDLVLQDSAAGFIANLSVQRQFFPTDEDEIGAAKALMRLQDTYRLDPGTISRGELPGTKYQAMLSVDDCFGMGRSAYNEGDYYHTVLWMEQVLKQLDAGEEATTTKSQVLDYLSYAVFQLGDLHRALELTRRLLSLDPSHERAGGNLRYFEQLLEEEREKTLTNQTEAELATPEGIYERPVDYLPERDVYESLCRGEGVKLTPRRQKRLFCRYHHGNRAPQLLIAPFKEEDEWDSPHIVRYYDVMSDEEIERIKEIAKPKLARATVRDPKTGVLTVASYRVSKSSWLEEDDDPVVARVNRRMQHITGLTVKTAELLQVANYGVGGQYEPHFDFSRNDERDTFKHLGTGNRVATFLNYMSDVEAGGATVFPDLGAAIWPKKGTAVFWYNLLRSGEGDYRTRHAACPVLVGCKWVSNKWFHERGQEFLRPCGSTEVD

SEQ ID NO: 9931 - protein, 533 aa, Homo sapiens
MKLWVSALLMAWFGVLSCVQAEFFTSIGHMTDLIYAEKELVQSLKEYILVEEAKLSKIKSWANKMEALTSKSAADAEGYLAHPVNAYKLVKRLNTDWPALEDLVLQDSAAGFIANLSVQRQFFPTDEDEIGAAKALMRLQDTYRLDPGTISRGELPGTKYQAMLSVDDCFGMGRSAYNEGDYYHTVLWMEQVLKQLDAGEEATTTKSQVLDYLSYAVFQLGDLHRALELTRRLLSLDPSHERAGGNLRYFEQLLEEEREKTLTNQTEAELATPEGIYERPVDYLPERDVYESLCRGEGVKLTPRRQKRLFCRYHHGNRAPQLLIAPFKEEDEWDSPHIVRYYDVMSDEEIERIKEIAKPKLARATVRDPKTGVLTVASYRVSKSSWLEEDDDPVVARVNRRMQHITGLTVKTAELLQVANYGVGGQYEPHFDFSRRPFDSGLKTEGNRLATFLNYMSDVEAGGATVFPDLGAAIWPKKGTAVFWYNLLRSGEGDYRTRHAACPVLVGCKWVSNKWFHERGQEFLRPCGSTEVD

SEQ ID NO: 9932 - protein, 533 aa, Homo sapiens; identical to SEQ ID NO: 9931

SEQ ID NO: 9933 - protein, 533 aa, Homo sapiens; identical to SEQ ID NO: 9931

SEQ ID NO: 9934 - protein, 535 aa, Homo sapiens; identical to SEQ ID NO: 9930

SEQ ID NO: 9935 - protein, 535 aa, Homo sapiens; identical to SEQ ID NO: 9930

SEQ ID NO: 9936 - protein, 236 aa, Homo sapiens
MKRQLVTNSFLHHLLIGQKRPRNAPRTLPSVTMKLWVSALLMAWFGVLSCVQAEFFTSIGHMTDLIYAEKELVQSLKEYILVEEAKLSKIKSWANKMEALTSKSAADAEGYLAHPVNAYKLVKRLNTDWPALEDLVLQDSAAGFIANLSVQRQFFPTDEDEIGAAKALMRLQDTYRLDPGTISRGELPGTKYQAMLSVDDCFGMGRSAYNEGDYYHTVLWMEQVLKQLDAGEEATT

SEQ ID NO: 9937 - protein, 104 aa, Homo sapiens
MGPGARLAALLAVLALGTGDPERAAARGDTFSALTSVARALAPERRLLGLLRRYLRGEEARLRDLTRFYDKVLSLHEDSTTPVANPLLAFTLIKRLQSDWRNVL

SEQ ID NO: 9938 - protein, 544 aa, Homo sapiens
MGPGARLAALLAVLALGTGDPERAAARGDTFSALTSVARALAPERRLLGLLRRYLRGEEARLRDLTRFYDKVLSLHEDSTTPVANPLLAFTLIKRLQSDWRNVVHSLEASENIRALKDGYEKVEQDLPAFEDLEGAARALMRLQDVYMLNVKGLARGVFQRVTGSAITDLYSPKRLFSLTGDDCFQVGKVAYDMGDYYHAIPWLEEAVSLFRGSYGEWKTEDEASLEDALDHLAFAYFRAGNVSCALSLSREFLLYSPDNKRMARNVLKYERLLAESPNHVVAEAVIQRPNIPHLQTRDTYEGLCQTLGSQPTLYQIPSLYCSYETNSNAYLLLQPIRKEVIHLEPYIALYHDFVSDSEAQKIRELAEPWLQRSVVASGEKQLQVEYRISKSAWLKDTVDPKLVTLNHRIAALTGLDVRPPYAEYLQVVNYGIGGHYEPHFDHATSPSSPLYRMKSGNRVATFMIYLSSVEAGGATAFIYANLSVPVVRNAALFWWNLHRSGEGDSDTLHAGCPVLVGDKWVANKWIHEYGQEFRRPCSSSPED

SEQ ID NO: 9939 - protein, 604 aa, Homo sapiens
MGPGARLAALLAVLALGTGDPERAAARGDTFSALTSVARALAPERRLLGLLRRYLRGEEARLRDLTRFYDKVLSLHEDSTTPVANPLLAFTLIKRLQSDWRNVVHSLEASENIRALKDGYEKVEQDLPAFEDLEGAARALMRLQDVYMLNVKGLARGVFQRVTGSAITDLYSPKRLFSLTGDDCFQVGKVAYDMGDYYHAIPWLEEAVSLFRGSYGEWKTEDEASLEDALDHLAFAYFRAGNVSCALSLSREFLLYSPDNKRMARNVLKYERLLAESPNHVVAEAVIQRPNIPHLQTRDTYEGLCQTLGSQPTLYQIPSLYCSYETNSNAYLLLQPIRKEVIHLEPYIALYHDFVSDSEAQKIRELAEPWLQRSVVASGEKQLQVEYRISKSAWLKDTVDPKLVTLNHRIAALTGLDVRPPYAEYLQVVNYGIGGHYEPHFDHATSPSSPLYRMKSGNRVATFMIYLSSVEAGGATAFIYANLSVPVVRHCFGGTCTGVVKGTVTHFMLAVLSWWEISGWPTSGYMSMDRNSADPAAPALKTELLAERSWWSPVAFQRSQEPKAGVGEEKAEQPPGRRPCQLCLCLANQRQGRGCYQGTLRMYI

SEQ ID NO: 9940 - protein, 257 aa, Homo sapiens
MGPGARLAALLAVLALGTGDPERAAARGDTFSALTSVARALAPERRLLGLLRRYLRGEEARLRDLTRFYDKVLSLHEDSTTPVANPLLAFTLIKRLQSDWRNVVHSLEASENIRALKDGYEKVEQDLPAFEDLEGAARALMRLQDVYMLNVKGLARGVFQRVTGSAITDLYSPKRLFSLTGDDCFQVGKVAYDMGDYYHAIPWLEEAVSLFRGSYGEWKTEDEASLEDALDHLAFAYFRAGNVSCALSLSREFLLYR

SEQ ID NO: 9941 - protein, 61 aa, Homo sapiens
SVPVVRNAALFWWNLHRSGEGDSDTLHAGCPVLVGDKWVANKWIHEYGQEFRRPCSSSPED

SEQ ID NO: 9942 - protein, 200 aa, Homo sapiens
METRLPPRNIQDVESDSAKQFLQAAEAIDDIPFGITSNSDVFSKYQLDKDGVVLFKKFDEGRNNFEGEVTKENLLDFIKHNQLPLVIEFTEQTAPKIFGGEIKTHILLFLPKSVSDYDGKLSNFKTAAESFKGKILFIFIDSDHTDNQRILEFFGLKKEECPAVRLITLEEEMTKYKPESEELTAERITEFCHRFLEGKI

SEQ ID NO: 9943 - protein, 117 aa, Homo sapiens
METRLPPRNIQFDEGRNNFEGEVTKENLLDFIKHNQLPLVIEFTEQTAPKIFGGEIKTHILLFLPKSVSDYDGKLSNFKTAAESFKGKILFIFIDSDHTDNQRILEFFGLKKEECPA

SEQ ID NO: 9944 - protein, 54 aa, Homo sapiens
MLRRALLCLAVAALVRADAPEEEDHVLVLRKSNFAEALAAHKCPLVWPLQGSGP

SEQ ID NO: 9945 - protein, 156 aa, Homo sapiens
MLRRALLCLAVAALVRADAPEEEDHVLVLRKSNFAEALAAHKYLLVDATEESDLAQQYGVRGYPTIKFFRNGDTASPKEYTAGREADDIVNWLKKRTGPAATTLPDGAAAESLVESSEVAVIGFFKDVESDSAKQFLQAAEAIDDIPFGITSNSDV

SEQ ID NO: 9946 - protein, 208 aa, Homo sapiens
MLRRALLCLAVAALVRADAPEEEDHVLVLRKSNFAEALAAHKYLLVEFSGREADDIVNWLKKRTGPAATTLPDGAAAESLVESSEVAVIGFFKDVESDSAKQFLQAAEAIDDIPFGITSNSDVFSKYQLDKDGVVLFKKFDEGRNNFEGEVTKENLLDFIKHNQLPLVIEFTEQTAPKIFGGEIKTHILLFLPKSVSDYDGKLSNFKT

SEQ ID NO: 9947 - protein, 148 aa, Homo sapiens
MLRRALLCLAVAALVRADAPEEEDHVLVLRKSNFAEALAAHKYLLVEFYAPWCGHCKALAPEYAKAAGKLKAEGSEIRLAKMDSTANEVEAVKVHSFPTLKFFPASADRTVIDYNGERTLDGFKKFLESGGQDGAGDDDDLEDLEEAE

SEQ ID NO: 9948 - protein, 188 aa, Homo sapiens
MLRRALLCLAVAALVRADAPEEEDHVLVLRKSNFAEALAAHKYLLVEFYAPWCGHCKALAPEYAKAAGKLKAEGSEIRLAKVDATEESDLAQQYGVRGYPTIKFFRNGDTASPKEYTAAESLVESSEVAVIGFFKDVESDSAKQFLQAAEAIDDIPFGITSNSDVFSKYQLDKDGVVLFKKFDEGRNN

SEQ ID NO: 9949 - protein, 508 aa, Homo sapiens
MLRRALLCLAVAALVRADAPEEEDHVLVLRKSNFAEALAAHKYLLVEFYAPWCGHCKALAPEYAKAAGKLKAEGSEIRLAKVDATEESDLAQQYGVRGYPTIKFFRNGDTASPKEYTAGREADDIVNWLKKRTGPAATTLPDGAAAESLVESSEVAVIGFFKDVESDSAKQFLQAAEAIDDIPFGITSNSDVFSKYQLDKDGVVLFKKFDEGRNNFEGEVTKENLLDFIKHNQLPLVIEFTEQTAPKIFGGEIKTHILLFLPKSVSDYDGKLSNFKTAAESFKGKILFIFIDSDHTDNQRILEFFGLKKEECPAVRLITLEEEMTKYKPESEELTAERITEFCHRFLEGKIKPHLMSQELPEDWDKQPVKVLVGKNFEDVAFDEKKNVFVEFYAPWCGHCKQLAPIWDKLGETYKDHENIVIAKMDSTANEVEAVKVHSFPTLKFFPASADRTVIDYNGERTLDGFKKFLESGGQDGAGDDDDLEDLEEAEEPDMEEDDDQKAVKDEL

SEQ ID NO: 9950 - protein, 464 aa, Homo sapiens
MLRRALLCLAVAALVRADAPEEEDHVLVLRKSNFAEALAAHKYLLVEFYAPWCGHCKALAPEYAKAAGKLKAEGSEIRLAKVDATEESDLAQQYGVRGYPTIKFFRNGDTASPKEYTGDVESDSAKQFLQAAEAIDDIPFGITSNSDVFSKYQLDKDGVVLFKKFDEGRNNFEGEVTKENLLDFIKHNQLPLVIEFTEQTAPKIFGGEIKTHILLFLPKSVSDYDGKLSNFKTAAESFKGKILFIFIDSDHTDNQRILEFFGLKKEECPAVRLITLEEEMTKYKPESEELTAERITEFCHRFLEGKIKPHLMSQELPEDWDKQPVKVLVGKNFEDVAFDEKKNVFVEFYAPWCGHCKQLAPIWDKLGETYKDHENIVIAKMDSTANEVEAVKVHSFPTLKFFPASADRTVIDYNGERTLDGFKKFLESGGQDGAGDDDDLEDLEEAEEPDMEEDDDQKAVKDEL

SEQ ID NO: 9951 - protein, 166 aa, Homo sapiens
MLRRALLCLAVAALVRADAPEEEDHVLVLRKSNFAEALAAHKYLLVEFYAPWCGHCKALAPEYAKAAGKLKAEGSEIRLAKVDATEESDLAQQYGVRGYPTIKFFRNGDTASPKEYTGFDEGRNNFEGEVTKENLLDFIKHNQLPLVIEFTEQTAPKIFGGEIKTH

SEQ ID NO: 9952 - protein, 106 aa, Homo sapiens
MLRRALLCLAVAALVRADAPEEEDHVLVLRKSNFAEALAAHKYLLVEFYAPWCGHCKALAPEYAKAAGKLKAEGSEIRPPRRSLSPVWEGRSRTGHGHSVPPAVSP

SEQ ID NO: 9953 - protein, 274 aa, Homo sapiens
  SITE 1: note = misc_feature - Xaa can be any naturally occurring amino acid
XFEGEVTKENLLDFIKHNQLPLVIEFTEQSVSDYDGKLSNFKTAAESFKGKILFIFIDSDHTDNQRILEFFGLKKEECPAVRLITLEEEMTKYKPESEELTAERITEFCHRFLEGKIKPHLMSQELPEDWDKQPVKVLVGKNFEDVAFDEKKNVFVEFYAPWCGHCKQLAPIWDKLGETYKDHENIVIAKMDSTANEVEAVKVHSFPTLKFFPASADRTVIDYNGERTLDGFKKFLESGGQDGAGDDDDLEDLEEAEEPDMEEDDDQKAVKDEL

SEQ ID NO: 9954 - protein, 132 aa, Homo sapiens
LMATLKAPLRVHITSLLPTPEDNLEIVLHRWENNSCVEKKVLGEKTENPKKFKINYTVANEATLLDTDYDNFLFLCLQDTTTPIQSMMCQYLARVLVEDDEIMQGFIRAFRPLPRHLWYLLDLKQMEEPCRF

SEQ ID NO: 9955 - protein, 143 aa, Homo sapiens
MLCLLLTLGVALVCGVPAMDIPQTKQDLELPKLAGTWHSMAMATNNISLMATLKAPLRVHITSLLPTPEDNLEIVLHRWENNSCVEKKVLGEKTENPKKFKINSRVLVEDDEIMQGFIRAFRPLPRHLWYLLDLKQMEEPCRF

SEQ ID NO: 9956 - protein, 180 aa, Homo sapiens
MLCLLLTLGVALVCGVPAMDIPQTKQDLELPKLAGTWHSMAMATNNISLMATLKAPLRVHITSLLPTPEDNLEIVLHRWENNSCVEKKVLGEKTENPKKFKINYTVANEATLLDTDYDNFLFLCLQDTTTPIQSMMCQYLARVLVEDDEIMQGFIRAFRPLPRHLWYLLDLKQMEEPCRF

SEQ ID NO: 9957 - protein, 180 aa, Homo sapiens; identical to SEQ ID NO: 9956

SEQ ID NO: 9958 - protein, 180 aa, Homo sapiens; identical to SEQ ID NO: 9956

SEQ ID NO: 9959 - protein, 169 aa, Homo sapiens
MLCLLLTLGVALVCGVPAMDIPQTKQDLELPKLAGTWHSMAMATNNISLMATLKAPLRVHITSLLPTPEDNLEIVLHRWENNSCVEKKVLGEKTENPKKFKINYTVANEATLLDTDYDNFLFLCLQDTTTPIQSMMCQYLESWWRTMRSCRDSSGLSGPCPGTYGTCWT

SEQ ID NO: 9960 - protein, 33 aa, Homo sapiens
  SITE 1: note = misc_feature - Xaa can be any naturally occurring amino acid
XEIMQGFIRAFRPLPRHLWYLLDLKQMEEPCRF

SEQ ID NO: 9961 - protein, 126 aa, Homo sapiens
  SITE 1: note = misc_feature - Xaa can be any naturally occurring amino acid
XPLRVHITSLLPTPEDNLEIVLHRWENNSCVEKKVLGEKTENPKKFKINYTVANEATLLDTDYDNFLFLCLQDTTTPIQSMMCQYLARVLVEDDEIMQGFIRAFRPLPRHLWYLLDLKQMEEPCRF

SEQ ID NO: 9962 - protein, 131 aa, Homo sapiens
  SITE 1: note = misc_feature - Xaa can be any naturally occurring amino acid
XVPAMDIPQTKQDLELPKAPLRVHITSLLPTPEDNLEIVLHRWENNSCVEKKVLGEKTENPKKFKINCKASGAPQLSWKPQGPRTDPASSTARVLVEDDEIMQGFIRAFRPLPRHLWYLLDLKQMEEPCRF

SEQ ID NO: 9963 - protein, 25 aa, Homo sapiens
MAGRVPSLLVLLVFPSSCLAFRSPL

SEQ ID NO: 9964 - protein, 28 aa, Homo sapiens
MAGRVPSLLVLLVFPSSCLAFRSPLSVF

SEQ ID NO: 9965 - protein, 29 aa, Homo sapiens
MAGRVPSLLVLLVFPSSCLAFRSPLSVFK

SEQ ID NO: 9966 - protein, 42 aa, Homo sapiens
MAGRVPSLLVLLVFPSSCLAFRSPLSVFKRFKETTRPFSNEC

SEQ ID NO: 9967 - protein, 53 aa, Homo sapiens
MAGRVPSLLVLLVFPSSCLAFRSPLSVFKRFKETTRPFSNECLGTTRPVVPID

SEQ ID NO: 9968 - protein, 68 aa, Homo sapiens
MAGRVPSLLVLLVFPSSCLAFRSPLSVFKRFKETTRPFSNECLGTTRPVVPIDSSDFALDIRMPGVTP

SEQ ID NO: 9969 - protein, 175 aa, Homo sapiens
MAGRVPSLLVLLVFPSSCLAFRSPLSVFKRFKETTRPFSNECLGTTRPVVPIDSSDFALDIRMPGVTPKQLTSSLEPAWILSITCYFLDAICLHPLEVTGFVMKEPVQIKPIFCMPGREMLPLPGSPKVLDSELEERLEVNTLYYRYTMGILVLLEIITRTVLVCPYTSHVCHSL

SEQ ID NO: 9970 - protein, 974 aa, Homo sapiens
MAGRVPSLLVLLVFPSSCLAFRSPLSVFKRFKETTRPFSNECLGTTRPVVPIDSSDFALDIRMPGVTPKQSDTYFCMSMRIPVDEEAFVIDFKPRASMDTVHHMLLFGCNMPSSTGSYWFCDEGTCTDKANILYAWARNAPPTRLPKGVGFRVGGETGSKYFVLQVHYGDISAFRDNNKDCSGVSLHLTRLPQPLIAGMYLMMSVDTVIPAGEKVVNSDISCHYKNYPMHVFAYRVHTHHLGKVVSGYRVRNGQWTLIGRQSPQLPQAFYPVGHPVDVSFGDLLAARCVFTGEGRTEATHIGGTSSDEMCNLYIMYYMEAKHAVSFMTCTQNVAPDMFRTIPPEANIPIPVKSDMVMMHEHHKETEYKDKIPLLQQPKREEEEVLDQGDFYSLLSKLLGEREDVVHVHKYNPTEKAESESDLVAEIANVVQKKDLGRSDAREGAEHERGNAILVRDRIHKFHRLVSTLRPPESRVFSLQQPPPGEGTWEPEHTGDFHMEEALDWPGVYLLPGQVSGVALDPKNNLVIFHRGDHVWDGNSFDSKFVYQQIGLGPIEEDTILVIDPNNAAVLQSSGKNLFYLPHGLSIDKDGNYWVTDVALHQVFKLDPNNKEGPVLILGRSMQPGSDQNHFCQPTDVAVDPGTGAIYVSDGYCNSRIVQFSPSGKFITQWGEESSGSSPLPGQFTVPHSLALVPLLGQLCVADRENGRIQCFKTDTKEFVREIKHSSFGRNVFAISYIPGLLFAVNGKPHFGDQEPVQGFVMNFSNGEIIDIFKPVRKHFDMPHDIVASEDGTVYIGDAHTNTVWKFTLTEKLEHRSVKKAGIEVQEIKEAEAVVETKMENKPTSSELQKMQEKQKLIKEPGSGVPVVLITTLLVIPVVVLLAIAIFIRWKKSRAFGADSEHKLETSSGRVLGRFRGKGSGGLNLGNFFASRKGYSRKGFDRLSTEGSDQEKEDDGSESEEEYSAPLPALAPSSS

SEQ ID NO: 9971 - protein, 887 aa, Homo sapiens
MAGRVPSLLVLLVFPSSCLAFRSPLSVFKRFKETTRPFSNECLGTTRPVVPIDSSDFALDIRMPGVTPKQSDTYFCMSMRIPVDEEAFVIDFKPRASMDTVHHMLLFGCNMPSSTGSYWFCDEGTCTDKANILYAWARNAPPTRLPKGVGFRVGGETGSKYFVLQVHYGDISAFRDNNKDCSGVSLHLTRLPQPLIAGMYLMMSVDTVIPAGEKVVNSDISCHYKNYPMHVFAYRVHTHHLGKVVSGYRVRNGQWTLIGRQSPQLPQAFYPVGHPVDVSFGDLLAARCVFTGEGRTEATHIGGTSSDEMCNLYIMYYMEAKHAVSFMTCTQNVAPDMFRTIPPEANIPIPVKSDMVMMHEHHKETEYKDKIPLLQQPKREEEEVLDQGDFYSLLSKLLGEREDVVHVHKYNPTEKAESESDLVAEIANVVQKKDLGRSDAREGAEHERGNAILVRDRIHKFHRLVSTLRPPESRVFSLQQPPPGEGTWEPEHTGDFHMEEALDWPGVYLLPGQVSGVALDPKNNLVIFHRGDHVWDGNSFDSKFVYQQIGLGPIEEDTILVIDPNNAAVLQSSGKNLFYLPHGLSIDKDGNYWVTDVALHQVFKLDPNNKEGPVLILGRSMQPGSDQNHFCQPTDVAVDPGTGAIYVSDGYCNSRIVQFSPSGKFITQWGEESSGSSPLPGQFTVPHSLALVPLLGQLCVADRENGRIQCFKTDTKEFVREIKHSSFGRNVFAISYIPGLLFAVNGKPHFGDQEPVQGFVMNFSNGEIIDIFKPVRKHFDMPHDIVASEDGTVYIGDAHTNTVWKFTLTEKLEHRSVKKAGIEVQEIKGKGSGGLNLGNFFASRKGYSRKGFDRLSTEGSDQEKEDDGSESEEEYSAPLPALAPSSS

SEQ ID NO: 9972 - protein, 866 aa, Homo sapiens
MAGRVPSLLVLLVFPSSCLAFRSPLSVFKRFKETTRPFSNECLGTTRPVVPIDSSDFALDIRMPGVTPKQSDTYFCMSMRIPVDEEAFVIDFKPRASMDTVHHMLLFGCNMPSSTGSYWFCDEGTCTDKANILYAWARNAPPTRLPKGVGFRVGGETGSKYFVLQVHYGDISAFRDNNKDCSGVSLHLTRLPQPLIAGMYLMMSVDTVIPAGEKVVNSDISCHYKNYPMHVFAYRVHTHHLGKVVSGYRVRNGQWTLIGRQSPQLPQAFYPVGHPVDVSFGDLLAARCVFTGEGRTEATHIGGTSSDEMCNLYIMYYMEAKHAVSFMTCTQNVAPDMFRTIPPEANIPIPVKSDMVMMHEHHKETEYKDKIPLLQQPKREEEEVLDQDFHMEEALDWPGVYLLPGQVSGVALDPKNNLVIFHRGDHVWDGNSFDSKFVYQQIGLGPIEEDTILVIDPNNAAVLQSSGKNLFYLPHGLSIDKDGNYWVTDVALHQVFKLDPNNKEGPVLILGRSMQPGSDQNHFCQPTDVAVDPGTGAIYVSDGYCNSRIVQFSPSGKFITQWGEESSGSSPLPGQFTVPHSLALVPLLGQLCVADRENGRIQCFKTDTKEFVREIKHSSFGRNVFAISYIPGLLFAVNGKPHFGDQEPVQGFVMNFSNGEIIDIFKPVRKHFDMPHDIVASEDGTVYIGDAHTNTVWKFTLTEKLEHRSVKKAGIEVQEIKEAEAVVETKMENKPTSSELQKMQEKQKLIKEPGSGVPVVLITTLLVIPVVVLLAIAIFIRWKKSRAFGDSEHKLETSSGRVLGRFRGKGSGGLNLGNFFASRKGYSRKGFDRLSTEGSDQEKEDDGSESEEEYSAPLPALAPSSS

SEQ ID NO: 9973 - protein, 905 aa, Homo sapiens
MAGRVPSLLVLLVFPSSCLAFRSPLSVFKRFKETTRPFSNECLGTTRPVVPIDSSDFALDIRMPGVTPKQSDTYFCMSMRIPVDEEAFVIDFKPRASMDTVHHMLLFGCNMPSSTGSYWFCDEGTCTDKANILYAWARNAPPTRLPKGVGFRVGGETGSKYFVLQVHYGDISAFRDNNKDCSGVSLHLTRLPQPLIAGMYLMMSVDTVIPAGEKVVNSDISCHYKNYPMHVFAYRVHTHHLGKVVSGYRVRNGQWTLIGRQSPQLPQAFYPVGHPVDVSFGDLLAARCVFTGEGRTEATHIGGTSSDEMCNLYIMYYMEAKHAVSFMTCTQNVAPDMFRTIPPEANIPIPVKSDMVMMHEHHKETEYKDKIPLLQQPKREEEEVLDQGDFYSLLSKLLGEREDVVHVHKYNPTEKAESESDLVAEIANVVQKKDLGRSDAREGAEHERGNAILVRDRIHKFHRLVSTLRPPESRVFSLQQPPPGEGTWEPEHTGDFHMEEALDWPGVYLLPGQVSGVALDPKNNLVIFHRGDHVWDGNSFDSKFVYQQIGLGPIEEDTILVIDPNNAAVLQSSGKNLFYLPHGLSIDKDGNYWVTDVALHQVFKLDPNNKEGPVLILGRSMQPGSDQNHFCQPTDVAVDPGTGAIYVSDGYCNSRIVQFSPSGKFITQWGEESSGSSPLPGQFTVPHSLALVPLLGQLCVADRENGRIQCFKTDTKEFVREIKHSSFGRNVFAISYIPGLLFAVNGKPHFGDQEPVQGFVMNFSNGEIIDIFKPVRKHFDMPHDIVASEDGTVYIGDAHTNTVWKFTLTEKLEHRSVKKAGIEVQEIKDSEHKLETSSGRVLGRFRGKGSGGLNLGNFFASRKGYSRKGFDRLSTEGSDQEKEDDGSESEEEYSAPLPALAPSSS

SEQ ID NO: 9974 - protein, 973 aa, Homo sapiens [sequence omitted]

SEQ ID NO: 9975 - protein, 679 aa, Homo sapiens
  SITE 1: note = misc_feature - Xaa can be any naturally occurring amino acid
XMHVFAYRVHTHHLGKVVSGYRVRNGQWTLIGRQSPQLPQAFYPVGHPVDVSFGDLLAARCVFTGEGRTEATHIGGTSSDEMCNLYIMYYMEAKHAVSFMTCTQNVAPDMFRTIPPEANIPIPVKSDMVMMHEHHKETEYKDKIPLLQQPKREEEEVLDQGDFYSLLSKLLGEREDVVHVHKYNPTEKAESESDLVAEIANVVQKKDLGRSDAREGAEHERGNAILVRDRIHKFHRLVSTLRPPESRVFSLQQPPPGEGTWEPEHTGDFHMEEALDWPGVYLLPGQVSGVALDPKNNLVIFHRGDHVWDGNSFDSKFVYQQIGLGPIEEDTILVIDPNNAAVLQSSGKNLFYLPHGLSIDKDGNYWVTDVALHQVFKLDPNNKEGPVLILGRSMQPGSDQNHFCQPTDVAVDPGTGAIYVSDGYCNSRIVQFSPSGKFITQWGEESSGSSPLPGQFTVPHSLALVPLLGQLCVADRENGRIQCFKTDTKEFVREIKHSSFGRNVFAISYIPGLLFAVNGKPHFGDQEPVQGFVMNFSNGEIIDIFKPVRKHFDMPHDIVASEDGTVYIGDAHTNTVWKFTLTEKLEHRSVKKAGIEVQEIKADSEHKLETSSGRVLGRFRGKGSGGLNLGNFFASRKGYSRKGFDRLSTEGSDQEKEDDGSESEEEYSAPLPALAPSSS

SEQ ID NO: 9976 - protein, 250 aa, Homo sapiens
  SITE 1: note = misc_feature - Xaa can be any naturally occurring amino acid
XRIQCFKTDTKEFVREIKHSSFGRNVFAISYIPGLLFAVNGKPHFGDQEPVQGFVMNFSNGEIIDIFKPVRKHFDMPHDIVASEDGTVYIGDAHTNTVWKFTLTEKLEHRSVKKAGIEVQEIKEAEAVVETKMENKPTSSELQKMQEKQKLIKEPGSGVPVVLITTLLVIPVVVLLAIAIFIRWKKSRAFGGKGSGGLNLGNFFASRKGYSRKGFDRLSTEGSDQEKEDDGSESEEEYSAPLPALAPSSS

SEQ ID NO: 9977 - protein, 675 aa, Homo sapiens
MCRECCEYDQIECVCPGKREVVGYTIPCCRNEENECDSCLIHPGCTIFENCKSCRNGSWGGTLDDFYVKGFYCAECRAGWYGGDCMRCGQVLRAPKGQILLESYPLNAHCEWTIHAKPGFVIQLRFVMLSLEFDYMCQYDYVEVRDGDNRDGQIIKRVCGNERPAPIQSIGSSLHVLFHSDGSKNFDGFHAIYEEITACSSSPCFHDGTCVLDKAGSYKCACLAGYTGQRCENLLEAGKSKIKASEDSLSVLEERNCSDPGGPVNGYQKITGGPGLINGRHAKIGTVVSFFCNNSYVLSGNEKRTCQQNGEWSGKQPICIKACREPKISDLVRRRVLPMQVQSRETPLHQLYSAAFSKQKLQSAPTKKPALPFGDLPMGYQHLHTQLQYECISPFYRRLGSSRRTCLRTGKWSGRAPSCIPICGKIENITAPKTQGLRWPWQAAIYRRTSGVHDGSLHKGAWFLVCSGALVNERTVVVAAHCVTDLGKVTMIKTADLKVVLGKFYRDDDRDEKTIQSLQISAIILHPNYDPILLDADIAILKLLDKARISTRVQPICLAASRDLSTSFQESHITVAGWNVLADVRSPGFKNDTLRSGVVSVVDSLLCEEQHEDHGIPVSVTDNMFCASWEPTAPSDICTAETGGIAAVSFPGRASPEPRWHLMGLVSWSYDKTCS

SEQ ID NO: 9978 - protein, 680 aa, Homo sapiens
MCRECCEYDQIECVCPGKREVVGYTIPCCRNEENECDSCLIHPGCTIFENCKSCRNGSWGGTLDDFYVKGFYCAECRAGWYGGDCMRCGQVLRAPKGQILLESYPLNAHCEWTIHAKPGFVIQLRFVMLSLEFDYMCQYDYVEVRDGDNRDGQIIKRVCGNERPAPIQSIGSSLHVLFHSDGSKNFDGFHAIYEEITACSSSPCFHDGTCVLDKAGSYKCACLAGYTGQRCENLLEERNCSDPGGPVNGYQKITGGPGLINGRHAKIGTVVSFFCNNSYVLSGNEKRTCQQNGEWSGKQPICIKACREPKISDLVRRRVLPMQVQSRETPLHQLYSAAFSKQKLQSAPTKKPALPFGDLPMGYQHLHTQLQYECISPFYRRLGSSRRTCLRTGKWSGRAPSCIPICGKIENITAPKTQGLRWPWQAAIYRRTSGVHDGSLHKGAWFLVCSGALVNERTVVVAAHCVTDLGKVTMIKTADLKVVLGKFYRDDDRDEKTIQSLQISAIILHPNYDPILLDADIAILKLLDKARISTRVQPICLAASRDLSTSFQESHITVAGWNVLADVRSPGFKNDTLRSGVVSVVDSLLCEEQHEDHGIPVSVTDNMFCASWEPTAPSDICTAETGGIAAVSFPGRASPEPRWHLMGLVSWSYDKTCSHRLSTAFTKVLPFKDWIERNMK

SEQ ID NO: 9979 - protein, 178 aa, Homo sapiens
MELGCWTQLGLTFLQLLLISSLPREYTVINEACPGAEWNIMCRECCEYDQIECVCPGKREVVGYTIPCCRNEENECDSCLIHPGCTIFENCKSCRNGSWGGTLDDFYVKGFYCAECRAGWYGGDCMPCSSSPCFHDGTCVLDKAGSYKCACLAGYTGQRCENLLEERNCSDPGGPVNG

SEQ ID NO: 9980 - protein, 609 aa, Homo sapiens
MELGCWTQLGLTFLQLLLISSLPREYTVINEACPGAEWNIMCRECCEYDQIECVCPGKREVVGYTIPCCRNEENECDSCLIHPGCTIFENCKSCRNGSWGGTLDDFYVKGFYCAECRAGWYGGDCMPCSSSPCFHDGTCVLDKAGSYKCACLAGYTGQRCENLLEERNCSDPGGPVNGYQKITGGPGLINGRHAKIGTVVSFFCNNSYVLSGNEKRTCQQNGEWSGKQPICIKACREPKISDLVRRRVLPMQVQSRETPLHQLYSAAFSKQKLQSAPTKKPALPFGDLPMGYQHLHTQLQYECISPFYRRLGSSRRTCLRTGKWSGRAPSCIPICGKIENITAPKTQGLRWPWQAAIYRRTSGVHDGSLHKGAWFLVCSGALVNERTVVVAAHCVTDLGKVTMIKTADLKVVLGKFYRDDDRDEKTIQSLQISAIILHPNYDPILLDADIAILKLLDKARISTRVQPICLAASRDLSTSFQESHITVAGWNVLADVRSPGFKNDTLRSGVVSVVDSLLCEEQHEDHGIPVSVTDNMFCASWEPTAPSDICTAETGGIAAVSFPGRASPEPRWHLMGLVSWSYDKTCSHRLSTAFTKVLPFKDWIERNMK

SEQ ID NO: 9981 - protein, 737 aa, Homo sapiens
MELGCWTQLGLTFLQLLLISSLPREYTVINEACPGAEWNIMCRECCEYDQIECVCPGKREVVGYTIPCCRNEENECDSCLIHPGCTIFENCKSCRNGSWGGTLDDFYVKGFYCAECRAGWYGGDCMRCGQVLRAPKGQILLESYPLNAHCEWTIHAKPGFVIQLRFVMLSLEFDYMCQYDYVEVRDGDNRDGQIIKRVCGNERPAPIQSIGSSLHVLFHSDGSKNFDGFHAIYEEITACSSSPCFHDGTCVLDKAGSYKCACLAGYTGQRCENLLEAGKSKIKASEDSLSVLEERNCSDPGGPVNGYQKITGGPGLINGRHAKIGTVVSFFCNNSYVLSGNEKRTCQQNGEWSGKQPICIKACREPKISDLVRRRVLPMQVQSRETPLHQLYSAAFSKQKLQSAPTKKPALPFGDLPMGYQHLHTQLQYECISPFYRRLGSSRRTCLRTGKWSGRAPSCIPICGKIENITAPKTQGLRWPWQAAIYRRTSGVHDGSLHKGAWFLVCSGALVNERTVVVAAHCVTDLGKVTMIKTADLKVVLGKFYRDDDRDEKTIQSLQISAIILHPNYDPILLDADIAILKLLDKARISTRVQPICLAASRDLSTSFQESHITVAGWNVLADVRSPGFKNDTLRSGVVSVVDSLLCEEQHEDHGIPVSVTDNMFCASWEPTAPSDICTAETGGIAAVSFPGRASPEPRWHLMGLVSWSYDKTCSHRLSTAFTKVLPFKDWIERNMK

SEQ ID NO: 9982 - protein, 720 aa, Homo sapiens
MELGCWTQLGLTFLQLLLISSLPREYTVINEACPGAEWNIMCRECCEYDQIECVCPGKREVVGYTIPCCRNEENECDSCLIHPGCTIFENCKSCRNGSWGGTLDDFYVKGFYCAECRAGWYGGDCMRCGQVLRAPKGQILLESYPLNAHCEWTIHAKPGFVIQLRFVMLSLEFDYMCQYDYVEVRDGDNRDGQIIKRVCGNERPAPIQSIGSSLHVLFHSDGSKNFDGFHAIYEEITACSSSPCFHDGTCVLDKAGSYKCACLAGYTGQRCENLLEERNCSDPGGPVNGYQKITGGPGLINGRHAKIGTVVSFFCNNSYVLSGNEKRTCQQNGEWSGKQPICIKACREPKISDLVRRRVLPMQVQSRETPLHQLYSAAFSKQKLQSAPTKKPALPFGDLPMGYQHLHTQLQYECISPFYRRLGSSRRTCLRTGKWSGRAPSCIPICGKIENITAPKTQGLRWPWQAAIYRRTSGVHDGSLHKGAWFLVCSGALVNERTVVVAAHCVTDLGKVTMIKTADLKVVLGKFYRDDDRDEKTIQSLQISAIILHPNYDPILLDADIAILKLLDKARISTRVQPICLAASRDLSTSFQESHITVAGWNVLADVRSPGFKNDTLRSGVVSVVDSLLCEEQHEDHGIPVSVTDNMFCASWEPTAPSDICTAETGGIAAVSFPGRASPEPRWHLMGLVSWSYDKTCSHRLSTAFTKVLPFKDWIERNMK

SEQ ID NO: 9983 - protein, 416 aa, Homo sapiens
MLKLAPWCLSFVTTPMFLVAMRKELASRMEWSGKQPICIKACREPKISDLVRRRVLPMQVQSRETPLHQLYSAAFSKQKLQSAPTKKPALPFGDLPMGYQHLHTQLQYECISPFYRRLGSSRRTCLRTGKWSGRAPSCIPICGKIENITAPKTQGLRWPWQAAIYRRTSGVHDGSLHKGAWFLVCSGALVNERTVVVAAHCVTDLGKVTMIKTADLKVVLGKFYRDDDRDEKTIQSLQISAIILHPNYDPILLDADIAILKLLDKARISTRVQPICLAASRDLSTSFQESHITVAGWNVLADVRSPGFKNDTLRSGVVSVVDSLLCEEQHEDHGIPVSVTDNMFCASWEPTAPSDICTAETGGIAAVSFPGRASPEPRWHLMGLVSWSYDKTCSHRLSTAFTKVLPFKDWIERNMK

SEQ ID NO: 9984 - protein, 1251 aa, Homo sapiens
MRLLLLVPLLLAPAPGSSAPKVRRQSDTWGPWSQWSPCSRTCGGGVSFRERPCYSQRRDGGSSCVGPARSHRSCRTESCPDGARDFRAEQCAEFDGAEFQGRRYRWLPYYSAPNKCELNCIPKGENFYYKHREAVVDGTPCEPGKRDVCVDGSCRVVGCDHELDSSKQEDKCLRCGGDGTTCYPVAGTFDANDLSRAVKNVRGEYYLNGHWTIEAARALPAASTILHYERGAEGDLAPERLHARGPTSEPLVIELISQEPNPGVHYEYHLPLRRPSPGFSWSHGSWSDCSAECGGGHQSRLVFCTIDHEAYPDHMCQRQPRPADRRSCNLHPCPETKRWKAGPWAPCSASCGGGSQSRSVYCISSDGAGIQEAVEEAECAGLPGKPPAIQACNLQRCAAWSPEPWGECSVSCGVGVRKRSVTCRGERGSLLHTAACSLEDRPPLTEPCVHEDCPLLSDQAWHVGTWGLCSKSCSSGTRRRQVICAIGPPSHCGSLQHSKPVDVEPCNTQPCHLPQEVPSMQDVHTPASNPWMPLGPQESPASDSRGQWWAAQEHPSARGDHRGERGDPRGDQGTHLSALGPAPSLQQPPYQQPLRSGSGPHDCRHSPHGCCPDGHTASLGPQWQGCPGAPCQQSRYGCCPDRVSVAEGPHHAGCTKSYGGDSTGGMPRSRAVASTVHNTHQPQAQQNEPSECRGSQFGCCYDNVATAAGPLGEGCVGQPSHAYPVRCLLPSAHGSCADWAARWYFVASVGQCNRFWYGGCHGNANNFASEQECMSSCQGSLHGPRRPQPGASGRSTHTDGGGSSPAGEQEPSQHRTGAAVQRKPWPSGGLWRQDQQPGPGEAPHTQAFGEWPWGQELGSRAPGLGGDAGSPAPPFHSSSYRISLAGVEPSLVQAALGQLVRLSCSDDTAPESQAAWQKDGQPISSDRHRLQFDGSLIIHPLQAEDAGTYSCGSTRPGRDSQKIQLRIIGGDMAVLSEAELSRFPQPRDPAQDFGQAGAAGPLGAIPSSHPQPANRLRLDQNQPRVVDASPGQRIRMTCRAEGFPPPAIEWQRDGQPVSSPRHQLQPDGSLVISRVAVEDGGFYTCVAFNGQDRDQRWVQLRVLGELTISGLPPTVTVPEGDTARLLCVVAGESVNIRWSRNGLPVQADGHRVHQSPDGTLLIYNLRARDEGSYTCSAYQGSQAVSRSTEVKVVSPAPTAQPRDPGRDCVDQPELANCDLILQAQLCGNEYYSSFCCASCSRFQPHAQPIWQ

SEQ ID NO: 9985 - protein, 929 aa, Homo sapiens
MRLLLLVPLLLAPAPGSSAPKVRRQSDTWGPWSQWSPCSRTCGGGVSFRERPCYSQRRDGGSSCVGPARSHRSCRTESCPDGARDFRAEQCAEFDGAEFQGRRYRWLPYYSAPNKCELNCIPKGENFYYKHREAVVDGTPCEPGKRDVCVDGSCRVVGCDHELDSSKQEDKCLRCGGDGTTCYPVAGTFDANDLSRAVKNVRGEYYLNGHWTIEAARALPAASTILHYERGAEGDLAPERLHARGPTSEPLVIELISQEPNPGVHYEYHLPLRRPSPGFSWSHGSWSDCSAECGGGHQSRLVFCTIDHEAYPDHMCQRQPRPADRRSCNLHPCPETKRWKAGPWAPCSASCGGGSQSRSVYCISSDGAGIQEAVEEAECAGLPGKPPAIQACNLQRCAAWSPEPWGECSVSCGVGVRKRSVTCRGERGSLLHTAACSLEDRPPLTEPCVHEDCPLLSDQAWHVGTWGLCSKSCSSGTRRRQVICAIGPPSHCGSLQHSKPVDVEPCNTQPCHLPQEVPSMQDVHTPASNPWMPLGPQESPASDSRGQWWAAQEHPSARGDHRGERGDPRGDQGTHLSALGPAPSLQQPPYQQPLRSGSGPHDCRHSPHGCCPDGHTASLGPQWQGCPGAPCQQSRYGCCPDRVSVAEGPHHAGCTKSYGGDSTGGMPRSRAVASTVHNTHQPQAQQNEPSECRGSQFGCCYDNVATAAGPLGEGCVGQPSHAYPVRCLLPSAHGSCADWAARWYFVASVGQCNRFWYGGCHGNANNFASEQECMSSCQGSLHGPRRPQPGASGRSTHTDGGGSSPAGEQEPSQHRTGAAVQRKPWPSGGLWRQDQQPGPGEAPHTQAFGEWPWGQELGSRAPGLGGDAGSPAPPFHSSSYRISLAGVEPSLVQAALGQLVRLSCSDDTAPESQAAWQKDGQPISSDRFT

SEQ ID NO: 9986 - protein, 808 aa, Homo sapiens
MRLLLLVPLLLAPAPGSSAPKVRRQSDTWGPWSQWSPCSRTCGGGVSFRERPCYSQRRDGGSSCVGPARSHRSCRTESCPDGARDFRAEQCAEFDGAEFQGRRYRWLPYYSAPNKCELNCIPKGENFYYKHREAVVDGTPCEPGKRDVCVDGSCRVVGCDHELDSSKQEDKCLRCGGDGTTCYPVAGTFDANDLSRGYNQILIVPMGATSILIDEAAASRNFLAVKNVRGEYYLNGHWTIEAARALPAASTILHYERGAEGDLAPERLHARGPTSEPLVIELISQEPNPGVHYEYHLPLRRPSPGFSWSHGSWSDCSAECGGGHQSRLVFCTIDHEAYPDHMCQRQPRPADRRSCNLHPCPETKRWKAGPWAPCSASCGGGSQSRSVYCISSDGAGIQEAVEEAECAGLPGKPPAIQACNLQRCAAWSPEPWGECSVSCGVGVRKRSVTCRGERGSLLHTAACSLEDRPPLTEPCVHEDCPLLSDQAWHVGTWGLCSKSCSSGTRRRQVICAIGPPSHCGSLQHSKPVDVEPCNTQPCHLPQEVPSMQDVHTPASNPWMPLGPQESPASDSRGQWWAAQEHPSARGDHRGERGDPRGDQGTHLSALGPAPSLQQPPYQQPLRSGSGPHDCRHSPHGCCPDGHTASLGPQWQGCPGAPCQQSRYGCCPDRVSVAEGPHHAGCTKSYGGDSTGGMPRSRAVASTVHNTHQPQAQQNEPSECRGSQFGCCYDNVATAAGPLGEGCVGQPSHGLAWQVWSPRWCRQPWGSWCGSPAQTTLPRNPRLPGRKMASPSPLTGVCDGPPTSSDRCV

SEQ ID NO: 9987 - protein, 1262 aa, Homo sapiens
MRLLLLVPLLLAPAPGSSAPKVRRQSDTWGPWSQWSPCSRTCGGGVSFRERPCYSQRRDGGSSCVGPARSHRSCRTESCPDGARDFRAEQCAEFDGAEFQGRRYRWLPYYSAPNKCELNCIPKGENFYYKHREAVVDGTPCEPGKRDVCVDGSCRVVGCDHELDSSKQEDKCLRCGGDGTTCYPVAGTFDANDLSRGYNQILIVPMGATSILIDEAAASRNFLAVKNVRGEYYLNGHWTIEAARALPAASTILHYERGAEGDLAPERLHARGPTSEPLVIELISQEPNPGVHYEYHLPLRRPSPGFSWSHGSWSDCSAECGGGHQSRLVFCTIDHEAYPDHMCQRQPRPADRRSCNLHPCPETKRWKAGPWAPCSASCGGGSQSRSVYCISSDGAGIQEAVEEAECAGLPGKPPAIQACNLQRCAAWSPEPWGECSVSCGVGVRKRSVTCRGERGSLLHTAACSLEDRPPLTEPCVHEDCPLLSDQAWHVGTWGLCSKSCSSGTRRRQVICAIGPPSHCGSLQHSKPVDVEPCNTQPCHLPQEVPSMQDVHTPASNPWMPLGPQESPASDSRGQWWAAQEHPSARGDHRGERGDPRGDQGTHLSALGPAPSLQQPPYQQPLRSGSGPHDCRHSPHGCCPDGHTASLGPQWQGCPGAPCQQSRYGCCPDRVSVAEGPHHAGCTKSYGGDSTGGMPRSRAVASTVHNTHQPQAQQNEPSECRGSQFGCCYDNVATAAGPLGEGCVGQPSHDWAARWYFVASVGQCNRFWYGGCHGNANNFASEQECMSSCQGSLHGPRRPQPGASGRSTHTDGGGSSPAGEQEPSQHRTGAAVQRKPWPSGGLWRQDQQPGPGEAPHTQAFGEWPWGQELGSRAPGLGGDAGSPAPPFHSSSYRISLAGVEPSLVQAALGQLVRLSCSDDTAPESQAAWQKDGQPISSDRHRLQFDGSLIIHPLQAEDAGTYSCGSTRPGRDSQKIQLRIIGGDMAVLSEAELSRFPQPRDPAQDFGQAGAAGPLGAIPSSHPQPANRLRLDQNQPRVVDASPGQRIRMTCRAEGFPPPAIEWQRDGQPVSSPRHQLQPDGSLVISRVAVEDGGFYTCVAFNGQDRDQRWVQLRVLGELTISGLPPTVTVPEGDTARLLCVVAGESVNIRWSRNGLPVQADGHRVHQSPDGTLLIYNLRARDEGSYTCSAYQGSQAVSRSTEVKVVSPAPTAQPRDPGRDCVDQPELANCDLILQAQLCGNEYYSSFCCASCSRFQPHAQPIWQ

SEQ ID NO: 9988 - protein, 1278 aa, Homo sapiens
MRLLLLVPLLLAPAPGSSAPKVRRQSDTWGPWSQWSPCSRTCGGGVSFRERPCYSQRRDGGSSCVGPARSHRSCRTESCPDGARDFRAEQCAEFDGAEFQGRRYRWLPYYSAPNKCELNCIPKGENFYYKHREAVVDGTPCEPGKRDVCVDGSCRVVGCDHELDSSKQEDKCLRCGGDGTTCYPVAGTFDANDLSRGYNQILIVPMGATSILIDEAAASRNFLAVKNVRGEYYLNGHWTIEAARALPAASTILHYERGAEGDLAPERLHARGPTSEPLVIELISQEPNPGVHYEYHLPLRRPSPGFSWSHGSWSDCSAECGGGHQSRLVFCTIDHEAYPDHMCQRQPRPADRRSCNLHPCPETKRWKAGPWAPCSASCGGGSQSRSVYCISSDGAGIQEAVEEAECAGLPGKPPAIQACNLQRCAAWSPEPWGECSVSCGVGVRKRSVTCRGERGSLLHTAACSLEDRPPLTEPCVHEDCPLLSDQAWHVGTWGLCSKSCSSGTRRRQVICAIGPPSHCGSLQHSKPVDVEPCNTQPCHLPQEVPSMQDVHTPASNPWMPLGPQESPASDSRGQWWAAQEHPSARGDHRGERGDPRGDQGTHLSALGPAPSLQQPPYQQPLRSGSGPHDCRHSPHGCCPDGHTASLGPQWQGCPGAPCQQSRYGCCPDRVSVAEGPHHAGCTKSYGGDSTGGMPRSRAVASTVHNTHQPQAQQNEPSECRGSQFGCCYDNVATAAGPLGEGCVGQPSHAYPVRCLLPSAHGSCADWAARWYFVASVGQCNRFWYGGCHGNANNFASEQECMSSCQGSLHGPRRPQPGASGRSTHTDGGGSSPAGEQEPSQHRTGAAVQRKPWPSGGLWRQDQQPGPGEAPHTQAFGEWPWGQELGSRAPGLGGDAGSPAPPFHSSSYRISLAGVEPSLVQAALGQLVRLSCSDDTAPESQAAWQKDGQPISSDRHRLQFDGSLIIHPLQAEDAGTYSCGSTRPGRDSQKIQLRIIGGDMAVLSEAELSRFPQPRDPAQDFGQAGAAGPLGAIPSSHPQPANRLRLDQNQPRVVDASPGQRIRMTCRAEGFPPPAIEWQRDGQPVSSPRHQLQPDGSLVISRVAVEDGGFYTCVAFNGQDRDQRWVQLRVLGELTISGLPPTVTVPEGDTARLLCVVAGESVNIRWSRNGLPVQADGHRVHQSPDGTLLIYNLRARDEGSYTCSAYQGSQAVSRSTEVKVVSPAPTAQPRDPGRDCVDQPELANCDLILQAQLCGNEYYSSFCCASCSRFQPHAQPIWQ

SEQ ID NO: 9989 - protein, 1278 aa, Homo sapiens; identical to SEQ ID NO: 9988

SEQ ID NO: 9990 - protein, 214 aa, Homo sapiens
VHNTHQPQAQQNEPSECRGSQFGCCYDNVATAAGPLGEGCVGQPSHAYPVRCLLPSAHGSCADWAARWYFVASVGQCNRFWYGGCHGNANNFASEQECMSSCQGSLHGPRRPQPGASGRSTHTDGGGSSPAGEQEPSQHRTGAAVQRKPWPSGGLWRQDQQPGPGEAPHTQAFGEWPWGQELGSRAPGLGGDAGSPAPPFHSSSYRSHFPPLQD

SEQ ID NO: 9991 - protein, 311 aa, Homo sapiens
  SITE 1: note = misc_feature - Xaa can be any naturally occurring amino acid
XCMSSCQGSLHGPRRPQPGASGRSTHTDGGGSSPAGEQEPSQHRTGAAVQRKPWPSGGLWRQDQQPGPGEAPHTQAFGEWPWGQELGSRAPGLGGDAGSPAPPFHSSSYRISLAGVEPSLVQAALGQLVRLSCSDDTAPESQAAWQKDGQPISSDRHRLQFDGSLIIHPLQAEDAGTYSCGSTRPGRDSQKIQLRIIGGDMAVLSEAELSRFPQPRDPAQDFGQAGAAGPLGAIPSSHPQPANRLRLDQNQPRVVDASPGQRIRMTCRAEGFPPPAIEWQRDGQPVSSPSTHRPAQGPWQGLRRPARAGQL

SEQ ID NO: 9992 - protein, 1627 aa, Homo sapiens
MRLWSWVLHLGLLSAALGCGLAERPRRARRDPRAGRPPRPAAGPATCATRAARGRRASPPPPPPPGGAWEAVRVPRRRQQREARGATEEPSPPSRALYFSGRGEQLRLRADLELPRDAFTLQVWLRAEGGQRSPAVITGLYDKCSYISRDRGWVVGIHTISDQDNKDPRYFFSLKTDRARQVTTINAHRSYLPGQWVYLAATYDGQFMKLYVNGAQVATSGEQVGGIFSPLTQKCKVLMLGGSALNHNYRGYIEHFSLWKVARTQREILSDMETHGAHTALPQLLLQENWDNVKHAWSPMKDGSSPKVEFSNAHGFLLDTSLEPPLCGQTLCDNTEVIASYNQLSSFRQPKVVRYRVVNLYEDDHKNPTVTREQVDFQHHQLAEAFKQYNISWELDVLEVSNSSLRRRLILANCDISKIGDENCDPECNHTLTGHDGGDCRHLRHPAFVKKQHNGVCDMDCNYERFNFDGGECCDPEITNVTQTCFDPDSPHRAYLDVNELKNILKLDGSTHLNIFFAKSSEEELAGVATWPWDKEALMHLGGIVLNPSFYGMPGHTHTMIHEIGHSLGLYHVFRGISEIQSCSDPCMETEPSFETGDLCNDTNPAPKHKSCGDPGPGNDTCGFHSFFNTPYNNFMSYADDDCTDSFTPNQVARMHCYLDLVYQGWQPSRKPAPVALAPQVLGHTTDSVTLEWFPPIDGHFFERELGSACHLCLEGRILVQYASNASSPMPCSPSGHWSPREAEGHPDVEQPCKSSVRTWSPNSAVNPHTVPPACPEPQGCYLELEFLYPLVPESLTIWVTFVSTDWDSSGAVNDIKLLAVSGKNISLGPQNVFCDVPLTIRLWDVGEEVYGIQIYTLDEHLEIDAAMLTSTADTPLCLQCKPLKYKVVRDPPLQMDVASILHLNRKFVDMDLNLGSVYQYWVITISGTEESEPSPAVTYIHGSGYCGDGIIQKDQGEQCDDMNKINGDGCSLFCRQEVSFNCIDEPSRCYFHDGDGVCEEFEQKTSIKDCGVYTPQGFLDQWASNASVSHQDQQCPGWVIIGQPAASQVCRTKVIDLSEGISQHAWYPCTISYPYSQLAQTTFWLRAYFSQPMVAAAVIVHLVTDGTYYGDQKQETISVQLLDTKDQSHDLGLHVLSCRNNPLIIPVVHDLSQPFYHSQAVRVSFSSPLVAISGVALRSFDNFDPVTLSSCQRGETYSPAEQSCVHFACEKTDCPELAVENASLNCSSSDRYHGAQCTVSCRTGYVLQIRRDDELIKSQTGPSVTVTCTEGKWNKQVACEPVDCSIPDHHQVYAASFSCPEGTTFGSQCSFQCRHPAQLKGNNSLLTCMEDGLWSFPEALCELMCLAPPPVPNADLQTARCRENKHKVGSFCKYKCKPGYHVPGSSRKSKKRAFKTQCTQDGSWQEGACVPVTCDPPPPKFHGLYQCTNGFQFNSECRIKCEDSDASQGLGSNVIHCRKDGTWNGSFHVCQEMQGQCSVPNELNSNLKLQCPDGYAIGSECATSCLDHNSESIILPMNVTVRDIPHWLNPTRVERVVCTAGLKWYPHPALIHCVKGCEPFMGDNYCDAINNRAFCNYDGGDCCTSTVKTKKVTPFPMSCDLQGDCACRDPQAQEHSRKDLRGYSHG

SEQ ID NO: 9993 - protein, 827 aa, Homo sapiens
MMCLKILRISLAILAGWALCSANSELGWTRKKSLVEREHLNQVLLEGERCWLGAKVRRPRASPQHHLFGVYPSRAGNYLRPYPVGEQEIHHTGRSKPDTEGNAVSLVPPDLTENPAGLRGAVEEPAAPWVGDSPIGQSELLGDDDAYLGNQRSKESLGEAGIQKGSAMAATTTTAIFTTLNEPKPETQRRGWAKSRQRRQVWKRRAEDGQGDSGISSHFQPWPKHSLKHRVKKSPPEESNQNGGEGSYREAETFNSQVGLPILYFSGRRERLLLRPEVLAEIPREAFTVEAWVKPEGGQNNPAIIAGVFDNCSHTVSDKGWALGIRSGKDKGKRDARFFFSLCTDRVKKATILISHSRYQPGTWTHVAATYDGRHMALYVDGTQVASSLDQSGPLNSPFMASCRSLLLGGDSSEDGHYFRGHLGTLVFWSTALPQSHFQHSSQHSSGEEEATDLVLTASFEPVNTEWVPFRDEKYPRLEVLQGFEPEPEILSPLQPPLCGQTVCDNVELISQYNGYWPLRGEKVIRYQVVNICDDEGLNPIVSEEQIRLQHEALNEAFSRYNISWQLSVHQVHNSTLRHRVVLVNCEPSKIGNDHCDPECEHPLTGYDGGDCRLQGRCYSWNRRDGLCHVECNNMLNDFDDGDCCDPQVADVRKTCFDPDSPKRAYMSVKELKEALQLNSTHFLNIYFASSVREDLAGAATWPWDKDAVTHLGGIVLSPAYYGMPGHTDTMIHEVGHVLGLYHVFKGVSERESCNDPCKETVPSMETGDLCADTAPTPKSELCREPEPTSDTCGFTRFPGAPFTNYMSYTGITTVLFCFLLRIHGGL

SEQ ID NO: 9994 - protein, 1791 aa, Homo sapiens
MMCLKILRISLAILAGWALCSANSELGWTRKKSLVEREHLNQVLLEGERCWLGAKVRRPRASPQHHLFGVYPSRAGNYLRPYPVGEQEIHHTGRSKPDTEGNAVSLVPPDLTENPAGLRGAVEEPAAPWVGDSPIGQSELLGDDDAYLGNQRSKESLGEAGIQKGSAMAATTTTAIFTTLNEPKPETQRRGWAKSRQRRQVWKRRAEDGQGDSGISSHFQPWPKHSLKHRVKKSPPEESNQNGGEGSYREAETFNSQVGLPILYFSGRRERLLLRPEVLAEIPREAFTVEAWVKPEGGQNNPAIIAGVFDNCSHTVSDKGWALGIRSGKDKGKRDARFFFSLCTDRVKKATILISHSRYQPGTWTHVAATYDGRHMALYVDGTQVASSLDQSGPLNSPFMASCRSLLLGGDSSEDGHYFRGHLGTLVFWSTALPQSHFQHSSQHSSGEEEATDLVLTASFEPVNTEWVPFRDEKYPRLEVLQGFEPEPEILSPLQPPLCGQTVCDNVELISQYNGYWPLRGEKVIRYQVVNICDDEGLNPIVSEEQIRLQHEALNEAFSRYNISWQLSVHQVHNSTLRHRVVLVNCEPSKIGNDHCDPECEHPLTGYDGGDCRLQGRCYSWNRRDGLCHVECNNMLNDFDDGDCCDPQVADVRKTCFDPDSPKRAYMSVKELKEALQLNSTHFLNIYFASSVREDLAGAATWPWDKDAVTHLGGIVLSPAYYGMPGHTDTMIHEVGHVLGLYHVFKGVSERESCNDPCKETVPSMETGDLCADTAPTPKSELCREPEPTSDTCGFTRFPGAPFTNYMSYTDDNCTDNFTPNQVARMHCYLDLVYQQWTESRKPTPIPIPPMVIGQTNKSLTIHWLPPISGVVYDRASGSLCGACTEDGTFRQYVHTASSRRVCDSSGYWTPEEAVGPPDVDQPCEPSLQAWSPEVHLYHMNMTVPCPTEGCSLELLFQHPVQADTLTLWVTSFFMESSQVLFDTEILLENKESVHLGPLDTFCDIPLTIKLHVDGKVSGVKVYTFDERIEIDAALLTSQPHSPLCSGCRPVRYQVLRDPPFASGLPVVVTHSHRKFTDVEVTPGQMYQYQVLAEAGGELGEASPPLNHIHGAPYCGDGKVSERLGEECDDGDLVSGDGCSKVCELEEGFNCVGEPSLCYMYEGDGICEPFERKTSIVDCGIYTPKGYLDQWATRAYSSHEDKKKCPVSLVTGEPHSLICTSYHPDLPNHRPLTGWFPCVASENETQDDRSEQPEGSLKKEDEVWLKVCFNRPGEARAIFIFLTTDGLVPGEHQQPTVTLYLTDVRGSNHSLGTYGLSCQHNPLIINVTHHQNVLFHHTTSVLLNFSSPRVGISAVALRTSSRIGLSAPSNCISEDEGQNHQGQSCIHRPCGKQDSCPSLLLDHADVVNCTSIGPGLMKCAITCQRGFALQASSGQYIRPMQKEILLTCSSGHWDQNVSCLPVDCGVPDPSLVNYANFSCSEGTKFLKRCSISCVPPAKLQGLSPWLTCLEDGLWSLPEVYCKLECDAPPIILNANLLLPHCLQDNHDVGTICKYECKPGYYVAESAEGKVRNKLLKIQCLEGGIWEQGSCIPVVCEPPPPVFEGMYECTNGFSLDSQCVLNCNQEREKLPILCTKEGLWTQEFKLCENLQGECPPPPSELNSVEYKCEQGYGIGAVCSPLCVIPPSDPVMLPENITADTLEHWMEPVKVQSIVCTGRRQWHPDPVLVHCIQSCEPFQADGWCDTINNRAYCHYDGGDCCSSTLSSKKVIPFAADCDLDECTCRDPKAEENQ

SEQ ID NO: 9995 - protein, 678 aa, Homo sapiens
MAAPGPLPAAALSPGAPTPRELMHGVAGVTSRAGRDREAGSVLPAGNRGARKASRRSSSRSMSRDNKFSKKDCLSIRNVVASIQTKEGLNLKLISGDVLYIWADVIVNSVPMNLQLGGGPLSRAFLQKAGPMLQKELDDRRRETEEKVGNIFMTSGCNLDCKAVLHAVAPYWNNGAETSWQIMANIIKKCLTTVEVLSFSSITFPMIGTGSLQFPKAVFAKLILSEVFEYSSSTRPITSPLQEVHFLVYTNDDEGCQAFLDEFTNWSRINPNKARIPMAGDTQGVVGTVSKPCFTAYEMKIGAITFQVATGDIATEQVDVIVNSTARTFNRKSGVSRAILEGAGQAVESECAVLAAQPHRDFIITPGGCLKCKIIIHVPGGKDVRKTVTSVLEECEQRKYTSVSLPAIGTGNAGKNPITVADNIIDAIVDFSSQHSTPSLKTVKVVIFQPELLNIFYDSMKKRDLSASLNFQSTFSMTTCNLPEHWTDMNHQLFCMVQLEPGQSEYNTIKDKFTRTCSSYAIEKIERIQNAFLWQSYQVKKRQMDIKNDHKNNERLLFHGTDADSVPYVNQHGFNRSCAGKNAVSYGKGTYFAVDASYSAKDTYSKPDSNGRKHMYVVRVLTGVFTKGRAGLVTPPPKNPHNPTDLFDSVTNNTRSPKLFVVFFDNQAYPEYLITFTA

SEQ ID NO: 9996 - protein, 483 aa, Homo sapiens
MAAPGPLPAAALSPGAPTPRELMHGVAGVTSRAGRDREAGSVLPAGNRGARKASRRSSSRSMSRDNKFSKKDCLSIRNVVASIQTKEGLNLKLISGDVLYIWADVIVNSVPMNLQLGGGPLSRAFLQKAGPMLQKELDDRRRETEEKVGNIFMTSGCNLDCKAVLHAVAPYWNNGAETSWQVATGDIATEQVDVIVNSTARTFNRKSGVSRAILEGAGQAVESECAVLAAQPHRDFIITPGGCLKCKIIIHVPGGKDVRKTVTSVLEECEQRKYTSVSLPAIGTGNLPEHWTDMNHQLFCMVQLEPGQSEYNTIKDKFTRTCSSYAIEKIERIQNAFLWQSYQVKKRQMDIKNDHKNNERLLFHGTDADSVPYVNQHGFNRSCAGKNAVSYGKGTYFAVDASYSAKDTYSKPDSNGRKHMYVVRVLTGVFTKGRAGLVTPPPKNPHNPTDLFDSVTNNTRSPKLFVVFFDNQAYPEYLITFTA

SEQ ID NO: 9997 - protein, 444 aa, Homo sapiens
MLQRIGLIFLHNIVVVSNCFYFQAFLDEFTNWSRINPNKARIPMAGDTQGVVGTVSKPCFTAYEMKIGAITFQVATGDIATEQVDVIVNSTARTFNRKSGVSRAILEGAGQAVESECAVLAAQPHRDFIITPGGCLKCKIIIHVPGGKDVRKTVTSVLEECEQRKYTSVSLPAIGTGNAGKNPITVADNIIDAIVDFSSQHSTPSLKTVKVVIFQPELLNIFYDSMKKRDLSASLNFQSTFSMTTCNLPEHWTDMNHQLFCMVQLEPGQSEYNTIKDKFTRTCSSYAIEKIERIQNAFLWQSYQVKKRQMDIKNDHKNNERLLFHGTDADSVPYVNQHGFNRSCAGKNAVSYGKGTYFAVDASYSAKDTYSKPDSNGRKHMYVVRVLTGVFTKGRAGLVTPPPKNPHNPTDLFDSVTNNTRSPKLFVVFFDNQAYPEYLITFTA

SEQ ID NO: 9998 - protein, 375 aa, Homo sapiens
MLQRIGLIFLHNIVVVSNCFYFQAFLDEFTNWSRINPNKARIPMAGDTQGVVGTVSKPCFTAYEMKIGAITFQVATGDIATEQVDVIVNSTARTFNRKSGVSRAILEGAGQAVESECAVLAAQPHRDFIITPGGCLKCKIIIHVPGGKDVRKTVTSVLEECEQRKYTSVSLPAIGTGNLPEHWTDMNHQLFCMVQLEPGQSEYNTIKDKFTRTCSSYAIEKIERIQNAFLWQSYQVKKRQMDIKNDHKNNERLLFHGTDADSVPYVNQHGFNRSCAGKNAVSYGKGTYFAVDASYSAKDTYSKPDSNGRKHMYVVRVLTGVFTKGRAGLVTPPPKNPHNPTDLFDSVTNNTRSPKLFVVFFDNQAYPEYLITFTA

SEQ ID NO: 9999 - protein, 397 aa, Homo sapiens
MHHVFKDHQRGEKRGFLSPENKNCRRLELRRGCSCSWGLCSQALMASLAGSLLPGSDRSGVETSEYAQGGVSDLQEEGKNAINSPMSPALVDVHPEDTQLEENEERTMIDPTSKEDPKFKELVKVLLDWINDVLVEERIIVKQLEEDLYDGQVLQKLLEKLAGCKLNVAEVTQSEIGQKQKLQTVLEAVHDLLRPRGWALRWSVDSIHGKNLVAILHLLVSLAMHFRAPIRLPEHVTVQVVVVRKREGLLHSSHISEELTTTTEMMMGRFERDAFDTLFDHAPDKLSVVKKSLITFVNKHLNKLNLEVTELETQFADGVYLVLLMGLLEDYFVPLHHFYLTPESFDQKVHNVSFAFELMLDGGLKKPKARPEDVVNLDLKSTLRVLYNLFTKYKNVE

SEQ ID NO: 10000 - protein, 194 aa, Homo sapiens
MPRLKCSGAVIAHCSLELLASSDPSASASQGARTTVSDLQEEGKNAINSPMSPALVDVHPEDTQLEENEERTMIDPTSKEDPKFKELVKVLLDWINDVLVEERIIVKQLEEDLYDGQVLQKLLEKLAGCKLNVAEVTQSEIGQKQKLQTVLEAVHDLLRPRGWALRWSVDSIHGKNLVAILHLLVSLAMHFRAP

SEQ ID NO: 10001 - protein, 327 aa, Homo sapiens
MSDLQEEGKNAINSPMSPALVDVHPEDTQLEENEERTMIDPTSKEDPKFKELVKVLLDWINDVLVEERIIVKQLEEDLYDGQVLQKLLEKLAGCKLNVAEVTQSEIGQKQKLQTVLEAVHDLLRPRGWALRWSVDSIHGKNLVAILHLLVSLAMHFRAPIRLPEHVTVQVVVVRKREGLLHSSHISEELTTTTEMMMGRFERDAFDTLFDHAPDKLSVVKKSLITFVNKHLNKLNLEVTELETQFADGVYLVLLMGLLEDYFVPLHHFYLTPESFDQKVHNVSFAFELMLDGGLKKPKARPEDVVNLDLKSTLRVLYNLFTKYKNVE

SEQ ID NO: 10002 - protein, 289 aa, Homo sapiens
MSPALVDVHPEDTQLEENEERTMIDPTSKEDPKFKELVKVLLDWINDVLVEERIIVKQLEEDLYDGQVLQKLLEKLAGCKLNVAEVTQSEIGQKQKLQTVLEAVHDLLRPRGWALRWSVDSIHGKNLVAILHLLVSLAMHFRAPIRLPEHVTVQVVVVRKREGLLHSSHISEELTTTTEMMMGRFERDAFDTLFDHAPDKLSVVKKFADGVYLVLLMGLLEDYFVPLHHFYLTPESFDQKVHNVSFAFELMLDGGLKKPKARPEDVVNLDLKSTLRVLYNLFTKYKNVE

SEQ ID NO: 10003 - protein, 364 aa, Homo sapiens
MSSAPRSPTPRPRRMKKDESFLGKLGGTLARKRRAREVSDLQEEGKNAINSPMSPALVDVHPEDTQLEENEERTMIDPTSKEDPKFKELVKVLLDWINDVLVEERIIVKQLEEDLYDGQVLQKLLEKLAGCKLNVAEVTQSEIGQKQKLQTVLEAVHDLLRPRGWALRWSVDSIHGKNLVAILHLLVSLAMHFRAPIRLPEHVTVQVVVVRKREGLLHSSHISEELTTTTEMMMGRFERDAFDTLFDHAPDKLSVVKKSLITFVNKHLNKLNLEVTELETQFADGVYLVLLMGLLEDYFVPLHHFYLTPESFDQKVHNVSFAFELMLDGGLKKPKARPEDVVNLDLKSTLRVLYNLFTKYKNVE

SEQ ID NO: 10004 - protein, 114 aa, Homo sapiens
MDKSLLLELPILLCCFRALSGSLSMRNDAVIEIVQCRMCHLQFPGEKCSRGRGICTATTEEACMVGRMFKRDGNPWLTFMGCLKNCADVKGIRWSVYLVNFRCCRSHDLCNEDL

SEQ ID NO: 10005 - protein, 126 aa, Homo sapiens
MDKSLLLELPILLCCFRALSGSLSMRNDAVNEIVAVKNNFPVIEIVQCRMCHLQFPGEKCSRGRGICTATTEEACMVGRMFKRDGNPWLTFMGCLKNCADVKGIRWSVYLVNFRCCRSHDLCNEDL

SEQ ID NO: 10006 - protein, 113 aa, Homo sapiens
MLVLFLLGTVFLLCPYWGELHDPIKATEIMCYECKKYHLGLCYGVMTSCSLKHKQSCAVENFYILTRKGQSMYHYSKLSCMTSCEDINFLGFTKRVELICCDHSNYCNLPEGV

SEQ ID NO: 10007 - protein, 70 aa, Homo sapiens
MLVLFLLGTVFLLCPYWGELHDPIKGQSMYHYSKLSCMTSCEDINFLGFTKRVELICCDHSNYCNLPEGV

SEQ ID NO: 10008 - protein, 98 aa, Homo sapiens
MNKHFLFLFLLYCLIVAVTSLQCITCHLRTRTDRCRRGFGVCTAQKGEACMLLRIYQRNTLQISYMVCQKFCRDMTFDLRNRTYVHTCCNYNYCNFKL

SEQ ID NO: 10009 - protein, 59 aa, Homo sapiens
MRKMNTLLLVSLSFLYLKEGDKHMYSTHMCKYKCREEESSKRGLLRVTLCCDRNFCNVF

SEQ ID NO: 10010 - protein, 98 aa, Homo sapiens
MRKMNTLLLVSLSFLYLKEVMGLKCNTCIYTEGWKCMAGRGTCIAKENELCSTTAYFRGDKHMYSTHMCKYKCREEESSKRGLLRVTLCCDRNFCNVF

SEQ ID NO: 10011 - protein, 125 aa, Homo sapiens
MLGMSLASLHFLWQTLDYLSPIPFWPTFPSTSSPAQHFGPRLPSPDPTLFCSLLTSWPPRFSHLTQLHPRHQRILQQQQHSQTPREPHFLLTTLLRKCQWWVSLKGCSSWLKVPQPRSLGLSSQT

SEQ ID NO: 10012 - protein, 543 aa, Homo sapiens
MNCLEGPGKTCGPLASEEELVSACQLEKEEENEGEEEEEEEDEEDLDPDLDPDLEEEENDLGDPAVLGAVHNTQRALLSSPGVKAPGMLGMSLASLHFLWQTLDYLSPIPFWPTFPSTSSPAQHFGPRLPSPDPTLFCSLLTSWPPRFSHLTQLHPRHQRILQQQQHSQTPSPPAKKPWSQQPDPYANLMTRKEKDWVIKVQMVQLQSAKPRLDDYYYQEYYQKLEKKQADEELLGRRNRVESLKLVTPYIPKAEAYESVVRIEGSLGQVAVSTCFSPRRAIDAVPHGTQEQDIEAASSQRLRVLYRIEKMFLQLLEIEEGWKYRPPPPCFSEQQSNQVEKLFQTLKTQEQNNLEEAADGFLQVLSVRKGKALVARLLPFLPQDQAVTILLAITHHLPLLVRRDVADQALQMLFKPLGKCISHLTLHELLQGLQGLTLLPPGSSERPVTVVLQNQFGISLLYALLSHGEQLVSLHSSLEEPNSDHTAWTDMVVLIAWEIAQMPTASLAEPLAFPSNLLPLFCHHVDKQLVQQLEARMEFAWIY

SEQ ID NO: 10013 - protein, 543 aa, Homo sapiens; identical to SEQ ID NO: 10012

SEQ ID NO: 10014 - protein, 354 aa, Homo sapiens
MTRKEKDWVIKVQMVQLQSAKPRLDDYYYQEYYQKLEKKQADEELLGRRNRVESLKLVTPYIPKAEAYESVVRIEGSLGQVAVSTCFSPRRAIDAVPHGTQEQDIEAASSQRLRVLYRIEKMFLQLLEIEEGWKYRPPPPCFSEQQSNQVEKLFQTLKTQEQNNLEEAADGFLQVLSVRKGKALVARLLPFLPQDQAVTILLAITHHLPLLVRRDVADQALQMLFKPLGKCISHLTLHELLQGLQGLTLLPPGSSERPVTVVLQNQFGISLLYALLSHGEQLVSLHSSLEEPNSDHTAWTDMVVLIAWEIAQMPTASLAEPLAFPSNLLPLFCHHVDKQLVQQLEARMEFAWIY

SEQ ID NO: 10015 - protein, 158 aa, Homo sapiens
QALQMLFKPLGKCISHLTLHELLQGLQGLTLLPPGSSERPVTVVLQNQDRHGGSDCLGDSPNAYSLSGRTPSFPQQPTSPVLSPRGQTIGSAAGGQDGVCLDLLICLFWNTCMWEVESSDTSYIDYVYRDPESLKTFLMPLYIGEPFPIFISFLQKSK

SEQ ID NO: 10016 - protein, 188 aa, Homo sapiens
  SITE 1: note = misc_feature - Xaa can be any naturally occurring amino acid
XENEGEEEEEEEDEEDLDPDLDPDLEEEENDLGDPAVLGAVHNTQRALLSSPGVKAPGMLGMSLASLHFLWQTLDYLSPIPFWPTFPSTSSPAQHFGPRLPSPDPTLFCSLLTSWPPRFSHLTQLHPRHQRILQQQQHSQTPREPHFLLTTLLRKCQWWVSLKGCSSWLKVPQPRSLGLSSQTPMLTS

SEQ ID NO: 10017 - protein, 304 aa, Homo sapiens
MAGPCCVWGVVFFSCLSPAGHGGVNQLGGVFVNGRPLPDVVRQRIVELAHQGVRPCDISRQLRVSHGCVSKILGRYYETGSIKPGVIGGSKPKVATPKVVDKIAEYKRQNPTMFAWEIRDRLLAEGICDNDTVPSVSSINRIIRTKVQQPFHPTPDGAGTGVTAPGHTIVPSTASPPVSSASNDPVGSYSINGILGIPRSNDVSEGSVPNGDSQSGVDSLRKHLRADTFTQQQLEALDRVFERPSYPDVFQASEHIKSEQGNEYSLPALTPGLDEVKSSLSASTNPELGSNVSGTQTYPVVTGR

SEQ ID NO: 10018 - protein, 396 aa, Homo sapiens
MDMHCKADPFSAMHPGHGGVNQLGGVFVNGRPLPDVVRQRIVELAHQGVRPCDISRQLRVSHGCVSKILGRYYETGSIKPGVIGGSKPKVATPKVVDKIAEYKRQNPTMFAWEIRDRLLAEGICDNDTVPSVSSINRIIRTKVQQPFHPTPDGAGTGVTAPGHTIVPSTASPPVSSASNDPVGSYSINGILGIPRSNGEKRKRDEDVSEGSVPNGDSQSGVDSLRKHLRADTFTQQQLEALDRVFERPSYPDVFQASEHIKSEQGNEYSLPALTPGLDEVKSSLSASTNPELGSNVSGTQTYPVVTGRDMASTTLPGYPPHVPPTGQGSYPTSTLAGMVPEAAVGPSSSLMSKPGRKLAEVPPCVQPTGASSPATRTATPSTRPTTRLGDSATPPY

SEQ ID NO: 10019 - protein, 394 aa, Homo sapiens
MDMHCKADPFSAMHPGHGGVNQLGGVFVNGRPLPDVVRQRIVELAHQGVRPCDISRQLRVSHGCVSKILGRYYETGSIKPGVIGGSKPKVATPKVVDKIAEYKRQNPTMFAWEIRDRLLAEGICDNDTVPSVSSINRIIRTKVQQPFHPTPDGAGTGVTAPGHTIVPSTASPPVSSASNDPVGSYSINGILGIPRSNGEKRKRDEDVSEGSVPNGDSQSGVDSLRKHLRADTFTQQQLEALDRVFERPSYPDVFQASEHIKSEQGNEYSLPALTPGLDEVKSSLSASTNPELGSNVSGTQTYPVVTGRDMASTTLPGYPPHVPPTGQGSYPTSTLAGMVPGSEFSGNPYSHPQYTAYNEAWRFSNPALLSSPYYYSAAPRGSAPAAAAAAYDRH

SEQ ID NO: 10020 - protein, 214 aa, Homo sapiens
MDMHCKADPFSAMHPGHGGVNQLGGVFVNGRPLPDVVRQRIVELAHQGVRPCDISRQLRVSHGCVSKILGRYYETGSIKPGVIGGSKPKVATPKVVDKIAEYKRQNPTMFAWEIRDRLLAEGICDNDTVPSVSSINRIIRTKVQQPFHPTPDGAGTGVTAPGHTIVPSTASPPVSSASNDPVGSYSINGILGIPRSNGEKRKRDEVEVYTDPAH

SEQ ID NO: 10021 - protein, 417 aa, Homo sapiens
MDMHCKADPFSAMHPGHGGVNQLGGVFVNGRPLPDVVRQRIVELAHQGVRPCDISRQLRVSHGCVSKILGRYYETGSIKPGVIGGSKPKVATPKVVDKIAEYKRQNPTMFAWEIRDRLLAEGICDNDTVPSVSSINRIIRTKVQQPFHPTPDGAGTGVTAPGHTIVPSTASPPVSSASNDPVGSYSINGILGIPRSNGEKRKRDEVEVYTDPAHIRGGGGLHLVWTLRDVSEGSVPNGDSQSGVDSLRKHLRADTFTQQQLEALDRVFERPSYPDVFQASEHIKSEQGNEYSLPALTPGLDEVKSSLSASTNPELGSNVSGTQTYPVVTGRDMASTTLPGYPPHVPPTGQGSYPTSTLAGMVPGSEFSGNPYSHPQYTAYNEAWRFSNPALLSSPYYYSAAPRGSAPAAAAAAYDRH

SEQ ID NO: 10022 - protein, 393 aa, Homo sapiens
MDMHCKADPFSAMHRHGGVNQLGGVFVNGRPLPDVVRQRIVELAHQGVRPCDISRQLRVSHGCVSKILGRYYETGSIKPGVIGGSKPKVATPKVVDKIAEYKRQNPTMFAWEIRDRLLAEGICDNDTVPSVSSINRIIRTKVQQPFHPTPDGAGTGVTAPGHTIVPSTASPPVSSASNDPVGSYSINGILGIPRSNGEKRKRDEDVSEGSVPNGDSQSGVDSLRKHLRADTFTQQQLEALDRVFERPSYPDVFQASEHIKSEQGNEYSLPALTPGLDEVKSSLSASTNPELGSNVSGTQTYPVVTGRDMASTTLPGYPPHVPPTGQGSYPTSTLAGMVPGSEFSGNPYSHPQYTAYNEAWRFSNPALLSSPYYYSAAPRGSAPAAAAAAYDRH

SEQ ID NO: 10023 - protein, 257 aa, Homo sapiens
MAWSSKSWLCLIASSCPRDTLLPSAHHASPVPASHLTQVSNGCVSKILGRYYRTGVLEPKGIGGSKPRLATPPVVARIAQLKGECPALFAWEIQRQLCAEGLCTQDKTPSVSSINRVLRALQEDQGLPCTRLRSPAVLAPAVLTPHSGSETPRGTHPGTGHRNRTIFSPSQAEALEKEFQRGQYPDSVARGKLATATSLPEDTVRVWFSNRRAKWRRQEKLKWEMQLPGASQGLTVPRVAPGIISAQGPTVFMSRKY

SEQ ID NO: 10024 - protein, 257 aa, Homo sapiens; identical to SEQ ID NO: 10023

SEQ ID NO: 10025 - protein, 341 aa, Homo sapiens
MAWSSKSWLCLIASSCPRDTLLPSAHHASPVPASHLTQVSNGCVSKILGRYYRTGVLEPKGIGGSKPRLATPPVVARIAQLKGECPALFAWEIQRQLCAEGLCTQDKTPSVSSINRVLRALQEDQGLPCTRLRSPAVLAPAVLTPHSGSETPRGTHPGTGHRNRTIFSPSQAEALEKEFQRGQYPDSVARGKLATATSLPEDTVRVWFSNRRAKWRRQEKLKWEMQLPGASQGLTVPRVAPGIISAQQSPGSVPTAALPALEPLGPSCYQLCWATAPERCLSDTPPKACLKPCWGHLPPQPNSLDSGLLCLPCPSSHCHLASLSGSQALLWPGCPLLYGLE

SEQ ID NO: 10026 - protein, 348 aa, Homo sapiens
MHQDGISSMNQLGGLFVNGRPLPLDTRQQIVRLAVSGMRPCDISRILKVSNGCVSKILGRYYRTGVLEPKGIGGSKPRLATPPVVARIAQLKGECPALFAWEIQRQLCAEGLCTQDKTPSVSSINRVLRALQEDQGLPCTRLRSPAVLAPAVLTPHSGSETPRGTHPGTGHRNRTIFSPSQAEALEKEFQRGQYPDSVARGKLATATSLPEDTVRVWFSNRRAKWRRQEKLKWEMQLPGASQGLTVPRVAPGIISAQQSPGSVPTAALPALEPLGPSCYQLCWATAPERCLSDTPPKACLKPCWDCGSFLLPVIAPSCVDVAWPCLDASLAHHLIGGAGKATPTHFSH

SEQ ID NO: 10027 - protein, 349 aa, Homo sapiens
MHQDGISSMNQLGGLFVNGRPLPLDTRQQIVRLAVSGMRPCDISRILKVSNGCVSKILGRYYRTGVLEPKGIGGSKPRLATPPVVARIAQLKGECPALFAWEIQRQLCAEGLCTQDKTPSVSSINRVLRALQEDQGLPCTRLRSPAVLAPAVLTPHSGSETPRGTHPGTGHRNRTIFSPSQAEALEKEFQRGQYPDSVARGKLATATSLPEDTVRVWFSNRRAKWRRQEKLKWEMQLPGASQGLTVPRVAPGIISAQQSPGSVPTAALPALEPLGPSCYQLCWATAPERCLSDTPPKACLKPCWDCGSFLLPVIAPSCVDVAWPCLDASLAHHLIGGAGKATPTHFSHP

SEQ ID NO: 10028 - protein, 351 aa, Homo sapiens
MHQDGISSMNQLGGLFVNGRPLPLDTRQQIVRLAVSGMRPCDISRILKVSNGCVSKILGRYYRTGVLEPKGIGGSKPRLATPPVVARIAQLKGECPALFAWEIQRQLCAEGLCTQDKTPSVSSINRVLRALQEDQGLPCTRLRSPAVLAPAVLTPHSGSETPRGTHPGTGHRNRTIFSPSQAEALEKEFQRGQYPDSVARGKLATATSLPEDTVRVWFSNRRAKWRRQEKLKWEMQLPGASQGLTVPRVAPGIISAQQSPGSVPTAALPALEPLGPSCYQLCWATAPERCLSDTPPKACLKPCWGHLPPQPNSLDSGLLCLPCPSSHCHLASLSGSQALLWPGCPLLYGLE

SEQ ID NO: 10029 - protein, 343 aa, Homo sapiens
MNQLGGLFVNGRPLPLDTRQQIVRLAVSGMRPCDISRILKVSNGCVSKILGRYYRTGVLEPKGIGGSKPRLATPPVVARIAQLKGECPALFAWEIQRQLCAEGLCTQDKTPSVSSINRVLRALQEDQGLPCTRLRSPAVLAPAVLTPHSGSETPRGTHPGTGHRNRTIFSPSQAEALEKEFQRGQYPDSVARGKLATATSLPEDTVRVWFSNRRAKWRRQEKLKWEMQLPGASQGLTVPRVAPGIISAQQSPGSVPTAALPALEPLGPSCYQLCWATAPERCLSDTPPKACLKPCWGHLPPQPNSLDSGLLCLPCPSSHCHLASLSGSQALLWPGCPLLYGLE

SEQ ID NO: 10030 - protein, 423 aa, Homo sapiens
MAAALRVAAVGARLSVLASGLRAAVRSLCSQAITVGAPVIGLNDSGGARIQEGVESLAGYADIFLRNVTASGVIPQISLIMGPCAGGAVYSPALTDFTFMVKDTSYLFITGPDVVKSVTNEDVTQEELGGAKTHTTMSGVAHRAFENDVDALCNLRDFFNYLPLSSQDPAPVRECHDPSDRLVPELDTIVPLESTKAYNMVDIIHSVVDEREFFEIMPNYAKNIIVGFARMNGRTVGIVGNQPKVASGCLDINSSVKGARFVRFCDAFNIPLITFVDVPGFLPGTAQEYGGIIRHGAKLLYAFAEATVPKVTVITRKAYGGAYDVMSSKHLCGDTNYAWPTAEIAVMGAKGAVEIIFKGHENVEAAQAEYIEKFANPFPAAVRGFVDDIIQPSSTRARICCDLDVLASKKVQRPWRKHANIPL

SEQ ID NO: 10031 - protein, 192 aa, Homo sapiens [sequence omitted]

SEQ ID NO: 10032 - protein, 516 aa, Homo sapiens
MAAALRVAAVGARLSVLASGLRAAVRSLCSQATSVNERIENKRRTALLGGGQRRIDAQHKRGKLTARERISLLLDPGSFVESDMFVEHRCADFGMAADKNKDFTVFGGSLSGAHAQKICKIMDQAITVGAPVIGLNDSGGARIQEGVESLAGYADIFLRNVTASGVIPQISLIMGPCAGGAVYSPALTDFTFMVKDTSYLFITGPDVVKSVTNEDVTQEELGGAKTHTTMSGVAHRAFENDVDALCNLRDFFNYLPLSSQDPAPVRECHDPSDRLVPELDTIVPLESTKAYNMVDIIHSVVDEREFFEIMPNYAKNIIVGFARMNGRTVGIVGNQPKVASGCLDINSSVKGARFVRFCDAFNIPLITFVDVPGFLPGTAQEYGGIIRHGAKLLYAFAEATVPKVTVITRKAYGGAYDVMSSKHLCGDTNYAWPTAEIAVMGAKGAVEIIFKGHENVEAAQAEYIEKFANPFPAAVRGFVDDIIQPSSTRARICCDLDVLASKKVQRPWRKHANIPL

SEQ ID NO: 10033 - protein, 539 aa, Homo sapiens
MAAALRVAAVGARLSVLASGLRAAVRSLCSQATSVNERIENKRRTALLGGGQRRIDAQHKRGKLTARERISLLLDPGSFVESDMFVEHRCADFGMAADKNKFPGDSVVTGRGRINGRLVYVFSQDFTVFGGSLSGAHAQKICKIMDQAITVGAPVIGLNDSGGARIQEGVESLAGYADIFLRNVTASGVIPQISLIMGPCAGGAVYSPALTDFTFMVKDTSYLFITGPDVVKSVTNEDVTQEELGGAKTHTTMSGVAHRAFENDVDALCNLRDFFNYLPLSSQDPAPVRECHDPSDRLVPELDTIVPLESTKAYNMVDIIHSVVDEREFFEIMPNYAKNIIVGFARMNGRTVGIVGNQPKVASGCLDINSSVKGARFVRFCDAFNIPLITFVDVPGFLPGTAQEYGGIIRHGAKLLYAFAEATVPKVTVITRKAYGGAYDVMSSKHLCGDTNYAWPTAEIAVMGAKGAVEIIFKGHENVEAAQAEYIEKFANPFPAAVRGFVDDIIQPSSTRARICCDLDVLASKKVQRPWRKHANIPL

SEQ ID NO: 10034 - protein, 559 aa, Homo sapiens
MAAALRVAAVGARLSVLASGLRAAVRSLCSQATSVNERIENKRRTALLGGGQRRIDAQHKRGKLTARERISLLLDPGSFVESDMFVEHRCADFGMAADKNKFPGDSVVTGRGRINGRLVYVFSQDFTVFGGSLSGAHAQKICKIMDQAITVGAPVIGLNDSGGARIQEGVESLAGYADIFLRNVTASGVIPQISLIMGPCAGGAVYSPALTDFTFMVKDTSYLFITGPDVVKSVTNEDVTQEELGGAKTHTTMSGVAHRAFENDVDALCNLRDFFNYLPLSSQDPAPVRECHDPSDRLVPELDTIVPLESTKAYNMVDIIHSVVDEREFFEIMPNYAKNIIVGFARMNGRTVGIVGNQPKVASDSISFTPWNYARRQYRPYFAGCLDINSSVKGARFVRFCDAFNIPLITFVDVPGFLPGTAQEYGGIIRHGAKLLYAFAEATVPKVTVITRKAYGGAYDVMSSKHLCGDTNYAWPTAEIAVMGAKGAVEIIFKGHENVEAAQAEYIEKFANPFPAAVRGFVDDIIQPSSTRARICCDLDVLASKKVQRPWRKHANIPL

SEQ ID NO: 10035 - protein, 303 aa, Homo sapiens
MAAALRVAAVGARLSVLASGLRAAVRSLCSQATSVNERIENKRRTALLGGGQRRIDAQHKRGKLTARERISLLLDPGSFVESDMFVEHRCADFGMAADKNKFPGDSVVTGRGRINGRLVYVFSQDFTVFGGSLSGAHAQKICKIMDQAITVGAPVIGLNDSGGARIQEGVESLAGYADIFLRNVTASGVIPQISLIMGPCAGGAVYSPALTDFTFMVKDTSYLFITGPDVVKSVTNEDVTQEELGGAKTHTTMSGVAHRAFENDVDALCNLRDFFNYLPLSSQDPAPVRECHDPSPTFCLWLH

SEQ ID NO: 10036 - protein, 550 aa, Homo sapiens
MAAALRVAAVGARLSVLASGLRAAVRSLCSQATSVNERIENKRRTALLGGGQRRIDAQHKRGKLTARERISLLLDPGSFVESDMFVEHRCADFGMAADKNKFPGDSVVTGRGRINGRLVYVFSQDFTVFGGSLSGAHAQKICKIMDQAITVGAPVIGLNDSGGARIQEGVESLAGYADIFLRNVTASGVIPQISLIMGPCAGGAVYSPALTDFTFMVKDTSYLFITGPDVVKSVTNEDVTQEELGGAKTHTTMSGVAHRAFENDVDALCNLRDFFNYLPLSSQDPAPVRECHDPSDRLVPELDTIVPLESTKAYNMVDIIHSVVDEREFFEIMPNYAKNIIVGFARMNGRTVGIVGNQPKVASGCLDINSSVKGARFVRFCDAFNIPLITFVDVPGFLPGTAQEYGGIIRHGAKLLYAFAEATVPKVTVITRKAYGGAYDVMSSKHLCGDTNYAWPTAEIAVMGAKGAVEIIFKGHENVEAAQAEYIEKFANPFPAAVRGFVDDIIQPSSTRARICCDLDVLASKKVRVQEVFHQVVQSGHRDGRGAVRW

SEQ ID NO: 10037 - protein, 405 aa, Homo sapiens
MAAALRVAAVGARLSVLASGLRAAVRSLCSQATSVNERIENKRRTALLGGGQRRIDAQHKRGKLTARERISLLLDPGSFVESDMFVEHRCADFGMAADKNKFPGDSVVTGRGRINGRLVYVFSQDFTVFGGSLSGAHAQKICKIMDQAITVGAPVIGLNDSGGARIQEGVESLAGYADIFLRNVTASGVIPQISLIMGPCAGGAVYSPALTDFTFMVKDTSYLFITGPDVVKSVTNEDVTQEELGGAKTHTTMSGVAHRAFENDVDALCNLRDFFNYLPLSSQDPAPVRECHDPSDRLVPELDTIVPLESTKAYNMVDIIHSVVDEREFFEIMPNYAKNIIVGFARMNGRTVGIVGNQPKVASGCLDINSSVKGARFVRFCDAFNIPLITFVDVPGFLPGLWRCL

SEQ ID NO: 10038 - protein, 520 aa, Homo sapiens
MAAALRVAAVGARLSVLASGLRAAVRSLCSQATSVNERIENKRRTALLGGGQRRIDAQHKRGKLTARERISLLLDPGSFVESDMFVEHRCADFGMAADKNKFPGDSVVTGRGRINGRLVYVFSQIMDQAITVGAPVIGLNDSGGARIQEGVESLAGYADIFLRNVTASGVIPQISLIMGPCAGGAVYSPALTDFTFMVKDTSYLFITGPDVVKSVTNEDVTQEELGGAKTHTTMSGVAHRAFENDVDALCNLRDFFNYLPLSSQDPAPVRECHDPSDRLVPELDTIVPLESTKAYNMVDIIHSVVDEREFFEIMPNYAKNIIVGFARMNGRTVGIVGNQPKVASGCLDINSSVKGARFVRFCDAFNIPLITFVDVPGFLPGTAQEYGGIIRHGAKLLYAFAEATVPKVTVITRKAYGGAYDVMSSKHLCGDTNYAWPTAEIAVMGAKGAVEIIFKGHENVEAAQAEYIEKFANPFPAAVRGFVDDIIQPSSTRARICCDLDVLASKKVQRPWRKHANIPL

SEQ ID NO: 10039 - protein, 570 aa, Homo sapiens
MAAALRVAAVGARLSVLASGLRAAVRSLCSQATSVNERIENKRRTALLGGGQRRIDAQHKRGKLTARERISLLLDPGSFVESDMFVEHRCADFGMAADKNKFPGDSVVTGRGRINGRLVYVFSQIRASAMSPRLVSDSWTQAIHLPWPPKVLGLQDFTVFGGSLSGAHAQKICKIMDQAITVGAPVIGLNDSGGARIQEGVESLAGYADIFLRNVTASGVIPQISLIMGPCAGGAVYSPALTDFTFMVKDTSYLFITGPDVVKSVTNEDVTQEELGGAKTHTTMSGVAHRAFENDVDALCNLRDFFNYLPLSSQDPAPVRECHDPSDRLVPELDTIVPLESTKAYNMVDIIHSVVDEREFFEIMPNYAKNIIVGFARMNGRTVGIVGNQPKVASGCLDINSSVKGARFVRFCDAFNIPLITFVDVPGFLPGTAQEYGGIIRHGAKLLYAFAEATVPKVTVITRKAYGGAYDVMSSKHLCGDTNYAWPTAEIAVMGAKGAVEIIFKGHENVEAAQAEYIEKFANPFPAAVRGFVDDIIQPSSTRARICCDLDVLASKKVQRPWRKHANIPL

SEQ ID NO: 10040 - protein, 559 aa, Homo sapiens
MAAALRVAAVGARLSVLASGLRAAVRSLCSQATSVNERIENKRRTALLGGGQRRIDAQHKRGKLTARERISLLLDPGSFVESDMFVEHRCADFGMAADKNKFPGDSVVTGRGRINGRLVYVFSQQIIGWAQWLPLVISALWEAEDFTVFGGSLSGAHAQKICKIMDQAITVGAPVIGLNDSGGARIQEGVESLAGYADIFLRNVTASGVIPQISLIMGPCAGGAVYSPALTDFTFMVKDTSYLFITGPDVVKSVTNEDVTQEELGGAKTHTTMSGVAHRAFENDVDALCNLRDFFNYLPLSSQDPAPVRECHDPSDRLVPELDTIVPLESTKAYNMVDIIHSVVDEREFFEIMPNYAKNIIVGFARMNGRTVGIVGNQPKVASGCLDINSSVKGARFVRFCDAFNIPLITFVDVPGFLPGTAQEYGGIIRHGAKLLYAFAEATVPKVTVITRKAYGGAYDVMSSKHLCGDTNYAWPTAEIAVMGAKGAVEIIFKGHENVEAAQAEYIEKFANPFPAAVRGFVDDIIQPSSTRARICCDLDVLASKKVQRPWRKHANIPL

SEQ ID NO: 10041 - protein, 482 aa, Homo sapiens
MAAALRVAAVGARLSVLASGLRAAVRSLCSQATSVNERIENKRRTALLGGGQRRIDAQHKRGKLTARERISLLLDPGSFVESDMFVEHRCADFGMAADKNKFPGDSVVTGRGRINGRLVYVFSQRNVTASGVIPQISLIMGPCAGGAVYSPALTDFTFMVKDTSYLFITGPDVVKSVTNEDVTQEELGGAKTHTTMSGVAHRAFENDVDALCNLRDFFNYLPLSSQDPAPVRECHDPSDRLVPELDTIVPLESTKAYNMVDIIHSVVDEREFFEIMPNYAKNIIVGFARMNGRTVGIVGNQPKVASGCLDINSSVKGARFVRFCDAFNIPLITFVDVPGFLPGTAQEYGGIIRHGAKLLYAFAEATVPKVTVITRKAYGGAYDVMSSKHLCGDTNYAWPTAEIAVMGAKGAVEIIFKGHENVEAAQAEYIEKFANPFPAAVRGFVDDIIQPSSTRARICCDLDVLASKKVQRPWRKHANIPL

SEQ ID NO: 10042 - protein, 84 aa, Homo sapiens
MFVEHRCADFGMAADKNKFPGDSVVTGRGRINGRLVYVFSQDFTVFGGSLSGAHAQKICKIMDQAITVGAPVIGLNDSGGARIQ

SEQ ID NO: 10043 - protein, 134 aa, Homo sapiens
MFVEHRCADFGMAADKNKFPGDSVVTGRGRINGRLVYVFSQDFTVFGGSLSGAHAQKICKIMDQAITVGAPVIGLNDSGGARIQEGVESLAGYADIFLRNVTASGVIPQISLIMGPCAGGAVYSPALTDFTFMV

SEQ ID NO: 10044 - protein, 163 aa, Homo sapiens
  SITE 1: note = misc_feature - Xaa can be any naturally occurring amino acid
XESSWPSEISWAAHFGEGKLTARERISLLLDPGSFVESDMFVEHRCADFGMAADKNKFPGDSVVTGRGRINGRLVYVFSQDFTVFGGSLSGAHAQKICKIMDQAITVGAPVIGLNDSGGARIQEGVESLAGYADIFLRNVTASGVIPQISLIMGPCAGGAVYS

SEQ ID NO: 10045 - protein, 1237 aa, Homo sapiens
MDSGAGGRRCPEAALLILGPPRMEHLRHSPGPGGQRLLLPSMLLALLLLLAPSPGHATRVVYKVPEEQPPNTLIGSLAADYGFPDVGHLYKLEVGAPYLRVDGKTGDIFTTETSIDREGLRECQNQLPGDPCILEFEVSITDLVQNGSPRLLEGQIEVQDINDNTPNFASPVITLAIPENTNIGSLFPIPLASDRDAGPNGVASYELQAGPEAQELFGLQVAEDQEEKQPQLIVMGNLDRERWDSYDLTIKVQDGGSPPRASSALLRVTVLDTNDNAPKFERPSYEAELSENSPIGHSVIQVKANDSDQGANAEIEYTFHQAPEVVRRLLRLDRNTGLITVQGPVDREDLSTLRFSVLAKDRGTNPKSARAQVVVTVKDMNDNAPTIEIRGIGLVTHQDGMANISEDVAEETAVALVQVSDRDEGENAAVTCVVAGDVPFQLRQASETGSDSKKKYFLQTTTPLDYEKVKDYTIEIVAVDSGNPPLSSTNSLKVQVVDVNDNAPVFTQSVTEVAFPENNKPGEVIAEITASDADSGSNAELVYSLEPEPAAKGLFTISPETGEIQVKTSLDREQRESYELKVVAADRGSPSLQGTATVLVNVLDCNDNDPKFMLSGYNFSVMENMPALSPVGMVTVIDGDKGENAQVQLSVEQDNGDFVIQNGTGTILSSLSFDREQQSTYTFQLKAVDGGVPPRSAYVGVTINVLDENDNAPYITAPSNTSHKLLTPQTRLGETVSQVAAEDFDSGVNAELIYSIAGGNPYGLFQIGSHSGAITLEKEIERRHHGLHRLVVKVSDRGKPPRYGTALVHLYVNETLANRTLLETLLGHSLDTPLDIDIAGDPEYERSKQRGNILFGVVAGVVAVALLIALAVLVRYCRQREAKSGYQAGKKETKDLYAPKPSGKASKGNKSKGKKSKSPKPVKPVEDEDEAGLQKSLKFNLMSDAPGDSPRIHLPLNYPPGSPDLGRHYRSNSPLPSIQLQPQSPSASKKHQVVQDLPPANTFVGTGDTTSTGSEQYSDYSYRTNPPKYPSKQLPHRRVTFSATSQAQELQDPSQHSYYDSGLEESETPSSKSSSGPRLGPLALPEDHYERTTPDGSIGEMEHPENDLRPLPDVAMTGTCTRECSEFGHSDTCWMPGQSSPSRRTKSSALKLSTFVPYQDRGGQEPAGAGSPSPPEDRNTKTAPVRLLPSYSAFSHSSHDSCKDSATLEEIPLTQTSDFPPAATPASAQTAKREIYL

SEQ ID NO: 10046 - protein, 1060 aa, Homo sapiens
MDSGAGGRRCPEAALLILGPPRMEHLRHSPGPGGQRLLLPSMLLALLLLLAPSPGHATRVVYKVPEEQPPNTLIGSLAADYGFPDVGHLYKLEVGAPYLRVDGKTGDIFTTETSIDREGLRECQNQLPGDPCILEFEVSITDLVQNGSPRLLEGQIEVQDINDNTPNFASPVITLAIPENTNIGSLFPIPLASDRDAGPNGVASYELQAGPEAQELFGLQVAEDQEEKQPQLIVMGNLDRERWDSYDLTIKVQDGGSPPRASSALLRVTVLDTNDNAPKFERPSYEAELSENSPIGHSVIQVKANDSDQGANAEIEYTFHQAPEVVRRLLRLDRNTGLITVQGPVDREDLSTLRFSVLAKDRGTNPKSARAQVVVTVKDMNDNAPTIEIRGIGLVTHQDGMANISEDVAEETAVALVQVSDRDEGENAAVTCVVAGDVPFQLRQASETGSDSKKKYFLQTTTPLDYEKVKDYTIEIVAVDSGNPPLSSTNSLKVQVVDVNDNAPVFTQSVTEVAFPENNKPGEVIAEITASDADSGSNAELVYSLEPEPAAKGLFTISPETGEIQVKTSLDREQRESYELKVVAADRGSPSLQGTATVLVNVLDCNDNDPKFMLSGYNFSVMENMPALSPVGMVTVIDGDKGENAQVQLSVEQDNGDFVIQNGTGTILSSLSFDREQQSTYTFQLKAVDGGVPPRSAYVGVTINVLDENDNAPYITAPSNTSHKLLTPQTRLGETVSQVAAEDFDSGVNAELIYSIAGGNPYGLFQIGSHSGAITLEKEIERRHHGLHRLVVKVSDRGKPPRYGTALVHLYVNETLANRTLLETLLGHSLDTPLDIDIAGDPEYERSKQRGNILFGVVAGVVAVALLIALAVLVRYCRQREAKSGYQAGKKETKDLYAPKPSGKASKGNKSKGKKSKSPKPVKPVEDEDEAGLQKSLKFNLMSDAPGDSPRIHLPLNYPPGSPDLGRHYRSNSPLPSIQLQPQSPSASKKHQVVQDLPPANTFVGTGDTTSTGSEQYSDYSYRTNPPKYPSKQVGQPFQLSTPQPLPHPYHGAIWTEVWE

SEQ ID NO: 10047 - protein, 382 aa, Homo sapiens
MDSGAGGRRCPEAALLILGPPRMEHLRHSPGPGGQRLLLPSMLLALLLLLAPSPGHATRVVYKVPEEQPPNTLIGSLAADYGFPDVGHLYKLEVGAPYLRVDGKTGDIFTTETSIDREGLRECQNQLPGDPCILEFEVSITDLVQNGSPRLLEGQIEVQDINDNTPNFASPVITLAIPENTNIGSLFPIPLASDRDAGPNGVASYELQAGPEAQELFGLQVAEDQEEKQPQLIVMGNLDRERWDSYDLTIKVQDGGSPPRASSALLRVTVLDTNDNAPKFERPSYEAELSENSPIGHSVIQLPHRRVTFSATSQAQELQDPSQHSYYDSGLEESETPSSKSSSGPRLGPLALPEDHYERTTPDGSIGEMEHPENEPAGRSRP

SEQ ID NO: 10048 - protein, 150 aa, Homo sapiens
MEHLRHSPGPGGQRLLLPSMLLALLLLLAPSPGHATRVVYKVPEEQPPNTLIGSLAADYGFPDVGHLYKLEVGAPYLRVDGKTGDIFTTETSIDREGLRECQNQLPGDPCILEFEVSITDLVQNGSPRLLEGQIEVQDINDNTPNFASPV

SEQ ID NO: 10049 - protein, 126 aa, Homo sapiens
  SITE 1: note = misc_feature - Xaa can be any naturally occurring amino acid
XGPNGVASYELQAGPEAQELFGLQVAEDQEEKQPQLIVMGNLDRERWDSYDLTIKVQDGGSPPRASSALLRVTVLDTNDNAPKFERPSYEAELSENSPIGHSVIQSLVDWDLEKRLRKKRETDSRG

SEQ ID NO: 10050 - protein, 17 aa, Homo sapiens
  SITE 1: note = misc_feature - Xaa can be any naturally occurring amino acid
XIQVRGPLRITVRVTHH

SEQ ID NO: 10051 - protein, 23 aa, Homo sapiens
MMQLLQLLLGLLGPGGYLFLLGD

SEQ ID NO: 10052 - protein, 1184 aa, Homo sapiens
MMQLLQLLLGLLGPGGYLFLLGDCQEVTTLTVKYQVSEEVPSGTVIGKLSQELGREERRRQAGAAFQVLQLPQALPIQVDSEEGLLSTGRRLDREQLCRQWDPCLVSFDVLATGDLALIHVEIQVLDINDHQPRFPKGEQELEISESASLRTRIPLDRALDPDTGPNTLHTYTLSPSEHFALDVIVGPDETKHAELIVVKELDREIHSFFDLVLTAYDNGNPPKSGTSLVKVNVLDSNDNSPAFAESSLALEIQEDAAPGTLLIKLTATDPDQGPNGEVEFFLSKHMPPEVLDTFSIDAKTGQVILRRPLDYEKNPAYEVDVQARDLGPNPIPAHCKVLIKVLDVNDNIPSIHVTWASQPSLVSEALPKDSFIALVMADDLDSGHNGLVHCWLSQELGHFRLKRTNGNTYMLLTNATLDREQWPKYTLTLLAQDQGLQPLSAKKQLSIQISDINDNAPVFEKSRYEVSTRENNLPSLHLITIKAHDADLGINGKVSYRIQDSPVAHLVAIDSNTGEVTAQRSLNYEEMAGFEFQVIAEDSGQPMLASSVSVWVSLLDANDNAPEVVQPVLSDGKASLSVLVNASTGHLLVPIETPNGLGPAGTDTPPLATHSSRPFLLTTIVARDADSGANGEPLYSIRSGNEAHLFILNPHTGQLFVNVTNASSLIGSEWELEIVVEDQGSPPLQTRALLRVMFVTSVDHLRDSARKPGALSMSMLTVICLAVLLGIFGLILALFMSICRTEKKDNRAYNCREAESTYRQQPKRPQKHIQKADIHLVPVLRGQAGEPCEVGQSHKDVDKEAMMEAGWDPCLQAPFHLTPTLYRTLRNQGNQGAPAESREVLQDTVNLLFNHPRQRNASRENLNLPEPQPATGQPRSRPLKVAGSPTGRLAGDQGSEEAPQRPPASSATLRRQRHLNGKVSPEKESGPRQILRSLVRLSVAAFAERNPVEELTVDSPPVQQISQLLSLLHQGQFQPKPNHRGNKYLAKPGGSRSAIPDTDGPSARAGGQTDPEQEEGPLDPEEDLSVKQLLEEELSSLLDPSTGLALDRLSAPDPAWMARLSLPLTTNYRDNVISPDAAATEEPRTFQTFGKAEAPELSPTGTRLASTFVSEMSSLLEMLLEQRSSMPVEAASEALRRLSVCGRTLSLDLATSAASGMKVQGDPGGKTGTEGKSRGSSSSSRCL

SEQ ID NO: 10053 - protein, 460 aa, Homo sapiens
LVEKKIEDLTEILDRYVQEQIPGAKVVVESIGARRHGDAFSLEDYTKCDLTVYAIDPQTNRAIDRNELFKFLDGKLLDINKDFQPYYGEGGRILEIRTPEAVTSIKKRGESLGYTEGALLALAFIIILCCIPAILVVLVSYRQFKVRQAECTKTARIQAALPAAKPAVPAPAPVAAPPPPPPPPPGAHLYEELGDSSMRGYGSEQQQLLRPSLLKPEELSMESGIDPGQEYGQDYYSYEHGYEMPQYGSRRRLLPPAGQEEYGEVVGEAEEEYEEEEWARKRMIKLVVDREYETSSTGEDSAPECQRNRLHHPSIHSNINGNIYIAQNGSVVRTRRACLTDNLKVASPVRLGGPFKKLDKLAVTHEENVPLNTLSKGPFSTEKMNARPTLVTFAPCPVGTDNTAVKPLRNRLKSTVEQESMIDSKNIKEALEFHSDHTQSDDEELWMGPWNNLHIPMTKL

SEQ ID NO: 10054 - protein, 92 aa, Homo sapiens
MFRQFYLWTCLASGIILGSLFEICLGQYDDDCKLARGGPPATIVAIDEESRNGTILVDNMLIKGTAGGPDPTIELSLKDNVDYWVLMDPVKQ

SEQ ID NO: 10055 - protein, 1915 aa, Homo sapiens
MFRQFYLWTCLASGIILGSLFEICLGQYDDDCKLARGGPPATIVAIDEESRNGTILVDNMLIKGTAGGPDPTIELSLKDNVDYWVLMDPVKQMLFLNSTGRVLDRDPPMNIHSIVVQVQCINKKVGTIIYHEVRIVVRDRNDNSPTFKHESYYATVNELTPVGTTIFTGFSGDNGATDIDDGPNGQIEYVIQYNPDDPDRAQNLNERRTTTTTLTVDVLDGDDLGPMFLPCVLVPNTRDCRPLTYQAAIPELRTPEELNPIIVTPPIQAIDQDRNIQPPSDRPGILYSILVGTPEDYPRFFHMHPRTAELSLLEPVNRDFHQKFDLVIKAEQDNGHPLPAFAGLHIEILDENNQSPYFTMPSYQGYILESAPVGATISDSLNLTSPLRIVALDKDIEDTKDPELHLFLNDYTSVFTVTQTGITRYLTLLQPVDREEQQTYTFSITAFDGVQESEPVIVNIQVMDANDNTPTFPEISYDVYVYTDMRPGDSVIQLTAVDADEGSNGEITYEILVGAQGDFIINKTTGLITIAPGVEMIVGRTYALTVQAADNAPPAERRNSICTVYIEVLPPNNQSPPRFPQLMYSLEISEAMRVGAVLLNLQATDREGDSITYAIENGDPQRVFNLSETTGILTLGKALDRESTDRYILIITASDGRPDGTSTATVNIVVTDVNDNAPVFDPYLPRNLSVVEEEANAFVGQVKATDPDAGINGQVHYSLGNFNNLFRITSNGSIYTAVKLNREVRDYYELVVVATDGAVHPRHSTLTLAIKVLDIDDNSPVFTNSTYTVLVEENLPAGTTILQIEAKDVDLGANVSYRIRSPEVKHFFALHPFTGELSLLRSLDYEAFPDQEASITFLVEAFDIYGTMPPGIATVTVIVKDMNDYPPVFSKRIYKGMVAPDAVKGTPITTVYAEDADPPGLPASRVRYRVDDVQFPYPASIFEVEEDSGRVITRVNLNEEPTTIFKLVVVAFDDGEPVMSSSATVKILVLHPGEIPRFTQEEYRPPPVSELATKGTMVGVISAAAINQSIVYSIVSGNEEDTFGINNITGVIYVNGPLDYETRTSYVLRVQADSLEVVLANLRVPSKSNTAKVYIEIQDENNHPPVFQKKFYIGGVSEDARMFTSVLRVKATDKDTGNYSVMAYRLIIPPIKEGKEGFVVETYTGLIKTAMLFHNMRRSYFKFQVIATDDYGKGLSGKADVLVSVVNQLDMQVIVSNVPPTLVEKKIEDLTEILDRYVQEQIPGAKVVVESIGARRHGDAFSLEDYTKCDLTVYAIDPQTNRAIDRNELFKFLDGKLLDINKDFQPYYGEGGRILEIRTPEAVTSIKKRGESLGYTEGALLALAFIIILCCIPAILVVLVSYRQRQAECTKTARIQAALPAAKPAVPAPAPVAAPPPPPPPPPGAHLYEELGDSSILFLLYHFQQSRGNNSVSEDRKHQQVVMPFSSNTIEAHKSAHVDGSLKSNKLKSARKFTFLSDEDDLSAHNPLYKENISQVSTNSDISQRTDFVDPFSPKIQAKSKSLRGPREKIQRLWSQSVSLPRRLMRKVPNRPEIIDLQQWQGTRQKAENENTGICTNKRGSSNPLLTTEEANLTEKEEIRQGETLMIEGTEQLKSLSSDSSFCFPRPHFSFSTLPTVSRTVELKSEPNVISSPAECSLELSPSRPCVLHSSLSRRETPICMLPIETERNIFENFAHPPNISPSACPLPPPPPISPPSPPPAPAPLAPPPDISPFSLFCPPPSPPSIPLPLPPPTFFPLSVSTSGPPTPPLLPPFPTPLPPPPPSIPCPPPPSASFLSTECVCITGVKCTTNLMPAEKIKSSMTQLSTTTVCKTDPQREPKGILRHVKNLAELEKSVANMYSQIEKNYLRTNVSELQTMCPSEVTNMEITSEQNKGSLNNIVEGTEKQSHSQSTSL

SEQ ID NO: 10056 - protein, 1955 aa, Homo sapiens
MFRQFYLWTCLASGIILGSLFEICLGQYDDDCKLARGGPPATIVAIDEESRNGTILVDNMLIKGTAGGPDPTIELSLKDNVDYWVLMDPVKQMLFLNSTGRVLDRDPPMNIHSIVVQVQCINKKVGTIIYHEVRIVVRDRNDNSPTFKHESYYATVNELTPVGTTIFTGFSGDNGATDIDDGPNGQIEYVIQYNPDDPTSNDTFEIPLMLTGNIVLRKRLNYEDKTRYFVIIQANDRAQNLNERRTTTTTLTVDVLDGDDLGPMFLPCVLVPNTRDCRPLTYQAAIPELRTPEELNPIIVTPPIQAIDQDRNIQPPSDRPGILYSILVGTPEDYPRFFHMHPRTAELSLLEPVNRDFHQKFDLVIKAEQDNGHPLPAFAGLHIEILDENNQSPYFTMPSYQGYILESAPVGATISDSLNLTSPLRIVALDKDIEDTKDPELHLFLNDYTSVFTVTQTGITRYLTLLQPVDREEQQTYTFSITAFDGVQESEPVIVNIQVMDANDNTPTFPEISYDVYVYTDMRPGDSVIQLTAVDADEGSNGEITYEILVGAQGDFIINKTTGLITIAPGVEMIVGRTYALTVQAADNAPPAERRNSICTVYIEVLPPNNQSPPRFPQLMYSLEISEAMRVGAVLLNLQATDREGDSITYAIENGDPQRVFNLSETTGILTLGKALDRESTDRYILIITASDGRPDGTSTATVNIVVTDVNDNAPVFDPYLPRNLSVVEEEANAFVGQVKATDPDAGINGQVHYSLGNFNNLFRITSNGSIYTAVKLNREVRDYYELVVVATDGAVHPRHSTLTLAIKVLDIDDNSPVFTNSTYTVLVEENLPAGTTILQIEAKDVDLGANVSYRIRSPEVKHFFALHPFTGELSLLRSLDYEAFPDQEASITFLVEAFDIYGTMPPGIATVTVIVKDMNDYPPVFSKRIYKGMVAPDAVKGTPITTVYAEDADPPGLPASRVRYRVDDVQFPYPASIFEVEEDSGRVITRVNLNEEPTTIFKLVVVAFDDGEPVMSSSATVKILVLHPGEIPRFTQEEYRPPPVSELATKGTMVGVISAAAINQSIVYSIVSGNEEDTFGINNITGVIYVNGPLDYETRTSYVLRVQADSLEVVLANLRVPSKSNTAKVYIEIQDENNHPPVFQKKFYIGGVSEDARMFTSVLRVKATDKDTGNYSVMAYRLIIPPIKEGKEGFVVETYTGLIKTAMLFHNMRRSYFKFQVIATDDYGKGLSGKADVLVSVVNQLDMQVIVSNVPPTLVEKKIEDLTEILDRYVQEQIPGAKVVVESIGARRHGDAFSLEDYTKCDLTVYAIDPQTNRAIDRNELFKFLDGKLLDINKDFQPYYGEGGRILEIRTPEAVTSIKKRGESLGYTEGALLALAFIIILCCIPAILVVLVSYRQFKVRQAECTKTARIQAALPAAKPAVPAPAPVAAPPPPPPPPPGAHLYEELGDSSILFLLYHFQQSRGNNSVSEDRKHQQVVMPFSSNTIEAHKSAHVDGSLKSNKLKSARKFTFLSDEDDLSAHNPLYKENISQVSTNSDISQRTDFVDPFSPKIQAKSKSLRGPREKIQRLWSQSVSLPRRLMRKVPNRPEIIDLQQWQGTRQKAENENTGICTNKRGSSNPLLTTEEANLTEKEEIRQGETLMIEGTEQLKSLSSDSSFCFPRPHFSFSTLPTVSRTVELKSEPNVISSPAECSLELSPSRPCVLHSSLSRRETPICMLPIETERNIFENFAHPPNISPSACPLPPPPPISPPSPPPAPAPLAPPPDISPFSLFCPPPSPPSIPLPLPPPTFFPLSVSTSGPPTPPLLPPFPTPLPPPPPSIPCPPPPSASFLSTECVCITGVKCTTNLMPAEKIKSSMTQLSTTTVCKTDPQREPKGILRHVKNLAELEKSVANMYSQIEKNYLRTNVSELQTMCPSEVTNMEITSEQNKGSLNNIVEGTEKQSHSQSTSL

SEQ ID NO: 10057 - protein, 961 aa, Homo sapiens
MFRQFYLWTCLASGIILGSLFEICLGQYDDDCKLARGGPPATIVAIDEESRNGTILVDNMLIKGTAGGPDPTIELSLKDNVDYWVLMDPVKQMLFLNSTGRVLDRDPPMNIHSIVVQVQCINKKVGTIIYHEVRIVVRDRNDNSPTFKHESYYATVNELTPVGTTIFTGFSGDNGATDIDDGPNGQIEYVIQYNPDDPTSNDTFEIPLMLTGNIVLRKRLNYEDKTRYFVIIQANDRAQNLNERRTTTTTLTVDVLDGDDLGPMFLPCVLVPNTRDCRPLTYQAAIPELRTPEELNPIIVTPPIQAIDQDRNIQPPSDRPGILYSILVGTPEDYPRFFHMHPRTAELSLLEPVNRDFHQKFDLVIKAEQDNGHPLPAFAGLHIEILDENNQSPYFTMPSYQGYILESAPVGATISDSLNLTSPLRIVALDKDIEDTKDPELHLFLNDYTSVFTVTQTGITRYLTLLQPVDREEQQTYTFSITAFDGVQESEPVIVNIQVMDANDNTPTFPEISYDVYVYTDMRPGDSVIQLTAVDADEGSNGEITYEILVGAQGDFIINKTTGLITIAPGVEMIVGRTYALTVQAADNAPPAERRNSICTVYIEVLPPNNQSPPRFPQLMYSLEISEAMRVGAVLLNLQATDREGDSITYAIENGDPQRVFNLSETTGILTLGKALDRESTDRYILIITASDGRPDGTSTATVNIVVTDVNDNAPVFDPYLPRNLSVVEEEANAFVGQVKATDPDAGINGQVHYSLGNFNNLFRITSNGSIYTAVKLNREVRDYYELVVVATDGAVHPRHSTLTLAIKVLDIDDNSPVFTNSTYTVLVEENLPAGTTILQIEAKDVDLGANVSYRIRSPEVKHFFALHPFTGELSLLRSLDYEAFPDQEASITFLVEAFDIYGTMPPGIATVTVIVKDMNDYPPVFSKRIYKGMVAPDAVKGTPITTVYAEDADPPVSRRH

SEQ ID NO: 10058 - protein, 654 aa, Homo sapiens
MFRQFYLWTCLASGIILGSLFEICLGQYDDDCKLARGGPPATIVAIDEESRNGTILVDNMLIKGTAGGPDPTIELSLKDNVDYWVLMDPVKQMLFLNSTGRVLDRDPPMNIHSIVVQVQCINKKVGTIIYHEVRIVVRDRNDNSPTFKHESYYATVNELTPVGTTIFTGFSGDNGATDIDDGPNGQIEYVIQYNPDDPTSNDTFEIPLMLTGNIVLRKRLNYEDKTRYFVIIQANDRAQNLNERRTTTTTLTVDVLDGDDLGPMFLPCVLVPNTRDCRPLTYQAAIPELRTPEELNPIIVTPPIQAIDQDRNIQPPSDRPGILYSILVGTPEDYPRFFHMHPRTAELSLLEPVNRDFHQKFDLVIKAEQDNGHPLPAFAGLHIEILDENNQSPYFTMPSYQGYILESAPVGATISDSLNLTSPLRIVALDKDIEDTKDPELHLFLNDYTSVFTVTQTGITRYLTLLQPVDREEQQTYTFSITAFDGVQESEPVIVNIQVMDANDNTPTFPEISYDVYVYTDMRPGDSVIQLTAVDADEGSNGEITYEILVGAQGDFIINKTTGLITIAPGVEMIVGRTYALTVQAADNAPPAERRNSICTVYIEVLPPNNQSPPRFPQLMYSLEISEAMRVGAVLLNLQHGDSNLRESTGQGKH

SEQ ID NO: 10059 - protein, 1677 aa, Homo sapiens
MFRQFYLWTCLASGIILGSLFEICLGQYDDDCKLARGGPPATIVAIDEESRNGTILVDNMLIKGTAGGPDPTIELSLKDNVDYWVLMDPVKQMLFLNSTGRVLDRDPPMNIHSIVVQVQCINKKVGTIIYHEVRIVVRDRNDNSPTFKHESYYATVNELTPVGTTIFTGFSGDNGATDIDDGPNGQIEYVIQYNPDDPTSNDTFEIPLMLTGNIVLRKRLNYEDKTRYFVIIQANDRAQNLNERRTTTTTLTVDVLDGDDLGPMFLPCVLVPNTRDCRPLTYQAAIPELRTPEELNPIIVTPPIQAIDQDRNIQPPSDRPGILYSILVGTPEDYPRFFHMHPRTAELSLLEPVNRDFHQKFDLVIKAEQDNGHPLPAFAGLHIEILDENNQSPYFTMPSYQGYILESAPVGATISDSLNLTSPLRIVALDKDIEDTKDPELHLFLNDYTSVFTVTQTGITRYLTLLQPVDREEQQTYTFSITAFDGVQESEPVIVNIQVMDANDNTPTFPEISYDVYVYTDMRPGDSVIQLTAVDADEGSNGEITYEILVGAQGDFIINKTTGLITIAPGVEMIVGRTYALTVQAADNAPPAERRNSICTVYIEVLPPNNQSPPRFPQLMYSLEISEAMRVGAVLLNLQATDREGDSITYAIENGDPQRVFNLSETTGILTLGKALDRESTDRYILIITASDGRPDGTSTATVNIVVTDVNDNAPVFDPYLPRNLSVVEEEANAFVGQVKATDPDAGINGQVHYSLGNFNNLFRITSNGSIYTAVKLNREVRDYYELVVVATDGAVHPRHSTLTLAIKVLDIDDNSPVFTNSTYTVLVEENLPAGTTILQIEAKDVDLGANVSYRIRSPEVKHFFALHPFTGELSLLRSLDYEAFPDQEASITFLVEAFDIYGTMPPGIATVTVIVKDMNDYPPVFSKRIYKGMVAPDAVKGTPITTVYAEDADPPGLPASRVRYRVDDVQFPYPASIFEVEEDSGRVITRVNLNEEPTTIFKLVVVAFDDGEPVMSSSATVKILVLHPGEIPRFTQEEYRPPPVSELATKGTMVGVISAAAINQSIVYSIVSGNEEDTFGINNITGVIYVNGPLDYETRTSYVLRVQADSLEVVLANLRVPSKSNTAKVYIEIQDENNHPPVFQKKFYIGGVSEDARMFTSVLRVKATDKDTGNYSVMAYRLIIPPIKEGKEGFVVETYTGLIKTAMLFHNMRRSYFKFQVIATDDYGKGLSGKADVLVSVVNQLDMQVIVSNVPPTLVEKKIEDLTEILDRYVQEQIPGAKVVVESIGARRHGDAFSLEDYTKCDLTVYAIDPQTNRAIDRNELFKFLDGKLLDINKDFQPYYGEGGRILEIRTPEAVTSIKKRGESLGYTEGALLALAFIIILCCIPAILVVLVSYRQFKVRQAECTKTARIQAALPAAKPAVPAPAPVAAPPPPPPPPPGAHLYEELGDSSMHKYEMPQYGSRRRLLPPAGQEEYGEVVGEAEEEYEEEEWARKRMIKLVVDREYETSSTGEDSAPECQRNRLHHPSIHSNINGNIYIAQNGSVVRTRRACLTDNLKVASPVRLGGPFKKLDKLAVTHEENVPLNTLSKGPFSTEKMNARPTLVTFAPCPVGTDNTAVKPLRNRLKSTVEQESMIDSKNIKEALEFHSDHTQSDDEELWMGPWNNLHIPMTKL

SEQ ID NO: 10060 - protein, 1957 aa, Homo sapiens
MFRQFYLWTCLASGIILGSLFEICLGQYDDDCKLARGGPPATIVAIDEESRNGTILVDNMLIKGTAGGPDPTIELSLKDNVDYWVLMDPVKQMLFLNSTGRVLDRDPPMNIHSIVVQVQCINKKVGTIIYHEVRIVVRDRNDNSPTFKHESYYATVNELTPVGTTIFTGFSGDNGATDIDDGPNGQIEYVIQYNPDDPTSNDTFEIPLMLTGNIVLRKRLNYEDKTRYFVIIQANDRAQNLNERRTTTTTLTVDVLDGDDLGPMFLPCVLVPNTRDCRPLTYQAAIPELRTPEELNPIIVTPPIQAIDQDRNIQPPSDRPGILYSILVGTPEDYPRFFHMHPRTAELSLLEPVNRDFHQKFDLVIKAEQDNGHPLPAFAGLHIEILDENNQSPYFTMPSYQGYILESAPVGATISDSLNLTSPLRIVALDKDIEDTKDPELHLFLNDYTSVFTVTQTGITRYLTLLQPVDREEQQTYTFSITAFDGVQESEPVIVNIQVMDANDNTPTFPEISYDVYVYTDMRPGDSVIQLTAVDADEGSNGEITYEILVGAQGDFIINKTTGLITIAPGVEMIVGRTYALTVQAADNAPPAERRNSICTVYIEVLPPNNQSPPRFPQLMYSLEISEAMRVGAVLLNLQATDREGDSITYAIENGDPQRVFNLSETTGILTLGKALDRESTDRYILIITASDGRPDGTSTATVNIVVTDVNDNAPVFDPYLPRNLSVVEEEANAFVGQVKATDPDAGINGQVHYSLGNFNNLFRITSNGSIYTAVKLNREVRDYYELVVVATDGAVHPRHSTLTLAIKVLDIDDNSPVFTNSTYTVLVEENLPAGTTILQIEAKDVDLGANVSYRIRSPEVKHFFALHPFTGELSLLRSLDYEAFPDQEASITFLVEAFDIYGTMPPGIATVTVIVKDMNDYPPVFSKRIYKGMVAPDAVKGTPITTVYAEDADPPGLPASRVRYRVDDVQFPYPASIFEVEEDSGRVITRVNLNEEPTTIFKLVVVAFDDGEPVMSSSATVKILVLHPGEIPRFTQEEYRPPPVSELATKGTMVGVISAAAINQSIVYSIVSGNEEDTFGINNITGVIYVNGPLDYETRTSYVLRVQADSLEVVLANLRVPSKSNTAKVYIEIQDENNHPPVFQKKFYIGGVSEDARMFTSVLRVKATDKDTGNYSVMAYRLIIPPIKEGKEGFVVETYTGLIKTAMLFHNMRRSYFKFQVIATDDYGKGLSGKADVLVSVVNQLDMQVIVSNVPPTLVEKKIEDLTEILDRYVQEQIPGAKVVVESIGARRHGDAFSLEDYTKCDLTVYAIDPQTNRAIDRNELFKFLDGKLLDINKDFQPYYGEGGRILEIRTPEAVTSIKKRGESLGYTEGALLALAFIIILCCIPAILVVLVSYRQFKVRQAECTKTARIQAALPAAKPAVPAPAPVAAPPPPPPPPPGAHLYEELGDSSMHNLFLLYHFQQSRGNNSVSEDRKHQQVVMPFSSNTIEAHKSAHVDGSLKSNKLKSARKFTFLSDEDDLSAHNPLYKENISQVSTNSDISQRTDFVDPFSPKIQAKSKSLRGPREKIQRLWSQSVSLPRRLMRKVPNRPEIIDLQQWQGTRQKAENENTGICTNKRGSSNPLLTTEEANLTEKEEIRQGETLMIEGTEQLKSLSSDSSFCFPRPHFSFSTLPTVSRTVELKSEPNVISSPAECSLELSPSRPCVLHSSLSRRETPICMLPIETERNIFENFAHPPNISPSACPLPPPPPISPPSPPPAPAPLAPPPDISPFSLFCPPPSPPSIPLPLPPPTFFPLSVSTSGPPTPPLLPPFPTPLPPPPPSIPCPPPPSASFLSTECVCITGVKCTTNLMPAEKIKSSMTQLSTTTVCKTDPQREPKGILRHVKNLAELEKSVANMYSQIEKNYLRTNVSELQTMCPSEVTNMEITSEQNKGSLNNIVEGTEKQSHSQSTSL

SEQ ID NO: 10061 - protein, 1540 aa, Homo sapiens
MFRQFYLWTCLASGIILGSLFEICLGQYDDDCKLARGGPPATIVAIDEESRNGTILVDNMLIKGTAGGPDPTIELSLKDNVDYWVLMDPVKQMLFLNSTGRVLDRDPPMNIHSIVVQVQCINKKVGTIIYHEVRIVVRDRNDNSPTFKHESYYATVNELTPVGTTIFTGFSGDNGATDIDDGPNGQIEYVIQYNPDDPTSNDTFEIPLMLTGNIVLRKRLNYEDKTRYFVIIQANDRAQNLNERRTTTTTLTVDVLDGDDLGPMFLPCVLVPNTRDCRPLTYQAAIPELRTPEELNPIIVTPPIQAIDQDRNIQPPSDRPGILYSILVGTPEDYPRFFHMHPRTAELSLLEPVNRDFHQKFDLVIKAEQDNGHPLPAFAGLHIEILDENNQSPYFTMPSYQGYILESAPVGATISDSLNLTSPLRIVALDKDIEDTKDPELHLFLNDYTSVFTVTQTGITRYLTLLQPVDREEQQTYTFSITAFDGVQESEPVIVNIQVMDANDNTPTFPEISYDVYVYTDMRPGDSVIQLTAVDADEGSNGEITYEILVGAQGDFIINKTTGLITIAPGVEMIVGRTYALTVQAADNAPPAERRNSICTVYIEVLPPNNQSPPRFPQLMYSLEISEAMRVGAVLLNLQATDREGDSITYAIENGDPQRVFNLSETTGILTLGKALDRESTDRYILIITASDGRPDGTSTATVNIVVTDVNDNAPVFDPYLPRNLSVVEEEANAFVGQVKATDPDAGINGQVHYSLGNFNNLFRITSNGSIYTAVKLNREVRDYYELVVVATDGAVHPRHSTLTLAIKVLDIDDNSPVFTNSTYTVLVEENLPAGTTILQIEAKDVDLGANVSYRIRSPEVKHFFALHPFTGELSLLRSLDYEAFPDQEASITFLVEAFDIYGTMPPGIATVTVIVKDMNDYPPVFSKRIYKGMVAPDAVKGTPITTVYAEDADPPGLPASRVRYRVDDVQFPYPASIFEVEEDSGRVITRVNLNEEPTTIFKLVVVAFDDGEPVMSSSATVKILVLHPGEIPRFTQEEYRPPPVSELATKGTMVGVISAAAINQSIVYSIVSGNEEDTFGINNITGVIYVNGPLDYETRTSYVLRVQADSLEVVLANLRVPSKSNTAKVYIEIQDENNHPPVFQKKFYIGGVSEDARMFTSVLRVKATDKDTGNYSVMAYRLIIPPIKEGKEGFVVETYTGLIKTAMLFHNMRRSYFKFQVIATDDYGKGLSGKADVLVSVVNQLDMQVIVSNVPPTLVEKKIEDLTEILDRYVQEQIPGAKVVVESIGARRHGDAFSLEDYTKCDLTVYAIDPQTNRAIDRNELFKFLDGKLLDINKDFQPYYGEGGRILEIRTPEAVTSIKKRGESLGYTEGALLALAFIIILCCIPAILVVLVSYRQVFKGRQAECTKTARIQAALPAAKPAVPAPAPVAAPPPPPPPPPGAHLYEELGDSSMNRNYPWSLELILARNMDKIITVMSMGMKCLNMGVAVDCYHQLDRRNMVRWLVKLRKNMRRKRKSQRKLKNQRLKLESLVRRKK

SEQ ID NO: 10062 - protein, 654 aa, Homo sapiens; identical to SEQ ID NO: 10058

SEQ ID NO: 10063 - protein, 1783 aa, Homo sapiens
MFRQFYLWTCLASGIILGSLFEICLGQYDDDCKLARGGPPATIVAIDEESRNGTILVDNMLIKGTAGGPDPTIELSLKDNVDYWVLMDPVKQMLFLNSTGRVLDRDPPMNIHSIVVQVQCINKKVGTIIYHEVRIVVRDRNDNSPTFKHESYYATVNELTPVGTTIFTGFSGDNGATDIDDGPNGQIEYVIQYNPDDPTSNDTFEIPLMLTGNIVLRKRLNYEDKTRYFVIIQANDRAQNLNERRTTTTTLTVDVLDGDDLGPMFLPCVLVPNTRDCRPLTYQAAIPELRTPEELNPIIVTPPIQAIDQDRNIQPPSDRPGILYSILVGTPEDYPRFFHMHPRTAELSLLEPVNRDFHQKFDLVIKAEQDNGHPLPAFAGLHIEILDENNQSPYFTMPSYQGYILESAPVGATISDSLNLTSPLRIVALDKDIEDVPPSGVPTKDPELHLFLNDYTSVFTVTQTGITRYLTLLQPVDREEQQTYTFSITAFDGVQESEPVIVNIQVMDANDNTPTFPEISYDVYVYTDMRPGDSVIQLTAVDADEGSNGEITYEILVGAQGDFIINKTTGLITIAPGVEMIVGRTYALTVQAADNAPPAERRNSICTVYIEVLPPNNQSPPRFPQLMYSLEISEAMRVGAVLLNLQATDREGDSITYAIENGDPQRVFNLSETTGILTLGKALDRESTDRYILIITASDGRPDGTSTATVNIVVTDVNDNAPVFDPYLPRNLSVVEEEANAFVGQVKATDPDAGINGQVHYSLGNFNNLFRITSNGSIYTAVKLNREVRDYYELVVVATDGAVHPRHSTLTLAIKVLDIDDNSPVFTNSTYTVLVEENLPAGTTILQIEAKDVDLGANVSYRIRSPEVKHFFALHPFTGELSLLRSLDYEAFPDQEASITFLVEAFDIYGTMPPGIATVTVIVKDMNDYPPVFSKRIYKGMVAPDAVKGTPITTVYAEDADPPGLPASRVRYRVDDVQFPYPASIFEVEEDSGRVITRVNLNEEPTTIFKLVVVAFDDGEPVMSSSATVKILVLHPGEIPRFTQEEYRPPPVSELATKGTMVGVISAAAINQSIVYSIVSGNEEDTFGINNITGVIYVNGPLDYETRTSYVLRVQADSLEVVLANLRVPSKSNTAKVYIEIQDENNHPPVFQKKFYIGGVSEDARMFTSVLRVKATDKDTGNYSVMAYRLIIPPIKEGKEGFVVETYTGLIKTAMLFHNMRRSYFKFQVIATDDYGKGLSGKADVLVSVVNQLDMQVIVSNVPPTLVEKKIEDLTEILDRYVQEQIPGAKVVVESIGARRHGDAFSLEDYTKCDLTVYAIDPQTNRAIDRNELFKFLDGKLLDINKDFQPYYGEGGRILEIRTPEAVTSIKKRGESLGYTEGALLALAFIIILCCIPAILVVLVSYRQFKVRQAECTKTARIQAALPAAKPAVPAPAPVAAPPPPPPPPPGAHLYEELGDSSMYEMPQYGSRRRLLPPAGQEEYGEVVGEAEEEYEEEEEEPKKIKKPKVEIREPSEEEEVVVTIEKPPAAEPTYTTWKRARIFPMIFKKVRGLADKRGIVDLEGEEWQRRLEEEDKDYLKLTLDQEEATESTVESEEESSSDYTEYSEEESEFSESETTEEESESETPSEEEESSTPESEESESTESEGEKARKNIVLARRRPMVEEVKEVKGRKEEPQEEQKEPKMEEEEHSEEEESGPAPVEESTDPEAQDIPEEGSAESASVEGGVESEEESESGSSSSSSESQSGGPWGYQVPAYDRSKNANQKKSPGANSEGYNTAL

SEQ ID NO: 10064 - protein, 1886 aa, Homo sapiens
MFRQFYLWTCLASGIILGSLFEICLGQYDDDCKLARGGPPATIVAIDEESRNGTILVDNMLIKGTAGGPDPTIELSLKDNVDYWVLMDPVKQMLFLNSTGRVLDRDPPMNIHSIVVQVQCINKKVGTIIYHEVRIVVRDRNDNSPTFKHESYYATVNELTPVGTTIFTGFSGDNGATDIDDGPNGQIEYVIQYNPDDPTSNDTFEIPLMLTGNIVLRKRLNYEDKTRYFVIIQANDRAQNLNERRTTTTTLTVDVLDGDDLGPMFLPCVLVPNTRDCRPLTYQAAIPELRTPEELNPIIVTPPIQAIDQDRNIQPPSDRPGILYSILVGTPEDYPRFFHMHPRTAELSLLEPVNRDFHQKFDLVIKAEQDNGHPLPAFAGLHIEILDENNQSPYFTMPSYQGYILESAPVGATISDSLNLTSPLRIVALDKDIEDTKDPELHLFLNDYTSVFTVTQTGITRYLTLLQPVDREEQQTYTFSITAFDGVQESEPVIVNIQVMDANDNTPTFPEISYDVYVYTDMRPGDSVIQLTAVDADEGSNGEITYEILVGAQGDFIINKTTGLITIAPGVEMIVGRTYALTVQAADNAPPAERSTGILTLGKALDRESTDRYILIITASDGRPDGTSTATVNIVVTDVNDNAPVFDPYLPRNLSVVEEEANAFVGQVKATDPDAGINGQVHYSLGNFNNLFRITSNGSIYTAVKLNREVRDYYELVVVATDGAVHPRHSTLTLAIKVLDIDDNSPVFTNSTYTVLVEENLPAGTTILQIEAKDVDLGANVSYRIRSPEVKHFFALHPFTGELSLLRSLDYEAFPDQEASITFLVEAFDIYGTMPPGIATVTVIVKDMNDYPPVFSKRIYKGMVAPDAVKGTPITTVYAEDADPPGLPASRVRYRVDDVQFPYPASIFEVEEDSGRVITRVNLNEEPTTIFKLVVVAFDDGEPVMSSSATVKILVLHPGEIPRFTQEEYRPPPVSELATKGTMVGVISAAAINQSIVYSIVSGNEEDTFGINNITGVIYVNGPLDYETRTSYVLRVQADSLEVVLANLRVPSKSNTAKVYIEIQDENNHPPVFQKKFYIGGVSEDARMFTSVLRVKATDKDTGNYSVMAYRLIIPPIKEGKEGFVVETYTGLIKTAMLFHNMRRSYFKFQVIATDDYGKGLSGKADVLVSVVNQLDMQVIVSNVPPTLVEKKIEDLTEILDRYVQEQIPGAKVVVESIGARRHGDAFSLEDYTKCDLTVYAIDPQTNRAIDRNELFKFLDGKLLDINKDFQPYYGEGGRILEIRTPEAVTSIKKRGESLGYTEGALLALAFIIILCCIPAILVVLVSYRQFKVRQAECTKTARIQAALPAAKPAVPAPAPVAAPPPPPPPPPGAHLYEELGDSSMHNLFLLYHFQQSRGNNSVSEDRKHQQVVMPFSSNTIEAHKSAHVDGSLKSNKLKSARKFTFLSDEDDLSAHNPLYKENISQVSTNSDISQRTDFVDPFSPKIQAKSKSLRGPREKIQRLWSQSVSLPRRLMRKVPNRPEIIDLQQWQGTRQKAENENTGICTNKRGSSNPLLTTEEANLTEKEEIRQGETLMIEGTEQLKSLSSDSSFCFPRPHFSFSTLPTVSRTVELKSEPNVISSPAECSLELSPSRPCVLHSSLSRRETPICMLPIETERNIFENFAHPPNISPSACPLPPPPPISPPSPPPAPAPLAPPPDISPFSLFCPPPSPPSIPLPLPPPTFFPLSVSTSGPPTPPLLPPFPTPLPPPPPSIPCPPPPSASFLSTECVCITGVKCTTNLMPAEKIKSSMTQLSTTTVCKTDPQREPKGILRHVKNLAELEKSVANMYSQIEKNYLRTNVSELQTMCPSEVTNMEITSEQNKGSLNNIVEGTEKQSHSQSTSL

SEQ ID NO: 10065 - protein, 1676 aa, Homo sapiens
MFRQFYLWTCLASGIILGSLFEICLGQYDDDCKLARGGPPATIVAIDEESRNGTILVDNMLIKGTAGGPDPTIELSLKDNVDYWVLMDPVKQMLFLNSTGRVLDRDPPMNIHSIVVQVQCINKKVGTIIYHEVRIVVRDRNDNSPTFKHESYYATVNELTPVGTTIFTGFSGDNGATDIDDGPNGQIEYVIQYNPDDPTSNDTFEIPLMLTGNIVLRKRLNYEDKTRYFVIIQANDRAQNLNERRTTTTTLTVDVLDGDDLGPMFLPCVLVPNTRDCRPLTYQAAIPELRTPEELNPIIVTPPIQAIDQDRNIQPPSDRPGILYSILVGTPEDYPRFFHMHPRTAELSLLEPVNRDFHQKFDLVIKAEQDNGHPLPAFAGLHIEILDENNQSPYFTMPSYQGYILESAPVGATISDSLNLTSPLRIVALDKDIEDTKDPELHLFLNDYTSVFTVTQTGITRYLTLLQPVDREEQQTYTFSITAFDGVQESEPVIVNIQVMDANDNTPTFPEISYDVYVYTDMRPGDSVIQLTAVDADEGSNGEITYEILVGAQGDFIINKTTGLITIAPGVEMIVGRTYALTVQAADNAPPAERRNSICTVYIEVLPPNNQSPPRFPQLMYSLEISEAMRVGAVLLNLQATDREGDSITYAIENGDPQRVFNLSETTGILTLGKALDRESTDRYILIITASDGRPDGTSTATVNIVVTDVNDNAPVFDPYLPRNLSVVEEEANAFVGQVKATDPDAGINGQVHYSLGNFNNLFRITSNGSIYTAVKLNREVRDYYELVVVATDGAVHPRHSTLTLAIKVLDIDDNSPVFTNSTYTVLVEENLPAGTTILQIEAKDVDLGANVSYRIRSPEVKHFFALHPFTGELSLLRSLDYEAFPDQEASITFLVEAFDIYGTMPPGIATVTVIVKDMNDYPPVFSKRIYKGMVAPDAVKGTPITTVYAEDADPPGLPASRVRYRVDDVQFPYPASIFEVEEDSGRVITRVNLNEEPTTIFKLVVVAFDDGEPVMSSSATVKILVLHPGEIPRFTQEEYRPPPVSELATKGTMVGVISAAAINQSIVYSIVSGNEEDTFGINNITGVIYVNGPLDYETRTSYVLRVQADSLEVVLANLRVPSKSNTAKVYIEIQDENNHPPVFQKKFYIGGVSEDARMFTSVLRVKATDKDTGNYSVMAYRLIIPPIKEGKEGFVVETYTGLIKTAMLFHNMRRSYFKFQVIATDDYGKGLSGKADVLVSVVNQLDMQVIVSNVPPTLVEKKIEDLTEILDRYVQEQIPGAKVVVESIGARRHGDAFSLEDYTKCDLTVYAIDPQTNRAIDRNELFKFLDGKLLDINKDFQPYYGEGGRILEIRTPEAVTSIKKRGESLGYTEGALLALAFIIILCCIPAILVVLVSYRQVFKGRQAECTKTARIQAALPAAKPAVPAPAPVAAPPPPPPPPPGAHLYEELGDSSMYEMPQYGSRRRLLPPAGQEEYGEVVGEAEEEYEEEEWARKRMIKLVVDREYETSSTGEDSAPECQRNRLHHPSIHSNINGNIYIAQNGSVVRTRRACLTDNLKVASPVRLGGPFKKLDKLAVTHEENVPLNTLSKGPFSTEKMNARPTLVTFAPCPVGTDNTAVKPLRNRLKSTVEQESMIDSKNIKEALEFHSDHTQSDDEELWMGPWNNLHIPMTKL

SEQ ID NO: 10066 - protein, 650 aa, Homo sapiens
MFRQFYLWTCLASGIILGSLFEICLGQYDDDCKLARGGPPATIVAIDEESRNGTILVDNMLIKGTAGGPDPTIELSLKDNVDYWVLMDPVKQMLFLNSTGRVLDRDPPMNIHSIVVQVQCINKKVGTIIYHEVRIVVRDRNDNSPTFKHESYYATVNELTPVGTTIFTGFSGDNGATDIDDGPNGQIEYVIQYNPDDPTSNDTFEIPLMLTGNIVLRKRLNYEDKTRYFVIIQANDRAQNLNERRTTTTTLTVDVLDGDDLGPMFLPCVLVPNTRDCRPLTYQAAIPELRTPEELNPIIVTPPIQAIDQDRNIQPPSDRPGILYSILVGTPEDYPRFFHMHPRTAELSLLEPVNRDFHQKFDLVIKEEPKKIKKPKVEIREPSEEEEVVVTIEKPPAAEPTYTTWKRARIFPMIFKKVRGLADKRGIVDLEGEEWQRRLEEEDKDYLKLTLDQEEATESTVESEEESSSDYTEYSEEESEFSESETTEEESESETPSEEEESSTPESEESESTESEGEKARKNIVLARRRPMVEEVKEVKGRKEEPQEEQKEPKMEEEEHSEEEESGPAPVEESTDPEAQDIPEEGSAESASVEGGVESEEESESGSSSSSSESQSGGPWGYQVPAYDRSKNANQKKSPGANSEGYNTAL

SEQ ID NO: 10067 - protein, 981 aa, Homo sapiens
MFRQFYLWTCLASGIILGSLFEICLGQYDDDCKLARGGPPATIVAIDEESRNGTILVDNMLIKGTAGGPDPTIELSLKDNVDYWVLMDPVKQMLFLNSTGRVLDRDPPMNIHSIVVQVQCINKKVGTIIYHEVRIVVRDRNDNSPTFKHESYYATVNELTPVGTTIFTGFSGDNGATDIDDGPNGQIEYVIQYNPDDPTSNDTFEIPLMLTGNIVLRKRLNYEDKTRYFVIIQANDRAQNLNERRTTTTTLTVDVLDGDDLGPMFLPCVLVPNTRDCRPLTYQAAIPELRTPEELNPIIVTPPIQAIDQDRNIQPPSDRPGILYSILVGTPEDYPRFFHMHPRTAELSLLEPVNRDFHQKFDLVIKAEQDNGHPLPAFAGLHIEILDENNQSPYFTMPSYQGYILESAPVGATISDSLNLTSPLRIVALDKDIEDTKDPELHLFLNDYTSVFTVTQTGITRYLTLLQPVDREEQQTYTFSITAFDGVQESEPVIVNIQVMDANDNTPTFPEISYDVYVYTDMRPGDSVIQLTAVDADEGSNGEITYEILVGAQGDFIINKTTGLITIAPGVEMIVGRTYALTVQAADNAPPAERRNSICTVYIEVLPPNNQSPPRFPQLMYSLEISEAMRVGAVLLNLQATDREGDSITYAIENGDPQRVFNLSETTGILTLGKALDRESTDRYILIITASDGRPDGEEPKKIKKPKVEIREPSEEEEVVVTIEKPPAAEPTYTTWKRARIFPMIFKKVRGLADKRGIVDLEGEEWQRRLEEEDKDYLKLTLDQEEATESTVESEEESSSDYTEYSEEESEFSESETTEEESESETPSEEEESSTPESEESESTESEGEKARKNIVLARRRPMVEEVKEVKGRKEEPQEEQKEPKMEEEEHSEEEESGPAPVEESTDPEAQDIPEEGSAESASVEGGVESEEESESGSSSSSSESQSGGPWGYQVPAYDRSKNANQKKSPGANSEGYNTAL

SEQ ID NO: 10068 - protein, 329 aa, Homo sapiens
MFRQFYLWTCLASGIILGSLFEICLGQYDDDCKLARGGPPATIVAIDEESRNGTILVDNMLIKGTAGGPDPTIELSLKDNVDYWVLMDPVKQMLFLNSTGRVLDRDPPMNIHSIVVQVQCINKKVGTIIYHEVRIVVRDRNDNSPTFKHESYYATVNELTPVGTTIFTGFSGDNGATDIDDGPNGQIEYVIQYNPDDPTSNDTFEIPLMLTGNIVLRKRLNYEDKTRYFVIIQANDRAQNLNERRTTTTTLTVDVLDGDDLGPMFLPCVLVPNTRDCRPLTYQAAIPELRTPDLGSLCSGTNSWCQGRSGVHWSSPAWRCLFPRRLHQM

SEQ ID NO: 10069 - protein, 719 aa, Homo sapiens
MFRQFYLWTCLASGIILGSLFEICLGQYDDDCKLARGGPPATIVAIDEESRNGTILVDNMLIKGTAGGPDPTIELSLKDNVDYWVLMDPVKQMLFLNSTGRVLDRDPPMNIHSIVVQVQCINKKVGTIIYHEVRIVVRDRNDNSPTFKHESYYATVNELTPVGTTIFTGFSGDNGATDIDDGPNGQIEYVIQYNPDDPTSNDTFEIPLMLTGNIVLRKRLNYEDKTRYFVIIQANDRAQNLNERRTTTTTLTVDVLDGDDLGPMFLPCVLVPNTRDCRPLTYQAAIPELRTPEELNPIIVTPPIQAIDQDRNIQPPSDRPGILYSILVGTPEDYPRFFHMHPRTAELSLLEPVNRDFHQKFDLVIKAEQDNGHPLPAFAGLHIEILDENNQSPYFTMPSYQGYILESAPVGATISDSLNLTSPLRIVALDKDIEDEEPKKIKKPKVEIREPSEEEEVVVTIEKPPAAEPTYTTWKRARIFPMIFKKVRGLADKRGIVDLEGEEWQRRLEEEDKDYLKLTLDQEEATESTVESEEESSSDYTEYSEEESEFSESETTEEESESETPSEEEESSTPESEESESTESEGEKARKNIVLARRRPMVEEVKEVKGRKEEPQEEQKEPKMEEEEHSEEEESGPAPVEESTDPEAQDIPEEGSAESASVEGGVESEEESESGSSSSSSESQSGGPWGYQVPAYDRSKNANQKKSPGANSEGYNTAL

SEQ ID NO: 10070 - protein, 1952 aa, Homo sapiens
MFRQFYLWTCLASGIILGSLFEICLGQYDDDCKLARGGPPATIVAIDEESRNGTILVDNMLIKGTAGGPDPTIELSLKDNVDYWVLMDPVKQMLFLNSTGRVLDRDPPMNIHSIVVQVQCINKKVGTIIYHEVRIVVRDRNDNSPTFKHESYYATVNELTPVGTTIFTGFSGDNGATDIDDGPNGQIEYVIQYNPDDPTSNDTFEIPLMLTGNIVLRKRLNYEDKTRYFVIIQANDRAQNLNERRTTTTTLTVDVLDGDDLGPMFLPCVLVPNTRDCRPLTYQAAIPELRTPEELNPIIVTPPIQAIDQDRNIQPPSDRPGILYSILVGTPEDYPRFFHMHPRTAELSLLEPVNRDFHQKFDLVIKAEQDNGHPLPAFAGLHIEILDENNQSPYFTMPSYQGYILESAPVGATISDSLNLTSPLRIVALDKDIEDTKDPELHLFLNDYTSVFTVTQTGITRYLTLLQPVDREEQQTYTFSITAFDGVQESEPVIVNIQVMDANDNTPTFPEISYDVYVYTDMRPGDSVIQLTAVDADEGSNGEITYEILVGAQGDFIINKTTGLITIAPGVEMIVGRTYALTVQAADNAPPAERRNSICTVYIEVLPPNNQSPPRFPQLMYSLEISEAMRVGAVLLNLQATDREGDSITYAIENGDPQRVFNLSETTGILTLGKALDRESTDRYILIITASDGRPDGTSTATVNIVVTDVNDNAPVFDPYLPRNLSVVEEEANAFVGQVKATDPDAGINGQVHYSLGNFNNLFRITSNGSIYTAVKLNREVRDYYELVVVATDGAVHPRHSTLTLAIKVLDIDDNSPVFTNSTYTVLVEENLPAGTTILQIEAKDVDLGANVSYRIRSPEVKHFFALHPFTGELSLLRSLDYEAFPDQEASITFLVEAFDIYGTMPPGIATVTVIVKDMNDYPPVFSKRIYKGMVAPDAVKGTPITTVYAEDADPPGLPASRVRYRVDDVQFPYPASIFEVEEDSGRVITRVNLNEEPTTIFKLVVVAFDDGEPVMSSSATVKILVLHPGEIPRFTQEEYRPPPVSELATKGTMVGVISAAAINQSIVYSIVSGNEEDTFGINNITGVIYVNGPLDYETRTSYVLRVQADSLEVVLANLRVPSKSNTAKVYIEIQDENNHPPVFQKKFYIGGVSEDARMFTSVLRVKATDKDTGNYSVMAYRLIIPPIKEGKEGFVVETYTGLIKTAMLFHNMRRSYFKFQVIATDDYGKGLSGKADVLVSVVNQLDMQVIVSNVPPTLVEKKIEDLTEILDRYVQEQIPGAKVVVESIGARRHGDAFSLEDYTKCDLTVYAIDPQTNRAIDRNELFKFLDGKLLDINKDFQPYYGEGGRILEIRTPEAVTSIKKRGESLGYTEGALLALAFIIILCCIPAILVVLVSYRQRQAECTKTARIQAALPAAKPAVPAPAPVAAPPPPPPPPPGAHLYEELGDSSILFLLYHFQQSRGNNSVSEDRKHQQVVMPFSSNTIEAHKSAHVDGSLKSNKLKSARKFTFLSDEDDLSAHNPLYKENISQVSTNSDISQRTDFVDPFSPKIQAKSKSLRGPREKIQRLWSQSVSLPRRLMRKVPNRPEIIDLQQWQGTRQKAENENTGICTNKRGSSNPLLTTEEANLTEKEEIRQGETLMIEGTEQLKSLSSDSSFCFPRPHFSFSTLPTVSRTVELKSEPNVISSPAECSLELSPSRPCVLHSSLSRRETPICMLPIETERNIFENFAHPPNISPSACPLPPPPPISPPSPPPAPAPLAPPPDISPFSLFCPPPSPPSIPLPLPPPTFFPLSVSTSGPPTPPLLPPFPTPLPPPPPSIPCPPPPSASFLSTECVCITGVKCTTNLMPAEKIKSSMTQLSTTTVCKTDPQREPKGILRHVKNLAELEKSVANMYSQIEKNYLRTNVSELQTMCPSEVTNMEITSEQNKGSLNNIVEGTEKQSHSQSTSL

SEQ ID NO: 10071 - protein, 1539 aa, Homo sapiens
MFRQFYLWTCLASGIILGSLFEICLGQYDDDCKLARGGPPATIVAIDEESRNGTILVDNMLIKGTAGGPDPTIELSLKDNVDYWVLMDPVKQMLFLNSTGRVLDRDPPMNIHSIVVQVQCINKKVGTIIYHEVRIVVRDRNDNSPTFKHESYYATVNELTPVGTTIFTGFSGDNGATDIDDGPNGQIEYVIQYNPDDPTSNDTFEIPLMLTGNIVLRKRLNYEDKTRYFVIIQANDRAQNLNERRTTTTTLTVDVLDGDDLGPMFLPCVLVPNTRDCRPLTYQAAIPELRTPEELNPIIVTPPIQAIDQDRNIQPPSDRPGILYSILVGTPEDYPRFFHMHPRTAELSLLEPVNRDFHQKFDLVIKAEQDNGHPLPAFAGLHIEILDENNQSPYFTMPSYQGYILESAPVGATISDSLNLTSPLRIVALDKDIEDTKDPELHLFLNDYTSVFTVTQTGITRYLTLLQPVDREEQQTYTFSITAFDGVQESEPVIVNIQVMDANDNTPTFPEISYDVYVYTDMRPGDSVIQLTAVDADEGSNGEITYEILVGAQGDFIINKTTGLITIAPGVEMIVGRTYALTVQAADNAPPAERRNSICTVYIEVLPPNNQSPPRFPQLMYSLEISEAMRVGAVLLNLQATDREGDSITYAIENGDPQRVFNLSETTGILTLGKALDRESTDRYILIITASDGRPDGTSTATVNIVVTDVNDNAPVFDPYLPRNLSVVEEEANAFVGQVKATDPDAGINGQVHYSLGNFNNLFRITSNGSIYTAVKLNREVRDYYELVVVATDGAVHPRHSTLTLAIKVLDIDDNSPVFTNSTYTVLVEENLPAGTTILQIEAKDVDLGANVSYRIRSPEVKHFFALHPFTGELSLLRSLDYEAFPDQEASITFLVEAFDIYGTMPPGIATVTVIVKDMNDYPPVFSKRIYKGMVAPDAVKGTPITTVYAEDADPPGLPASRVRYRVDDVQFPYPASIFEVEEDSGRVITRVNLNEEPTTIFKLVVVAFDDGEPVMSSSATVKILVLHPGEIPRFTQEEYRPPPVSELATKGTMVGVISAAAINQSIVYSIVSGNEEDTFGINNITGVIYVNGPLDYETRTSYVLRVQADSLEVVLANLRVPSKSNTAKVYIEIQDENNHPPVFQKKFYIGGVSEDARMFTSVLRVKATDKDTGNYSVMAYRLIIPPIKEGKEGFVVETYTGLIKTAMLFHNMRRSYFKFQVIATDDYGKGLSGKADVLVSVVNQLDMQVIVSNVPPTLVEKKIEDLTEILDRYVQEQIPGAKVVVESIGARRHGDAFSLEDYTKCDLTVYAIDPQTNRAIDRNELFKFLDGKLLDINKDFQPYYGEGGRILEIRTPEAVTSIKKRGESLGYTEGALLALAFIIILCCIPAILVVLVSYRQFKVRQAECTKTARIQAALPAAKPAVPAPAPVAAPPPPPPPPPGAHLYEELGDSSMHKNYPWSLELILARNMDKIITVMSMGMKCLNMGVAVDCYHQLDRRNMVRWLVKLRKNMRRKRKSQRKLKNQRLKLESLVRRKK

SEQ ID NO: 10072 - protein, 1675 aa, Homo sapiens
MFRQFYLWTCLASGIILGSLFEICLGQYDDDCKLARGGPPATIVAIDEESRNGTILVDNMLIKGTAGGPDPTIELSLKDNVDYWVLMDPVKQMLFLNSTGRVLDRDPPMNIHSIVVQVQCINKKVGTIIYHEVRIVVRDRNDNSPTFKHESYYATVNELTPVGTTIFTGFSGDNGATDIDDGPNGQIEYVIQYNPDDPTSNDTFEIPLMLTGNIVLRKRLNYEDKTRYFVIIQANDRAQNLNERRTTTTTLTVDVLDGDDLGPMFLPCVLVPNTRDCRPLTYQAAIPELRTPEELNPIIVTPPIQAIDQDRNIQPPSDRPGILYSILVGTPEDYPRFFHMHPRTAELSLLEPVNRDFHQKFDLVIKAEQDNGHPLPAFAGLHIEILDENNQSPYFTMPSYQGYILESAPVGATISDSLNLTSPLRIVALDKDIEDTKDPELHLFLNDYTSVFTVTQTGITRYLTLLQPVDREEQQTYTFSITAFDGVQESEPVIVNIQVMDANDNTPTFPEISYDVYVYTDMRPGDSVIQLTAVDADEGSNGEITYEILVGAQGDFIINKTTGLITIAPGVEMIVGRTYALTVQAADNAPPAERRNSICTVYIEVLPPNNQSPPRFPQLMYSLEISEAMRVGAVLLNLQATDREGDSITYAIENGDPQRVFNLSETTGILTLGKALDRESTDRYILIITASDGRPDGTSTATVNIVVTDVNDNAPVFDPYLPRNLSVVEEEANAFVGQVKATDPDAGINGQVHYSLGNFNNLFRITSNGSIYTAVKLNREVRDYYELVVVATDGAVHPRHSTLTLAIKVLDIDDNSPVFTNSTYTVLVEENLPAGTTILQIEAKDVDLGANVSYRIRSPEVKHFFALHPFTGELSLLRSLDYEAFPDQEASITFLVEAFDIYGTMPPGIATVTVIVKDMNDYPPVFSKRIYKGMVAPDAVKGTPITTVYAEDADPPGLPASRVRYRVDDVQFPYPASIFEVEEDSGRVITRVNLNEEPTTIFKLVVVAFDDGEPVMSSSATVKILVLHPGEIPRFTQEEYRPPPVSELATKGTMVGVISAAAINQSIVYSIVSGNEEDTFGINNITGVIYVNGPLDYETRTSYVLRVQADSLEVVLANLRVPSKSNTAKVYIEIQDENNHPPVFQKKFYIGGVSEDARMFTSVLRVKATDKDTGNYSVMAYRLIIPPIKEGKEGFVVETYTGLIKTAMLFHNMRRSYFKFQVIATDDYGKGLSGKADVLVSVVNQLDMQVIVSNVPPTLVEKKIEDLTEILDRYVQEQIPGAKVVVESIGARRHGDAFSLEDYTKCDLTVYAIDPQTNRAIDRNELFKFLDGKLLDINKDFQPYYGEGGRILEIRTPEAVTSIKKRGESLGYTEGALLALAFIIILCCIPAILVVLVSYRQFKVRQAECTKTARIQAALPAAKPAVPAPAPVAAPPPPPPPPPGAHLYEELGDSSMYEMPQYGSRRRLLPPAGQEEYGEVVGEAEEEYEEEEWARKRMIKLVVDREYETSSTGEDSAPECQRNRLHHPSIHSNINGNIYIAQNGSVVRTRRACLTDNLKVASPVRLGGPFKKLDKLAVTHEENVPLNTLSKGPFSTEKMNARPTLVTFAPCPVGTDNTAVKPLRNRLKSTVEQESMIDSKNIKEALEFHSDHTQSDDEELWMGPWNNLHIPMTKL

SEQ ID NO: 10073 - protein, 1740 aa, Homo sapiens
MFRQFYLWTCLASGIILGSLFEICLGQYDDDCKLARGGPPATIVAIDEESRNGTILVDNMLIKGTAGGPDPTIELSLKDNVDYWVLMDPVKQMLFLNSTGRVLDRDPPMNIHSIVVQVQCINKKVGTIIYHEVRIVVRDRNDNSPTFKHESYYATVNELTPVGTTIFTGFSGDNGATDIDDGPNGQIEYVIQYNPDDPTSNDTFEIPLMLTGNIVLRKRLNYEDKTRYFVIIQANDRAQNLNERRTTTTTLTVDVLDGDDLGPMFLPCVLVPNTRDCRPLTYQAAIPELRTPEELNPIIVTPPIQAIDQDRNIQPPSDRPGILYSILVGTPEDYPRFFHMHPRTAELSLLEPVNRDFHQKFDLVIKAEQDNGHPLPAFAGLHIEILDENNQSPYFTMPSYQGYILESAPVGATISDSLNLTSPLRIVALDKDIEDTKDPELHLFLNDYTSVFTVTQTGITRYLTLLQPVDREEQQTYTFSITAFDGVQESEPVIVNIQVMDANDNTPTFPEISYDVYVYTDMRPGDSVIQLTAVDADEGSNGEITYEILVGAQGDFIINKTTGLITIAPGVEMIVGRTYALTVQAADNAPPAERRNSICTVYIEVLPPNNQSPPRFPQLMYSLEISEAMRVGAVLLNLQATDREGDSITYAIENGDPQRVFNLSETTGILTLGKALDRESTDRYILIITASDGRPDGTSTATVNIVVTDVNDNAPVFDPYLPRNLSVVEEEANAFVGQVKATDPDAGINGQVHYSLGNFNNLFRITSNGSIYTAVKLNREVRDYYELVVVATDGAVHPRHSTLTLAIKVLDIDDNSPVFTNSTYTVLVEENLPAGTTILQIEAKDVDLGANVSYRIRSPEVKHFFALHPFTGELSLLRSLDYEAFPDQEASITFLVEAFDIYGTMPPGIATVTVIVKDMNDYPPVFSKRIYKGMVAPDAVKGTPITTVYAEDADPPGLPASRVRYRVDDVQFPYPASIFEVEEDSGRVITRVNLNEEPTTIFKLVVVAFDDGEPVMSSSATVKILVLHPGEIPRFTQEEYRPPPVSELATKGTMVGVISAAAINQSIVYSIVSGNEEDTFGINNITGVIYVNGPLDYETRTSYVLRVQADSLEVVLANLRVPSKSNTAKVYIEIQDENNHPPVFQKKFYIGGVSEDARMFTSVLRVKATDKDTGNYSVMAYRLIIPPIKEGKEGFVVETYTGLIKTAMLFHNMRRSYFKFQVIATDDYGKGLSGKADVLVSVVNQLDMQVIVSNVPPTLVEKKIEDLTEILDRYVQEQIPGAKVVVESIGARRHGDAFSLEDYTKCDLTVYAIDPQTNRAIDRNELFKFLDGKLLDINKDFQPYYGEGGRILEIRTPEAVTSIKKRGESLGYTEGALLALAFIIILCCIPAILVVLVSYRQFKVRQAECTKTARIQAALPAAKPAVPAPAPVAAPPPPPPPPPGAHLYEELGDSSIWSFCWQLVICMRTCAIWRTLTRRGYGSEQQQLLRPSLLKPEELSMESGIDPGQEYGQDYYSYEHGYEMPQYGSRRRLLPPAGQEEYGEVVGEAEEEYEEEEWARKRMIKLVVDREYETSSTGEDSAPECQRNRLHHPSIHSNINGNIYIAQNGSVVRTRRACLTDNLKVASPVRLGGPFKKLDKLAVTHEENVPLNTLSKGPFSTEKMNARPTLVTFAPCPVGTDNTAVKPLRNRLKSTVEQESMIDSKNIKEALEFHSDHTQSDDEELWMGPWNNLHIPMTKL

SEQ ID NO: 10074 - protein, 1888 aa, Homo sapiens
MFRQFYLWTCLASGIILGSLFEICLGQYDDDCKLARGGPPATIVAIDEESRNGTILVDNMLIKGTAGGPDPTIELSLKDNVDYWVLMDPVKQMLFLNSTGRVLDRDPPMNIHSIVVQVQCINKKVGTIIYHEVRIVVRDRNDNSPTFKHESYYATVNELTPVGTTIFTGFSGDNGATDIDDGPNGQIEYVIQYNPDDPTSNDTFEIPLMLTGNIVLRKRLNYEDKTRYFVIIQANDRAQNLNERRTTTTTLTVDVLDGDDLGPMFLPCVLVPNTRDCRPLTYQAAIPELRTPEELNPIIVTPPIQAIDQDRNIQPPSDRPGILYSILVGTPEDYPRFFHMHPRTAELSLLEPVNRDFHQKFDLVIKAEQDNGHPLPAFAGLHIEILDENNQSPYFTMPSYQGYILESAPVGATISDSLNLTSPLRIVALDKDIEDTKDPELHLFLNDYTSVFTVTQTGITRYLTLLQPVDREEQQTYTFSITAFDGVQESEPVIVNIQVMDANDNTPTFPEISYDVYVYTDMRPGDSVIQLTAVDADEGSNGEITYEILVGAQGDFIINKTTGLITIAPGVEMIVGRTYALTVQAADNAPPAERSTGILTLGKALDRESTDRYILIITASDGRPDGTSTATVNIVVTDVNDNAPVFDPYLPRNLSVVEEEANAFVGQVKATDPDAGINGQVHYSLGNFNNLFRITSNGSIYTAVKLNREVRDYYELVVVATDGAVHPRHSTLTLAIKVLDIDDNSPVFTNSTYTVLVEENLPAGTTILQIEAKDVDLGANVSYRIRSPEVKHFFALHPFTGELSLLRSLDYEAFPDQEASITFLVEAFDIYGTMPPGIATVTVIVKDMNDYPPVFSKRIYKGMVAPDAVKGTPITTVYAEDADPPGLPASRVRYRVDDVQFPYPASIFEVEEDSGRVITRVNLNEEPTTIFKLVVVAFDDGEPVMSSSATVKILVLHPGEIPRFTQEEYRPPPVSELATKGTMVGVISAAAINQSIVYSIVSGNEEDTFGINNITGVIYVNGPLDYETRTSYVLRVQADSLEVVLANLRVPSKSNTAKVYIEIQDENNHPPVFQKKFYIGGVSEDARMFTSVLRVKATDKDTGNYSVMAYRLIIPPIKEGKEGFVVETYTGLIKTAMLFHNMRRSYFKFQVIATDDYGKGLSGKADVLVSVVNQLDMQVIVSNVPPTLVEKKIEDLTEILDRYVQEQIPGAKVVVESIGARRHGDAFSLEDYTKCDLTVYAIDPQTNRAIDRNELFKFLDGKLLDINKDFQPYYGEGGRILEIRTPEAVTSIKKRGESLGYTEGALLALAFIIILCCIPAILVVLVSYRQVFKGRQAECTKTARIQAALPAAKPAVPAPAPVAAPPPPPPPPPGAHLYEELGDSSILSSLFLLYHFQQSRGNNSVSEDRKHQQVVMPFSSNTIEAHKSAHVDGSLKSNKLKSARKFTFLSDEDDLSAHNPLYKENISQVSTNSDISQRTDFVDPFSPKIQAKSKSLRGPREKIQRLWSQSVSLPRRLMRKVPNRPEIIDLQQWQGTRQKAENENTGICTNKRGSSNPLLTTEEANLTEKEEIRQGETLMIEGTEQLKSLSSDSSFCFPRPHFSFSTLPTVSRTVELKSEPNVISSPAECSLELSPSRPCVLHSSLSRRETPICMLPIETERNIFENFAHPPNISPSACPLPPPPPISPPSPPPAPAPLAPPPDISPFSLFCPPPSPPSIPLPLPPPTFFPLSVSTSGPPTPPLLPPFPTPLPPPPPSIPCPPPPSASFLSTECVCITGVKCTTNLMPAEKIKSSMTQLSTTTVCKTDPQREPKGILRHVKNLAELEKSVANMYSQIEKNYLRTNVSELQTMCPSEVTNMEITSEQNKGSLNNIVEGTEKQSHSQSTSL

SEQ ID NO: 10075 - protein, 1962 aa, Homo sapiens
MFRQFYLWTCLASGIILGSLFEICLGQYDDDWQYEDCKLARGGPPATIVAIDEESRNGTILVDNMLIKGTAGGPDPTIELSLKDNVDYWVLMDPVKQMLFLNSTGRVLDRDPPMNIHSIVVQVQCINKKVGTIIYHEVRIVVRDRNDNSPTFKHESYYATVNELTPVGTTIFTGFSGDNGATDIDDGPNGQIEYVIQYNPDDPTSNDTFEIPLMLTGNIVLRKRLNYEDKTRYFVIIQANDRAQNLNERRTTTTTLTVDVLDGDDLGPMFLPCVLVPNTRDCRPLTYQAAIPELRTPEELNPIIVTPPIQAIDQDRNIQPPSDRPGILYSILVGTPEDYPRFFHMHPRTAELSLLEPVNRDFHQKFDLVIKAEQDNGHPLPAFAGLHIEILDENNQSPYFTMPSYQGYILESAPVGATISDSLNLTSPLRIVALDKDIEDTKDPELHLFLNDYTSVFTVTQTGITRYLTLLQPVDREEQQTYTFSITAFDGVQESEPVIVNIQVMDANDNTPTFPEISYDVYVYTDMRPGDSVIQLTAVDADEGSNGEITYEILVGAQGDFIINKTTGLITIAPGVEMIVGRTYALTVQAADNAPPAERRNSICTVYIEVLPPNNQSPPRFPQLMYSLEISEAMRVGAVLLNLQATDREGDSITYAIENGDPQRVFNLSETTGILTLGKALDRESTDRYILIITASDGRPDGTSTATVNIVVTDVNDNAPVFDPYLPRNLSVVEEEANAFVGQVKATDPDAGINGQVHYSLGNFNNLFRITSNGSIYTAVKLNREVRDYYELVVVATDGAVHPRHSTLTLAIKVLDIDDNSPVFTNSTYTVLVEENLPAGTTILQIEAKDVDLGANVSYRIRSPEVKHFFALHPFTGELSLLRSLDYEAFPDQEASITFLVEAFDIYGTMPPGIATVTVIVKDMNDYPPVFSKRIYKGMVAPDAVKGTPITTVYAEDADPPGLPASRVRYRVDDVQFPYPASIFEVEEDSGRVITRVNLNEEPTTIFKLVVVAFDDGEPVMSSSATVKILVLHPGEIPRFTQEEYRPPPVSELATKGTMVGVISAAAINQSIVYSIVSGNEEDTFGINNITGVIYVNGPLDYETRTSYVLRVQADSLEVVLANLRVPSKSNTAKVYIEIQDENNHPPVFQKKFYIGGVSEDARMFTSVLRVKATDKDTGNYSVMAYRLIIPPIKEGKEGFVVETYTGLIKTAMLFHNMRRSYFKFQVIATDDYGKGLSGKADVLVSVVNQLDMQVIVSNVPPTLVEKKIEDLTEILDRYVQEQIPGAKVVVESIGARRHGDAFSLEDYTKCDLTVYAIDPQTNRAIDRNELFKFLDGKLLDINKDFQPYYGEGGRILEIRTPEAVTSIKKRGESLGYTEGALLALAFIIILCCIPAILVVLVSYRQFKVRQAECTKTARIQAALPAAKPAVPAPAPVAAPPPPPPPPPGAHLYEELGDSSMHNLFLLYHFQQSRGNNSVSEDRKHQQVVMPFSSNTIEAHKSAHVDGSLKSNKLKSARKFTFLSDEDDLSAHNPLYKENISQVSTNSDISQRTDFVDPFSPKIQAKSKSLRGPREKIQRLWSQSVSLPRRLMRKVPNRPEIIDLQQWQGTRQKAENENTGICTNKRGSSNPLLTTEEANLTEKEEIRQGETLMIEGTEQLKSLSSDSSFCFPRPHFSFSTLPTVSRTVELKSEPNVISSPAECSLELSPSRPCVLHSSLSRRETPICMLPIETERNIFENFAHPPNISPSACPLPPPPPISPPSPPPAPAPLAPPPDISPFSLFCPPPSPPSIPLPLPPPTFFPLSVSTSGPPTPPLLPPFPTPLPPPPPSIPCPPPPSASFLSTECVCITGVKCTTNLMPAEKIKSSMTQLSTTTVCKTDPQREPKGILRHVKNLAELEKSVANMYSQIEKNYLRTNVSELQTMCPSEVTNMEITSEQNKGSLNNIVEGTEKQSHSQSTSL

SEQ ID NO: 10076 - protein, 1789 aa, Homo sapiens
MFRQFYLWTCLASGIILGSLFEICLGQYDDDWQYEDCKLARGGPPATIVAIDEESRNGTILVDNMLIKGTAGGPDPTIELSLKDNVDYWVLMDPVKQMLFLNSTGRVLDRDPPMNIHSIVVQVQCINKKVGTIIYHEVRIVVRDRNDNSPTFKHESYYATVNELTPVGTTIFTGFSGDNGATDIDDGPNGQIEYVIQYNPDDPTSNDTFEIPLMLTGNIVLRKRLNYEDKTRYFVIIQANDRAQNLNERRTTTTTLTVDVLDGDDLGPMFLPCVLVPNTRDCRPLTYQAAIPELRTPEELNPIIVTPPIQAIDQDRNIQPPSDRPGILYSILVGTPEDYPRFFHMHPRTAELSLLEPVNRDFHQKFDLVIKAEQDNGHPLPAFAGLHIEILDENNQSPYFTMPSYQGYILESAPVGATISDSLNLTSPLRIVALDKDIEDVPPSGVPTKDPELHLFLNDYTSVFTVTQTGITRYLTLLQPVDREEQQTYTFSITAFDGVQESEPVIVNIQVMDANDNTPTFPEISYDVYVYTDMRPGDSVIQLTAVDADEGSNGEITYEILVGAQGDFIINKTTGLITIAPGVEMIVGRTYALTVQAADNAPPAERRNSICTVYIEVLPPNNQSPPRFPQLMYSLEISEAMRVGAVLLNLQATDREGDSITYAIENGDPQRVFNLSETTGILTLGKALDRESTDRYILIITASDGRPDGTSTATVNIVVTDVNDNAPVFDPYLPRNLSVVEEEANAFVGQVKATDPDAGINGQVHYSLGNFNNLFRITSNGSIYTAVKLNREVRDYYELVVVATDGAVHPRHSTLTLAIKVLDIDDNSPVFTNSTYTVLVEENLPAGTTILQIEAKDVDLGANVSYRIRSPEVKHFFALHPFTGELSLLRSLDYEAFPDQEASITFLVEAFDIYGTMPPGIATVTVIVKDMNDYPPVFSKRIYKGMVAPDAVKGTPITTVYAEDADPPGLPASRVRYRVDDVQFPYPASIFEVEEDSGRVITRVNLNEEPTTIFKLVVVAFDDGEPVMSSSATVKILVLHPGEIPRFTQEEYRPPPVSELATKGTMVGVISAAAINQSIVYSIVSGNEEDTFGINNITGVIYVNGPLDYETRTSYVLRVQADSLEVVLANLRVPSKSNTAKVYIEIQDENNHPPVFQKKFYIGGVSEDARMFTSVLRVKATDKDTGNYSVMAYRLIIPPIKEGKEGFVVETYTGLIKTAMLFHNMRRSYFKFQVIATDDYGKGLSGKADVLVSVVNQLDMQVIVSNVPPTLVEKKIEDLTEILDRYVQEQIPGAKVVVESIGARRHGDAFSLEDYTKCDLTVYAIDPQTNRAIDRNELFKFLDGKLLDINKDFQPYYGEGGRILEIRTPEAVTSIKKRGESLGYTEGALLALAFIIILCCIPAILVVLVSYRQVFKGRQAECTKTARIQAALPAAKPAVPAPAPVAAPPPPPPPPPGAHLYEELGDSSMYEMPQYGSRRRLLPPAGQEEYGEVVGEAEEEYEEEEEEPKKIKKPKVEIREPSEEEEVVVTIEKPPAAEPTYTTWKRARIFPMIFKKVRGLADKRGIVDLEGEEWQRRLEEEDKDYLKLTLDQEEATESTVESEEESSSDYTEYSEEESEFSESETTEEESESETPSEEEESSTPESEESESTESEGEKARKNIVLARRRPMVEEVKEVKGRKEEPQEEQKEPKMEEEEHSEEEESGPAPVEESTDPEAQDIPEEGSAESASVEGGVESEEESESGSSSSSSESQSGGPWGYQVPAYDRSKNANQKKSPGANSEGYNTAL
